United States Patent Application Publication US 2013/0096032 A1 - sequence listing, part 13

SEQ ID NO: 397 - DNA, 63654 bp, Arabidopsis thaliana
aagcttgtataggcctttagggtcccttgcttcacacaattgcagagacatgttcatgaaaacctaacaaatttggccacaatatcaaacaagatgtttttaagatccaaccgaatgggggttacaaactgtaaagcctggttttgaatagcttgcctcaataaaagatgaattctgtatcatttccctgcaggcgtcacggtcttttctatacggggatatgaggctggcaatacagattaaaccagcatccgcaaagagtttggctacttctcctgcatttagaacaaattgttggtcttctttagtattttgccctttagagaagtttctttcaacattaaccagaatctatcagcttttaggtgtataccaatatgtatatcaatgaggtattggtaccatgtaaactatcactacatatgagacacctttttaaaggatttgcatttgtattagtgagtttcttcggaatcagactttcatcaactgaaagcaaaagatagtaagcaactatgtactacttaccgaccctgcgtatattttccactctatcctctgccttgaaaccaagatctttgttcaaaccatgacgaagattgtcaccatcaagaatatatgatagctttccccggttgttcagctctctactaagcgagcaagctaacgtgcttttccctgcacaaagtttgaggctaagattttagaatatagacagagatataaagaaggcatcttaagtaagtatcacaatgggaaaagaatttaagattttttagaagattgacctgagccactgagccctgtgatccacaccacacaacccttctgatttaacaacttctgcctttcagttttcccaatgggggattcttgccaaaatatgttcgttgaatttcccactgtcgacattctcaaaattctgcctgttaatctgatctatcaccaaaactcagagaaactaatccaccagaaacagcattcaatctgcaaagacacgttcaaaaaaaattagacactgatttctcaattgaccaatgaatatttttataacaatccaatggaacagaacaatgcaagcttgttaatgagactatgttcctccataaatataaactggaagaccaagagaataataacttttccgcatcatatgaactcactatgatcttgtgtctagaaaatgtaagtgctttcataaagacgtaggtttagaatcatagccaaactaaatctaaaaattcatagcagctacagaagaaataagaacaaaccaacaaaatttaaatcctttctgacaactcatgaatcgatttatgaaatctaagtcatttcctccaagctgacagagataatcacggattgaaacgattagattacaggaaaggggaacaaaatgggtccttttccatggcattgagaaagtaattaccttggaatcaatgtgctctggttctcgaagaaagcttttttgtttttgttttaccttttgcttttttccatctcctcgagtttcttggggtcattgtgaataagaaaatgggaaccgacgttaaaggagcggcagacagatggagagaagagaacgctcggaggtgatggtaataatgagacttggtcccttgagagagcatttaagtttagtttttcacttagatattattgggcttcaagcccataattttataggacaattgtggcctttaattgatttttgaattttaggtttgattttagactttttaatattctaaatacatgttttgcttttcgtagagggaatggccttttatatttgtttgagttattatttttcatttattaaaaagtgatagaaagctaatgcataacgttttaaaaatactaaatccttgacattagctaccatgaacagtattctttaatggggtattatttctgtatatatattggtttgaccaaagaatataaaaaaattgcttcatttaattgttatgcattagctttctatcactttaatattttaaatacatgtttagcttttcgtagtttgttgtttattagggaatggccttttaggagaaagtccaattggttttttttttttttttttttttcatgtattaaaaagtgatagaaagctaatgcataacgttttaaaaatactaaatccttgacattagctaccaagcctaccatgaaccggattctttattggggtattatttctatatattggtttgaccaaagagggtgagatcaaatttggaaacactatttacggtcaatgttgttattacgaaattgatatcttcttttggaaattgaaagagaaagaaatcttggtggaaatccacaataaatcaattatattagtggaagcataaatcatggggaatctcttttccaaaaagattctttcatggtggaatcttgtaattctatatgtttcttgatttgttgcatcctctcgtgtcctcctctaattccaaaaagattctgatttgagtatctaaaaaaacatatatccgtagaatcttttcaattaaaactgaatattgtatgtgtgtgataagtttatacgtttttttcccactagctcactaaagtgtatacgtttttttttgtcaccctctcacaaaagtgtatacgctatgcctatatgtgtaggggcaagtagaattgaataagttaataacacgtaaagatcttatgacatgcaagattcatttcgggtcgtatatcacaaatatgtaaatgattattaatatatatataatcgtagataataaaacaaaaaaaaagtattattatcgtcccacattaacgtattacaatttgactatgatttttcatgcacgagtatagtcatccggtccaatgcatgctattgctagatcattattgtatcatattttcttatttaaaaaaaaaaacaaattctgaaaaacaatatcttggtccttgcttattaggtgggtactaattaggtaatacgaaatgttattttttcctttaatctagatttaaaatgaataaaatgacagtgtgtgacacaataagataaattttacgagctatctctttcatccatgtaatatttataatcttgtgaaatcttgatttttcctatttttattctgatctttttgtaatgaaaagaatatatttattctgcttgattagtctacggatttccttttcattaatgaatattccattattctgatctagtttatacacatggtgaagacatgggctatttctataatctatatattttttttgtgtgagaactttgctaaacagacacatagtattctgaatactcaaaatcaggatcaattatgggtatcatcttatatgattattcatattccttatataaattatcttttattataaatataaataacaaaattttcattctcatattccataacacgaagtgtgtacgtatcactctatataaataaacttgcaataacataagcaagactcacatttttccaactgtcttcatatcagactctctgatcaaataaacccaaaataaagaagagagaagaaagccatgaatgctttagcagcaaccaacagaaacttcaagcttgcttctaggcttcttggtttagactcaaagctcgagaaaagtcttctcattcccttcagagagatcaaggttcgatgttttcctctgttttcttcttccatctataacagatctgcagaaccgatccggttcaagatcatttgaacggaactaaccaactattgcaggtggaatgtaccataccaaaagacgatggaactctagcatcctttgttggattcagagttcaacacgacaatgcaagaggtcccatgaaaggtggaatcagatatcatccagaggtttgttttactctgtttttttttcatcaaaccaaaacaaattcaatattggcatgaagtaaaccagatttcggtaatcgacaggttgaaccggatgaagtaaacgctttggctcaacttatgacatggaaaacagcagtggctaagataccttatggaggagccaaaggaggaatcggttgtgacccgagcgagctaagtctctcagagctcgaacgtttgactcgagttttcactcagaagattcacgatcttattgggattcatactgatgttccagctcctgatatgggaaccggtcctcaggtttcgaaaacatgatcttgaagtcttcatcttgtattttacgtgttgttcttgtctgaaatatagtgatgaaaattttcagacaatggcttggattcttgatgaatactcaaaattccatggacattctcctgctgttgtcactggaaaacccattgtaagtgaccgttctaatcgcggttttaggttggttcggtttatgtgttcaactaatctaaaactgaatgagatttgatttttgaggatgatgttttgagcaggatcttggtggatctcttgggagagatgctgctacaggaagaggagtgttgtttgcaacagaagctttactcaacgaacatggaaagaccatatctggacagcgattcgccatccaggtaaaagaagttacaatgtttagtcagagagattacttcggtgtcagggtactcatactgtctctgcgttttagggctttggaaatgtgggttcttgggcagcgaagttgataagtgacaaaggtggtaagattgtggcggtgagtgatgtcacaggagcaatcaagaacaataatggaattgacatcttgagtttgctcgagcatgctgaagaaaacagaggaatcaaagggtttgatggtgctgattcaatcgatcctgattcgattcttgtcgaagattgtgatattcttgtccctgcagctctagggggagtcatcaacaggtcttttatagtttcttgtctcaaaaatattaatctattctctatcatgatttcctctaaacctctggctttggtctgttttagggaaaatgcaaacgaaataaaagccaaattcatcattgaaggtgctaatcacccaactgatcctgaggctgacgaggttattcgaaaatctgatactttgtttttgctctttcttcttctcaaactcgcgtaacagaaactctgtaatatctgtctccgcagatcttgaagaagaaaggtgttatgatcctcccagatatatacgcaaactcaggaggagtcactgtaagttacttcgagtgggttcaggtaagactcgaaaatcaagactgtatgacctaatcgaatctaaagccactcgatcaaaacactgatttgtgttatatctgtgtgaagaacatacaaggattcatgtgggatgaggaaaaggtgaatagggagctaaagacctacatgactcgcgggttcaaagacttgaaagaaatgtgtcagacgcactcatgtgatctccgtatgggagctttcaccctcggtattaatcgtgtcgctcaagctaccactatcagaggctggggttcttgatacccccccatgggaagctaaagaacaagaattcagaaaatctttctatgttgttgatttgctttgtgatttgagtcaattctagagtaataaaaactatgtgctaattgcagtttaaccttctcaaattttctatcaacgaatctaatttgatgcaaatatttttactccatagataaaaccaaagtcttgaaaattgagaatacgggagaacgatagtcattcataaaacaaagggtacaagtttggataaggcttataaagcaggagaagaacctaaaatcttcctcggcctctaaagcttccacgagagccaccgcgtggtggaaatctaccacctcttggagcacctctacctctactaaatgatccacctcttccacgacctctactatcacctcttccacgacctgcacctccacgtccacccgttgactgacccctggaagaacaaagacacgcagttagatggagtttgatacaattaacaactctcaactaatagtgtatctaaagtctcgattgttaagaggaaaaagctaattgctaaagttaaacgagctcactaatgttatttcaagttcaggaaaagaaacttatatattgaccaatgatgtgttaagaagtggggcttactttggctgaggaaggaatcgagcgagtggcaaaagcttgtaagggtcgatgaagaacttatctcctggagaatacgaggtggctacaataccttccatcattttgatagaaaacaactgaagaagaatcaaaacagaattaatgtcagaaacctctagtttgcttacaactgaaagaagaatagagaacttacagattcattaattgggccaaagatttcatctactttcccaatctgagtcttgttctctaggtagatcggagcgttaaaatgaggaatcttctcctgtgagagtttggtcacagcatctccctcgcaagcatgaacgaaagttgcaacctctgtaaaccaaaagagagaaacctcatcacaaacgaacaaaaagaaaagcagtcagggaagtatatacatcaactagcattaaaaaccatatatactcaactcaaagctgaaactcggaataaaagacacacaaacccgtcaaaagcatcatacttgtaaactagctcaagggtaaaaaagtagcatgatacgattcgtcaatgagaaatcaatgataaaaaaagaaatgaactttagaacttgtccattacaactacacattcaagcaggaacaagctcattcatttcaaagctccgactacaaatcgaacatctttaatagttgctttcaaaaaccaattaacaagtaaaagctatgtcaagtaaagaaacgaacccacgacttcgctaggaggaccttcgtctctaaaaccaccaaagcgaccgcctccaccaccaaagcgtcctcctcctccaccgaatctaccgcctcctccaccgaacctaccgccaccaccaccgtctcgtcctccccttccacggaaacccccgccgcctctcattggtggtctcatcttttctcctttcacagattccgcaaagactgcgttttttttctctctgcctctcttctgaggagggttttagggtttaattgagagcgacgacgctcaaatggtagaagactctgggtatttagggtttttctgtaatcgttcgaccgggtttggttagttgaaccagatatctatctaacattgaaccaaatcggttctccatctctgaccgttacaagtgcttcttgaaatttgttgtttttgagatccctattttggacggtctagatctgatcatgactgtttatacgcaaaccgggccgtgggtgtaacattaaaactaatgggcctcatatatatcatcttagcccaatatagtgagaattcaaatagtaaataataatttgttttttttcattacaaattaaatatcatgggaaagaaaggaacaacaagtcttgaagcaaagaacccagtctgatgatataaatttgttgcaggatactgtcaagaactcattcaaagacgaaagatgttgtcgaagcagaagtagaagaagcagagaagagtaagaaaacagaattattcctagaaagatagggcaaaaagagaccaatgtgagaggactactttcaaggaaggtcaaacaaatgtcattgagcaatgagaagtggagagtcaaaaacagagaaactcgttggattctccacagtgctgtatcagcaagtaaaggcgtcacgaaaccagagaggaagaataatttggttaaatgtatcatgctctgagccgcgagtacatggcatcaagttgtggtaagacatgtggtgccgttatgagaaagtatatgaagcttgcaacactcataatagtacgattatccatgttcttacaagaaacagataatttttttgtttttctactgtaaacatgtaaatactaaagatgtatctgtttctcttcatgacctcatttcattgactaggtgacaactctgtttacgcattgaatatctgaaatatccagctaacctcatacattaccgcaacagatacaagaatatgctccatgtttcattatcaaactgtccgaccataacatattgatgttatgaacatatttttcccccatttgtcctgaaaacaaaagtcagtacaatagaaaacaataaaatggagaaggatcaaaaaatttataagtttcatgtttgaaatcctaagaacacaccttgacataggagctagggaaggaagaagtgcgtaaagtctcttggatttcatcggttattttacgtctaggtatactcaatataagagctgcttgatcagctgttgcagccattgatgttatcatgtatccactttccaaccttcgatttatatcttcacttgggttcaaaaagtcaacctccatcacctatagtatataaacatcatcaatatattatagtctagactctagggcaaagaagaaataggtagtaaaagtctgaacctgttcagagaagcctgagttcctggacattactacaccccaacggctcccacccgtggtcatggatgttacatgaaaaccttctttccactttttatccatccactttaatggaattgagtcaccggttttgtatgattgctggatataacgagttcctataacattacatgaagttgaattttaagtaaaaacccggcttgatgatgacacaatgaatcaaataagtaccaaccttttgacataacgaccaatgagctcccattatttgcaccagctatggaactgatatagtagttcttctcccattgtttcataatccagtcctgccaagaatccataaaaaaaaaaaaaaaagtggtgagctgctactatatatatagtcagagcatacatagtggacatgatggtaataccttggggaggaaggtagaagaaaatttataaacttgagaagtgaaaccagttccagcatccatgactaaggcccagagattagcttctgatgctacacagcttatgaaaaggccatcccttttacctttttctgcatgatgcgacaaccttgaatttgcaatgttgtggtgaaatctacaagagcaacaaacgcaaacctaaaaaatttcaaaccttgatactcaagaaaagaatgatggagcaaaacattcattcgaacctctgtttcataggaggacgtttggtatagactgaaatccattggaacgcaggagtacttccgattctttctattcgtaaatcactcaaatccgaacaaagtctacttgttgagtctttctcttcctctctgcgtaatgaaaacataagaaaaacctttgaaaatttcatcaacgatgactctatataataactaatactaattcatccagaattacttcttctcagggcatgaatcaagtccgccatcaccaattcttccgctgctaatcggtggtctcattttttctacttctctaatggattccacagagaccttcgtcctctctgtctcttcggtctcgagtgtttgattagggttttgattgggtattatcctaaatctgtaaccgtattaggtttagttgaaccgggaattagtctaacatttaaccaaaccgttttatctccgttcctttataaaagtttaaagtactgtttgattctttcttctcaagtaaccaaagtgaagattgtgcttttgtagaagattaattaactgtttttagttttaaatatttcttgaatcctctgtttctgggggatggtcttggtggtgatgaatcactgaaatagccaatcacatattcattataacaaacacagccataagtaatccacaaggacaacctatgactgaaacattccatgaaaacattgctccagaattacttcttcttggttgctcggtctgtggtgtagaacatgatacttgtatttgcattccacagagttcgttgttgttcacgtaaatgtttggatcgttgaatctatctagctgaggactttcatgaatttctactagtaagcttgtttttagctagctgggcttgtaaaatttgccaaagaggttgttgtgtgaaatgtctaaacccattacagaaaaaaggaaatctttatgtgaccgttaattgtgatttagcaatttcctttttcttttgaacctctttgcttatataaaataaatagatactctctctcgcttcttctaattctttccttgtgagaaaaaaaatcaaaactctctgtatttctcgatgacgatgatgatccaaacttctggaaaacgaatgtattgaattttttttacctggtctggtgtagattcctctctaattctttccttgtgagagactctgtgagttccggtgatgatgatgatccaagactttaaataaataaaattttaaaaataaatccatgttagtttcacaattattgtcagtgattgtgttattgtcagtgattgttgtgtaatctttttgaaggctgttagttgaaatttcataatgttgactagtacgttgactgagcatttgtttataagatttggagctgctcaagactaattgaaaacgatgctttgagtttgaaatatctgacttctattaagattgttatttatatcatatcttaacataattgcaatgttaaaatccaaaactggaagcaaaaaacttgagaccaaaagatgaaagccttcttagaattatatgttcattataacaaacatgttgcttcctcctgattctgtactcaaatcaggtacaaagccaaataagccagaaactgcataatcttgttgcagctcttcatcatttctagtaataatgatttcgtctcttctactcaattttttttttttccttttatcttgtacttactacatacatagagacaaatttcatttcattacacagtcacataggttggctcctggttaaggtttacctttggattgtactgaaaccgaaggctacacgttgtcaggcttctagagagagatcgtccctaaaaccctagagagagagtgagagaggttgaaacagtatactccatgtttcatcagcaaactgtccgaccatagcatattgatgcaatgtacagatttttcgcccatttctcctgaaatagaaaatgcaggtccaagtcagtacatagaacaaatggagaagaatccgaattttgtagtttcatgtagccaacatgcttcatttgtttcctaagaacacaccttgacatgggtacttgggaaggcagaagtccggagagtctcttgggtttcatcggttatttttcgtttaggtatactcaatataagagctgcttgatcagctgttgcagccattgatgttatcctgtatccactttcccaccttcgatgtattccttcacttgggtacaagaagtcaagctccaccacctataatatacaccacataaacctcgttaatacattatagtgctcaaaaaggaaacaaagaaaagttgaaatgcctcaggtaaagagatcggaacctgttcagagtagcctgagttcctggacattactacaccccaacgactcccagcggtggtcatggatgttacatgaaaaccttctttccactttttatttatccacttgaatggaaatgagtcgctgactttgtaagattgctgggtataaggagttcctatcgcattacatgaagtggaataagtaaaacggctttcatgctttatgaatcaataagttcattggcaaagttatcatgagacgtgactaccgacctttagccataacaaccaacgagcttccattatttgcaccagctatggaactgatatagtagttcttttcccattgttccatgatccagtcctgcaaagaatccagaaacaaatggtgagctgctacagtcagagaataggtatgacagatagatggatcctaatgcttcagctgttttaccttgtgcaggaagactgaggacagttcataaacttgagaactgaaaccagtcccagcatccatgatgatggcccagagattagctgatgatgctacacagcttatgaaaaggccatcctcattacctttctcaacatgctgtgcaagtcttaagtctgcaacgttgtaatgatatctacaagagcaataaagattgacccgttatgcaaagaaatgtaaagtaccaaaataaacaaatatttctaacaatacattaggatataagtcagtattcttcctcatcccaacttattcatctaacccaaataggtaataactaaagccaaaataaatgcaaagccttaaaccatatgttatgccaggaataaagagtgactggtcagctagaaagaaaaatttgattagtgagggttcaaaccttttatactcccgaaatgagatgagcaaaacattcaaatgtgtcagaattacctctgtttcataggacggcgtgcattatagactgaaatccactgtgtggcaggactgccgattctaattttcttccttggctgttcatcctcttccaaattgataagcaatcttcctcgcttttggccaacctattgatgcaaaagtaaaatatcagtacttattgtattatttataaatagtgaaaaataaacatatgaaccaaagtcagcacctttagagccccatcaattctaattggtctagatatagcacatggctcgataagagtatcaaaaatcgagataagcttggcatagttgggctcctcatcaaacttcatattcgtaactgcctcgaggaacagcttaaacgggggaggacaaaaacaacacatcaattcaggagaggttgacatctttttcttgcaaacaagaaagctcttgttatcaccctgtgaacaaaaaccatgtattattgactacaactgaaacttacaaggttctagattgtgagtagatagataaataactcacctggtatccttgccatggcaaccttccccgcatcagaaatattaatgtataagccaatgactccagatcatccctccgacttcctgtacgaccaagatgtgcatggcaacttgcataccttattgttcctctgcatatgaagcgtaacaaagatgtgagcaaaatatatataccaacaatagtaggaaagataacatacaccaatcaaaatacctaaatacatctggcctttgatcatattcaacatgctggccagagtgtgaatctttccatcttgatgctgaaatagatgatatatgttaagattttgaaaaataaaacgattgtaaatatttaacagatactcacctagaccaagatcgataaggtatagtttcttctcgtctgctgttccaggctgaccaagcaaaaagttttctggtttcacatctccatgcacaaaccttgtttgatgtagggaatgaacaatgcatgacagtcagctcagcaatggcgtaattttttggtgcaaatgtaaatatttttgttcgaaatagatggatttattggcgacaacaaaaattcgcactaaccccttcatatgcagtttttcaagaatagatatcgcctccactgcaatgcatgctaccatgtttggagacatcctaccaaatagaaaaataataaatttagcatatctgcatgagcatggttggtaagaaaatatagaatgataaaagtacttacgattgagccaaagaattccaaacatcccaaaggctaggcccaagcatgtccatgacctgaaataattataaatgtttcttcattaaagatacctgattcatctcaatgtgtgactaggctcatacgaaaagcttaccagaatgtaaaaatctccttgacgacccttatgatgtacagcaggaattccataacagctattgagcgtactttacagcataaaaaaataaaagaacacataagtaatgaccaataaggaaatagagaaacagggcaggagatttagaaaagaaacaggccaaacttacttgtacacttgccactcgtaaggtgggccaaagttacagcctttactattgcgatgttcaagttttagagctacctgaaatggaaaagaattaactcttcaaaaatttaactcttttgaactaacccccatgatttttgccaagctttttagtttctaatacctcaattgcatctgctccaatcctatcactgccaccactcacccttctgccaacataaacttgaccaaagccacctttaccaagtttcctctccgtcttataaacaggagaatttccaacttgtacctatacagaaaacgaaatcatagtgaatatctctctcaaaggagaacaaaaagctagtgcaaggcttaaacccattggcatggcctcgcaaaccacatttcaacaaatgactgttccaagatgatgttaaaagaatatgttgaactccaaaacggagcaccttctttaacctaattctagagttttgcatggatataaccatgcacaaaatccggtgactaatttcataaggttaacagaaattaccctctcagggactggacccatgctggaatcttcttccatgcctactactttctctgcgctaccgccttccgcagcaatatccttatcagctaccccttcaactcgatttaaggcaggttcagtggcccctatagcacctgcagctggacgaacctcacaaggttctggctctaagtctgtcaacctgatacccctgcccctaccggcagcagttggtcttggaggtgccgcacctttagctaaagcagcattcccccttcctctaccaccacctcttctccttgttgcagtctgaggaggaagtacgatattttctgcttgttcaactagcggagggttaggctgctcgtcaaggcgtctcgatctccttgctccacttcttaactctggcattcttactccatgcaaaacgtaaaagttttcttctttcggtcacctctttagattaacctgtggcatagaaacattgggagtatagtgtaaggtttgagcagtaacagacaaataagagcaatcaaccggataaaacagattctttatcaggaaagtgcttaaaatgaatcaatagagatagcaagtaatggcaatgtcatacaatagaagaaaccatagcttgcagtacgagcattcctttttcacaaaaacactcttaatggtgttgcatatttcaatcaaaagcatttttggccaaatttatatcttatcaatgatactcgtggctccacaatatcatattaatcaataatctataagctccctaatggaaaacaacaacgccaatagaccaacaaaatcaacaaaaaagctaactacctccatagatcgatcaacacaagcttctattgattttcattttcacacatatacaaatcgaaagcaaaagtaataagatagattcacaaaaagttgaaaagtataaacatttgcatagtcactttaatagaaacatgttcaatcatcgtcaaaaatcacgatctttcgcatagtgataacaaaatgtagcaagaaagtctcagctcaacaacatagaaatcgaatcgagatgtcaaaaggatgtttaccagaaaaaaaatcgattttgtttgtagagagcttcgaaaataacgatgatcggaagatgaagagagtggaacaggaacgatccagaacaacaacaaaaaaaaaaaactttcagatctctcctcaaagttccaaaatgagaaagtgattagcttccttctccaggtgtgacgattcgaaaacgcttttagagctgtgggagtaaacagagggagatagagaaagagacctagagagagaggtagttgcggctagatttagggttaataatgaagaagacgaagaagatgagacgatgaagaagaggttgcaatttttgtaaagagatttttgagttttggcaaaaaaaagtaagtttttttttttgtttcttgggggaaggattgattcacttttttcgatatttttttctacgtaaaaaatattactaataataatattttgagaatttaacactaattaatttttctctttttaaaaaaaatcatttttgcaacgttaacttttttttgttctctgtgctcatcatccctaatcgcagatgctacttattggctatcgctgttccgctttgggttcctcgcgtgcctttttttttgtacagatatttgttcatagaaatattctaaaatgttatatgaagaaaacttaattaagaaaatgctttgttatgtcatacgtgtaagcacatttatcacataaattttcactcgatttgttttgaaacaatgaaaaaaaagaaagaggaacttgtttctttttgttgacaacaaatcgtatgtcacaaaatccattaattcatggagatcggtgaagcacatcgcgctgtatgcataatggctttgtatatttgtattagaagtcaatgatttggaattaatatgtcaagtgattattaaaaaaaaaacgtaagattcaagtacatttcatattgtttggctataaattctaggcaatcaaattatttaaaacatgcttagaataaatatatttaactctaatatcagtcgagtgagatggcatagaaagacttcaaagttatcatgtgtttacttaatatcttatatatatttcttctctagtgagtgtttttaaagtggttaaaaatctggttgcaaaaataaaattgttgcatctaacaccaatttaatggtgcatatactgtatgtggaattaagttgttgggaatgtttttgagttttttccggccttgaggatgatgttgtccttaccgcctcatacaactaatgaatgagagaacatgtgagacaaaggataaacatattgatcagttttgtgcaactccatgtgatgtttgccaaaaataatttaatgctatttatatttgagaatccatcacgagcacaagttaaataacttttgaaaagctatacatagcagaaaccaaactctaaagattttgagtttatttatataaaaatttaaaaaacgttttccaattcaccataaataatttgaattaattattattttaaacatgacttgaatttgtctactatttttgttgtatgtgagaccacaatactagtaaccccacaaatcaacctaagattttatttttctcatacacctacttatgttagaaaatccacagaaattaaaatatatcaccagttcaaggcctacctttctttttttatagaagtttaggtaagaagcaaaattatggatcgatgcctaacataaggttcgtatccccttggaatcatctttgaagccatctaagactcgtttatgaagcatcatcccttttacatatgtgcaatgaaggaataattttagatgcgataccgatagatatggtgtgttgattagcttacggagtctaatcacatacacactcaattttttgtcctagccaagaaaacccatgtttgcgaccgatcattttatatataatttttggcctaaaatttgtaaaagttttcttgagttgaattcaaaattaacggattttcatattttaatgttgtcaatatgaaaaccatatttgtaaatttctcgcgaatgattagcaaagttttaatatatcccaaccaccactccttttgtatgtgtatgttacaattaacaaacatcaccatggttagtacttcctaaacaaatggaattcatgataatttctcttaagcaaaagtcctaaaagtgtagttaagctttactgattcgctatattgattttaagttaagaagaaaaagaggtctcactaataaaagcaatcaacgtcaaattttcagaatcttctcgtgtgacgaaaaatcgtcattaagaagaggagccttatctttttgggttaaaggagcaaaaaaatcgaaatttgtcgcttagaattcctcgtaaatttgacccatttgggggcatttctgttctttgttaaagatcaccgccttacgttaaaggggaaggaagacgaagaaaacaaaaaagaacggaactttctaaaaccccccacacaccaaaagcgctctctctctctgggtttttcgaggttgcgtttgctttcatctgcccaaccttctagggttttccttctcttaaagcttatcccttttttttgccttctctcgatatggctggagccgcttcttctgatcgtctcgtcactagcttccctcttctgggtacgttgcttttagctcaaagattaaaacttttttggcatcggaagttatcattttgtgctcatcttataacttgcgattgatttctacccttgggtttagggtttagcgactagtgttatcagtatctgtcgtaggttttctgtttctgataggattgattggtgtctagagttctctacaaacctctttatgggatgctagatgaaattttgtgtttttctgcaagttagtgtttttttatctgcttatgggttgaatttcaccagtaatttgccttgtttagactgtgcaattggagtttgaggctttgtcattttaaaatattaactgggctcttgtatataatcgctgcagatacagcagatttgtttcaggacttgtctttaggttcagatgcaaatgaagttcctatgaactttactaaggtacttaattactacttctttttgaaaatttaaagtttttggaacttaaattgtgttgtgtcgaaggatctttaactacaaactgttctgtggagaggtcttgctgctcatttaatgtgaatttgatatactgtgagttttttttttgttaactgactgttttctgagaagggttcttttcagcatccgtatggtcatgcaccttatggtgcatcttctcatggaagtgaaagaaggccaaacatgaatgctggcaatctgctaaatggtggagactcgattggttcatacccgtggggttacatcccagcaaactatccttctggtggctaccctgatccgaggtttggttatgaccgcaacagcaatcacagttccttttcacatctcatggtatgttggttacttcacatgacctctctgcctcttttctgtcttcatatagtcaagagaatgtgtgttttgttctcttcgtcatctctgctgggacttgggattttttttttgtctaattactggctacaactgttttatttaacagaatccacacagctcacaagaagtaccaagttttgaccaattgggatataatgatcatttgtattccaaccatggattgtatggactttacgggaatgtaattgactctggtcatgcatatggaacttttggttatgattcctggaaacttgggcgaggatggtatcccgttgatggttatagaaagaccagaagcttcaatcatgggcgtggttacagtgatgagaaagcagataggcttaatgagctatgtcgaggaccaaggagtagtgatttcaagaatccacaagttcttaactcttcaatgctagatgcaatgaagcaagacgtttcagcagtagatctccagcgctacaatggggagaatttccctgaatcatttgtgaaagcaaaattctttgtgatcaagtcatacagcgaagatgatgttcataactgtattaagtatggtgcatggtcgagcacaccaactggcaacaagaagttgaatgctgcatattatgaagccaaagaaaactcccaagaatgccctgtgtatcttctgttctcggtcagtatgaggttacttcacgtcttgtgcaatatcctttcagatttacattaagtaactcactgtaatcggttttatctacaggtgaatgcaagtgggcaatttgttggtcttgcggagatggtaggccctgttgatttcaacaagacaatggagtattggcagcaagataaatggattggttgtttccctgtgaagtggcatatcatcaaagacataccaaacagtctcttaagacacattaccctggcgaataacgagaacaagcctgtcactaatagcagagacactcaagaggtccgttgaacttcccctaaaccctttcttggacatgtttgaagcctaattgaattctaataaataatgattatggctgttagtcaggcttttaaactgtacggtgatggttttggtacaggtgaatctggagcatgggaccaagatcataaagatcttcaaggagtatatgagcaagacatgtatacttgatgattacaagttctatgagacaaggcagaagatcatcagagacaagaagatcaagcaaaagaaacaggtacaattccttaaaccctgctgcatctaaagcacattaaccacccctcttgatacagtctctgggattgtttcattttgattgttttgttatattaggcccttgatggagcttcgggggaaacaattaacttgagttgaaagatggaatcaatgcaaggaaagaagaagatgacttaattaaaagaacttagttttgaattatgttttttcttcagggttgggatttctaaaaacctaatacacatctttaatctgtgtgttttctctgcttatctaaacaaaacttacattgtcttttgttcctcttaaggggacgcacatctgataaaacaaaaactcaggctttccttcaaagttcatatcatgttattttcaagttatttctcttttagtccctaaactttcatataataagactctcatccgtaaatgtcaaaaatctcacattttggcccacatcaccataaaagttaaaacgacaccgtttagcacaaaaaccagaaggaatggtgttctctattcgtccctaaactttcatataatacaactttcacccctaaagatttaagatctcaatttttggcccccatccccttaaaatttaaaacgacaccgttgtgaactcccattttaaaacctcgaaagttttctagggcaatctcggccacttttactcacagaaaaccttctctctaaacttcttcgaaaatctcacagagcttcttcttcttcgcttttagggtttttgctctattgtttcgagtgacccaacttcgaagcttatagatcgttaccttagaaaatggtgggtatgtcgatgcagccatatggtattcaatcgatgcttaaagaaggttacaggcatctctctggtctcgacgaagccgtcattaagaacattgaagcttgcaaggagctctccaccattactcgcacctctctcggtcccaatggttcgtaatgtttctctgattgggatttgatctaatactgaaatgatgaatctcgttttctccgtttcgttttacttttacttgagtgttgtaagtaggatctcgcttgtgtatagtttaagcaagcttgatctgttactgtaaaggtgaagtctttttctagggattcagattcggattagaactgagttcttctgtttataatgtttcaggaatgaataaaatggttatcaatcatttggacaaactgtttgtcacaaatgacgctgctactatagtgaatgagctcgagattcagcacccggctgctaaacttctggttttagctgctaaggctcagcaagaagaaatcggagatggagctaatctgacaatctcctttgctggtgaacttcttcaaaacgctgaggagcttatcaggatgggacttcatccgagtgagatcattagtggatatactaaagctgtcagcaaggttggtgaatacctgaattactgttttgtgcttttcaatttgtttgtcttgagtatttgacgaatgctattggattttgattatgcaggctgttgaaatactggaacaactggttgagactggttctgagaccatggatgtacgtaacaaggatgaagttatttctcggatgagagcagctgttgcaagcaagcagtttgggcaagaggaaataatttgctctttagttactgacgtaagatattccttgctatctatttgtttcctgtttcgttgttcagattgttatttattcaagtttattgcagatttagattttacttgatgggttcatattatttctaggcatgtattcaagtctgcccaaagaatccaacgaatttcaatgtggataatgttcgtgtttccaagcttttgggaggaggcttgcacaattcttgcatagtccgtggtatggtcttgaaaagtgatgctgttggtagcattaagcgaatggagaaagcgaaggtgagatctctttcttttgtttatgcttttgacaaagttttttttgtctgaattgatcaatgtttgggtcccctatgaaatatagctttgtgggtttgtcttttctgtttttgatagcttaatgtctctaaatcaatttgttatgctttcttcaggttgctgtatttgctggtggcgttgataccactgcaacagagaccaaaggaactgtcctcattcatagtgctgagcaggttagatttgttactgtctttctaaaatttcaaaattacgattatggcttcctcaaagatggttgtgtatttgtaatcgttattgtgacaaatttctctttttatattggatttgtagctagagaactatgcaaagacagaggaagctaaagttgaggagttgattaaagcagttgcggaatcaggagccaaagtcattgttagtggaggatcaattggagaaatggcattgcatttctgtgagcgctacaagtatgtgtagaccatatcatgttatactcgtcttagctattgttattgtctgcattctgataccccattttttcttggcaggataatggtattgaaaatcagctcaaagtttgaactgaggcgtttttgccgtacagcgggggctgtcgcccatgtaagtgttattaattggctatctgaatgagtatctaagggtggttttatcctagcttttaatcctttaattatcaaacagttgaagcttagccggccaagccctgaagatcttggatatgttgattctatatcggttgaggaaattggtggtgtgacagtaagtactccgaagtcaattccaatatttttggttaattatttttgtctttcattaatcatagacaattctcggtcttcttttaggtcacgattgcaagaaacgaggaaggtggtaactccatctccactgtggtcttgcgtggaagcacagatagcattttggacgaccttgagagagctgttgatgatggagttaacacatacaaggtaatatctagcttcatttgtaccatctatatcgtataattcattaatttgtgactgttattacttcaattttattttcaggccatgtgcagagacagccgtattgttcccggggctgcagcgactgaaatagagttggctcaaaggttgaaggaatacgccaatgcagaaatagggtaactttcttttacttcattttttcaaaaattaaacatgtgaggctagcttttaaagcaaaactgtctatggtttggggactgaacttaggattcgcttttgaaatttcaggttggacaaatatgccatcaccaaatacgctgagagttttgagtttgtacccaagacccttgcagataatgctggcctcaatgcgatggaaatcatagccgctctgtacactggacatggatctggaaacacaaaactaggcattgacttagaggaaggtgcttgtaaagatgtttcagagacaaaagtatgggatctttttgcaaccaagtaagtttcagactgtctttttgccatcaaatatttctatcagacgtctctatacttgcttagcagttgttcttgaacatataaaaactggagtagaattttctgactggttacaaagattaccattcactttaattgataactaagacgcttaagtctctgtgcaggttatttgcccttaaatatgcttcagatgctgcatgcactgtacttcgtgtagaccaggtatgcacaaactgacttgatttaatctttggtgaacggagcaattttttattatattgtaaagtgttgattcatcacatgaagtaaaaagatattgttcggtgaatgcattatcttccaggattaagtcccttgttcgtgaaaactcttagattcaatattcagttccactgattgatctcatctactaaaacatgcatgtttatactcaaaatttatgtaaaatgtgcagattataatggcgaaaccagcaggtggaccaaggagagatgcagctcaagctgcaggtgctggtgcggaggaagactaagccggagaacaaatacctcgtagtgaaactctcttcttttgtaaccttctgttcctgaaagtctgagaaaattttggtatgtctcagtttaagatttgtgatctttgtaacgcaccaccaacttaagtgttttgccttctttttctgttttgccttgttttggctcgtctcaacactcagattttccggtttagctagtgaaattattactaggatttttggcttaactctgtattaatgtcaatttggtttctatttgaatcgacttttgaacaagtgacaaaatcattcggggaaaagaaaatgatccacacattgacaaaagaacaagagaacctaactagaaattgaacctatgtaaatatgtctggttaacagttgtttcgacttttgaacaagtgacaaattcattaggaaaaagaaaacaaacaaactagtatttgaacatgatccacacattgacaaaagaacaagagaactaagctagaatttgaacctatgtaagttctaagctttttaatgttcatcccttagactttttaagtcggaacaagatgaggaggcatcatatcatcctggagatacatccacatgaaagaagcaaaccctgcaactgcaatagagaagacactcaatcccaattttaacacacccttgctccgtcccagacgtgggtctagttcagtctccactgtcttaagtttggcctcagaatccaaatctgtttttggtttctcacagatatcttctgttgtgttggttggagttgtagtaccagaggtatcatatattgatgatgatgacgaggtttcactgtactgtagcagctgctgtctgttatctagtaactcagtgaatggatcttgtgcgaaaccatgcctgtgatgttttgaacaaatgtctcctgattgtctcttcttggtgtttcgtcttgaacttcttgagcggttggtcctagagcacacagattcattaaactcggagcttctgttccgctgatggaaccaaactgactcaatgttgccattttcaacaccagaacattgaatctgaaatcaaagaagcaccacaatgaaacttcactgaaaaaggacacacaagagacagctttaaagtttgtagtcttttttacctgatctccaattcttggactctcgataacaaaaccagtttcttggttattgtctccgaaagtcaccagaggagagcctgagacaagagttcttccactggctacaccagaaaacaaaacatcatactcgtcttgatcgtttacataactcctatcttgtctactatagacactcccatcatgttctcgcagacttgatgtagacttgactgatccgctgagcgagtttcggggcttgcagttctctgcatcaaacatcggatctgcctcacatattaatctctctgcttgtctcatggtttcatgagctgccattttgacataatgctgatctttttggtatttctccatctcttgatatataagctctaactcagaagaaatactcttgggattcagattcttcatcagaaagttgagcatctgtatagctaaaagccgtttctgagaatctccctcaacaacacctaaatccagaatcctcagacccgacttcacaaaaagccttgcatatgcctcgacagtaaaaggattgtgcttggaaagtgccataacaagtgccatatgagacttagcttcacttgaagtagcttcaagagcaacagctaagctttgacaaacattattaaccatttcactagaagcagatcgccaattatcgcaatccacaagtgacttcaagcaaagagcagatcccaaagcaagatgctgttgatgttgcgaatctataagagaatcagagagtggcttgcaaagagaatgaatcacattcgttttcttatcttctggtgttgtaggatcaattccatatctagccatagcagctactgcccttgagcaagcctgttgaacacgtaaagacccttcactggagctcaatgttcttataatcgccggcatgataatgtctatatgaggagcaatcttgactccatgagcacgagcaaggtcttcaaagagagatacagtgtaaccaccagactccaacccaatctctttgacatcagaaagttgagcaacaaaaacatgaaccacctttgcatccaaatctttcacaatcgatctcaaattgctcattgcagtcttgtgggaatctggatctttgtcaagattagccaactcttgtctaaatgccgaaccaagatttcttcccattctccccctcctggttcctctgaaaagcaaaaaaagccacaatgatgaattcagtaagctagacaataaatgacaacagtatcggatatattagtgtgtatcctagtaactttttcataatgagatactaaatgattctaaatcatatccgaataaggaaaacaaatcaatcaacaccaattttcatatgagaaatgtaccataatcaattccaaaaaaaactaaccaaaaaaatgaaaacatcattctccggatgaattatgaaattccgcagaaaattgatgaaatcgatgactttaaacttcccagaaactgatctttttaacaaaaaatgaacatcttgatctgtgaacataaatatcatcgaacacaaaaagggattatatactccgtattgaactattgataaatacacgaaaatggtccttttttgaaattcgaatcctaatcgaattgaattgaagataaccctaatcgagaaatacagagtttcgaattctgaaaagagtaaagttgatgaatagcaaagtaacgaagagaaccagtgtctgatacagcgaagattgacccaacaaaattaaagtaccaattcttctttcccagcaaaaatcaagaagacccaagaatctgagagtccccagataccaatagagaatcgcgcttcttctctttttacgatacgacgcgaagaagaagaaaaccagagaaaaaaaggattcaaccttttgtttttgaatgttgagagtttggtgtgatgggcgggtttagggtaagtctccgttatttttgggtctaaagcaaatctacccctttattttttttgtatttatcgaaatggtaccaacatttatatttcaaccaagtagaaccttggtgttattactgcaaatggtttgtagaaactaatttagtgaagcgactgcttattagtaatttgatagaatggttttgattagcttcttaattctctgaaccttttgaatttaatgtagctaagaaataggatacgttggaggtcttttacccaaaataaagatcatgggagttgatttagttatggggttgttttgaatgttttttacacaaaccggtaaagtttgtatgttagtctcatagttaattaaaactatatatatatatatatatcaatttgtctttaaattaaaaaaaaatatttaattcatcgaatcctgtttgattaaaatctctattattgtccattgtccagatacaattcgaccaaattttatggaaaatagtagtcaaattgcattcatattcttactgccaaatgaactttatttccataatttaccccaaaaatttggtccaaatccaatgccttggtttcaatttgggaacaaatatttgactacagtaaatacaatcaattgacaaaacaataaaactgtgtcggcaaaaataatcggtttaaaaaaaaaaaaaatctaagcttagattataatgttacaaagaaaattgttttgtttataaacttttaaatatatatctataatttaaaccacaaaaaagaaaaaagaaggatatttccccaattcgaaatgtaaggcttttctggacaaagaatcaagaatacggtttaaattgttaaatggagaaatgaatgggtcattaatctataaatatgaagatataaagaggaaagaatacggtttaaattgttaaatggagaaatgaatgggtcattaatctataaatatgaagatataaagaggaaaactgtcaaggagcgggtaggggtcaatttgttaaaatataaagttaggggctgatttgtaaaacaatatgaatgaacttataatgagggccaatcccaatttatcttcttcactccaatcacatcactgctaagactcattgaattcaaatcgttatgtctacacattcatcaatctcgcaaccgccgcttcctctcgccggaagagtcgccattgtcaccggctcttcccgtggtattggccgagcgatagcgatccacttagctgaactcggtgcgaggattgttatcaactacacctctaaagccgcagacgccgagcgtgtcgcgtcggagatcaatgattttccagttagggaagaaatcactggaaagggaccaagagctattgtggttcaggccaatgtctctgagccaagccaggttaaatcaatgtttgatgcggcggagagtgcctttgaagcgccggttcacattctggttaactctgctgggattctcgatccaaagtaccctacgatcgcagacacatcagtcgaagatttcgatcatacgttcaggtatatactcgatactgttcgttgattgggttcgttatagaaagctgattcctttagagaatttatcttcattgattgggttcttgtcttcccgctcaatactggaaaagtaaacttttttttgttaattagttaggttgatgattatgtataagttcttgatcaattgttacatgttctatgattttgagttagaaagctgattcctttagtatatttcaactgagattttagtggaatctgtgttcttgttcactctccatgaaccatgaaattatatgttccgtgttctttagatttgtatgtctaattatgagtcaaatgcaacatgtctcgtgttcttgtggctaattaatcgacttatgtttcttgtttcatccaatgttccatgttcgtgagatttgtatgtctaatttccaactaaagttccttcattcttgtttccaataatcctctgtttgtttcttttaaaatggagtgtagtgtcaacacaaaaggagcgttcctgtgtagcaaggaagctgccaataggctaaaacaaggaggtggtggtcggatcatacttctgacatcttcccagactcgatctttaaagccagggtttggtgcctatgccgcatcaaaggcagctgtggaaactatggtcaagattcttgcaaaagagctcaaaggaacaggaatcactgcaaactgtgttgctccaggacccatcgccactgagatgttctttgatggaaagaccccagagttggtggaaaagatagccgcagagtctccctttgggagggtcggcgaagccaaagacgtggtgcctcttgttggattcttggctggtgacggtggtgaatgggtcaatggtcaaatcattcctgttaatggtggatatgtataaaagagttcgtcttgagaggagcctcttcctgataccttgagaagcaaatgtaggggttaacttgttagaaataaaacattgggttcaattggaataataataataataaacactgaggttgaaaataaatgtcttaaccatcttaataaaacactcgtgactcacctatgtccaaaaaaatatatccaaatttcttcttctttttttgtcgacatccttttgttgttgtcgtcgacatctaacttttgaatttcttaaaaaccttatgtttaatttacaaactcgtgtcttcgtactgacacattcattggaaccactttatgttttatataattcaatttatcatcacccaccattcgaataatctttgggataaacgtcgtttgttgaaatacaactacagaataaaaaaatggtttaagaatatggcaagtgcaacaacacctaaaagtctaaaaacaatatccttgaagcatcttaaatctcttaaaatatatcagatgtgtgacgaataatcaacgcatgctcttgtatccataaacttcaaaagccaatcgaaagtattggataataataataataaatgcagtggaaaaaaaaagatgataaaggaattttcattacacacacacacctacccaaacaagtttttatataaacagtatccaactctcttctttaccctcaaacccaaacacataaaaaaatgagtcaacacaacatcttagaagctctaaatgtccgggtcgtgggtacgggtgatcggatcctgtttttggcccatggattcggtactgaccaatcagcttggcacttgatccttccttacttcactcaaaactacagagtcgtcctctatgacctagtttgcgccggcagtgtcaaccccgattacttcgatttcaatcgttacacaactctcgatccttacgtcgatgatcttctcaacatcgttgattcactcggaatccaaaactgtgcttacgttggtcactctgtttccgctatgatcggaatcatcgcttcgattcgtcggccggagcttttctccaagcttatcttgatcggattttcgcctaggtttctcaacgacgaggattatcatggaggattcgaagaaggtgagattgagaaagttttctcagctatggaagctaattacgaagcttgggttcatggatttgctccgcttgctgttggagctgatgttccggcggcggttagagaatttagccggactttgtttaatatgcgtccggatatatctctgtttgtttcgaggacggttttcaacagcgatctgagaggtgtgcttgggttagttagagttccgacgtgtgtgattcagacggcgaaggatgtttctgtgccggcttcggtggcggagtatcttaggtctcatctcggtggagatactactgtggagactcttaaaactgaaggacatttgccgcagcttagtgctccggcgcagcttgctcagtttctccggcgagctcttcctcggtgacttttttttatagatataaaaagagaacaataaaatataattggtggaatatgggtttagtggggtccacgtatcgaagaaaagaagggcctctatttgtggaggacagtttggcattgtcacaaatctagtaagataagattgttcacttgacacgtgactttcgcttttttatcactttttttcttgctctcttcattagtttataatcacaagtttatttcataaaataattggagaataaccaaaaaaaacattaaaaaatcctatcttatcttttactttcctctgaatatttctatccatattgttgtttcttgtaagttcctggaccttgtattgattgacgtctaacaacacatcgatgcaacaacaatctttagtctcaacactttcgattgttttctctaataaaatgatggagacaaaaagatataaagtatactagaaaattctagcatcacatcgtaaaagtatcaacaactaaaatgaagcaactatggctgacataatcttgatttaagttttatagtatgcaactatgcatgtgtgttctaaataattttaaagttaataaaattggttagttgtataatgttgttaccgtgctatatataatacaagttaagatttgagaaagtgagtgtgtgaattctagaagacaatcacacaacgaaaacacgtcctatcaatctaaacttttgagcaattcaaaatgcatacgaattgacaggttaagacaaatctaaaaacattttcagcaattcaatttgcttacgaatttgacagcataagacaaatctaaccatcaccactacaaattgcttgcttacactcttttagcacgttgtcatcatttctaccctaaatatagaaaagtaaatttatagtaaaatctacctaacagtatggctgcagcgtcatcagtttcttctccaccgctttgcctcgccggtcgagtagctatagtcacaggatcttctcgaggaataggtcgtgccatagccatccaccttgccgagcttggggctagggtcgtcgttaattactcaactagccccgttgaggctgagaaggttgccacggcgattaccaccaactgttcaaaggacgcggaagtcgccggcaaaagtccacgtgtcattgtggtgaaggctgatatctcagagccgagccaggtaaagtcgcttttcgatgaggcagagcgagtcttcgagtcgccggttcatatcttggttaactcagcggctatagccgatcctaatcattccactatctcagacatgtcagtagaactttttgatcgcattatcaggttaattttaagaaactcatttattataaagattgtttcatttagttattttgcaactctataacgtgaatttaattagatagtgatattaattagattcgttgtttgatataacagtgtgaacacaagaggtgcgtttatttgtgctagagaagctgcgaataggctaaaacgtggaggcggtggccggataattctcctctcaacatcactggttcaaaccttaaatacaaactatggctcatacacggcttcaaaggcagccgtagaagccatggccaagattcttgcaaaagagctcaaaggaacagagatcacagttaactgtgtttctccgggtcccgtcgccacagaaatgttttacacaggattgagcaatgagattgttgagaaagttaagtcacagaacttatttggtaggatcggtgagaccaaagacatcgcacctgttgttgggttcttagccagtgatgctggcgaatggatcaacggtcaagtcatcatggctaatggtggctgtctcttgtaaagaaagagagtggttattagtcttcttataaaatcaaaagctttcaaatttcaaacgttggatttgatctgatgaaaagaaacatcaataatccatgtatcaataaccagtcaaatacaacctcaagctctgctttatgtgctctgttctcggagataagaattagggtttgtgtactcttcttatcataacgttacaacatccctatacgtttaattatctattacgttattttgttaaggtttgtgtactcttcttatctctttaatcctttattaaaaaacagaccgaggaatatcaaagttaattagtcagcaagaagtcaaacaaaaagaaaaaaatatgttatgaatttgatccgatggaacaaaaccttcaaatgattgatgaaccaagaataaatcagtcatatacaacaaatcaaatactataatctcattgttctatatgagaagaaagaccaagccactcatcaccaaacacaacctaaccatcgaaccatagctataatcataatgaccagaagatggctctccaatctgaattggaaaattacattgtccttgagatatattttgagtagtaatcgttgcaagcccttcaaaatcgcacgcctgagcttcctgattttgcacttggaaatacatattaaacgcgtaagatgcgtttccattcgcatcaagattgccacaagatgatccataacctaaagcggtacagtccgaatgcgaacacgcgtagtttatattatctccgagcctactcatattaccacgaccattaggattaaacatacaccactggttcagaaagtactgaacgttttgagctcccgttaagaactttttctgaccttgtccacgaaaatctaccgggaatttcggttggccatcaaatttaaatatcccccaatgacgttcgaagttccctggcgctacacttttcgcatcttcatcgataaatccgaaaagataaacctcaatgtaacctttacgcataggagttccaacgttgttcgccaaccgcggaagcaaaccggaataaaaccgttccgcgtttggaacgtttgcgttcttgtcaccatccgtaggccaaccaacttctccaacaatcacttccatgttaccgtgattcaacgcgtttaaagaagctaaaagcgtgtcgaaactagcgtcgaagacgttcgtgtagataacgccgttatcgttaacggtgttttggccgtcaaagaaagcgtattcgaaaggaaagtcgctgcttaagtagagactgaggaaaggataaatgttgactgtgaaaggagctttgttctgtgcgaggaagttaacgatttgtgtcatttcttggataatgtcggaacggaatcttccggcggatgggacttgattgtccggaggagaattgtaaacgtcggcgtttaaaggaacggtggctttggtaaaatcaccaactccagcctcgtttaaagcggtttggatgttgaagagtgctgggtacgttaggtttatgaatgatccgttgtacgctgtcaagaacggttcgttccccactgcaacgtatctgcaaaattaaaataaaaaattaaatcatactttagttcctagttttaaaatttccaaataaatttattcttatgatttaatttcgataaataacggttatgatgcatcatacatgtatttttacgtttgtacctatgtaggaaatttcacatagtatggtatgcatctttgcaataaagaggaattgaaaaagaaagattccgacttttttttttgtttcagaatacgtttagatcattagcaataaatacttgacacacacatgacggtccatatttgagtaaagatgaaatatgggatataacatatgacggtccatacatgcgatatgcataaaccaaattcaaataattcactttcagaagtatgtatgtattatattatttaacaaaaatatcaaaacaaaaaaactaatgcatatagagataaatgaaatatgtggtgctcaacaaataacatgtcaagaactgatataataaaagaaaaataaatgattcaactataatagtcgtccaataatagcagttaaagaaaaatattgagttgtcaaacaattcaaaactcaaaaccaaacgtgtaaaggattggagcttacctcagtttgtctaatctagtgggctcaggactattatagacctcctaatccaactattattattgttttcaacattttattttctatcattttgtcatcatttttaatttttttgttcatacaaaataaaataataatacaaattcaaaaataatcaactgaaaataatgttctgtgaaattccaatattccaaaagggtctaatatctgatttccccttttcagatcactacccaatatctaaaaacttaagtagtcctaagaaacttcttaccttatgttaaataacaaaacaatgagtttcaaacttacttgatcttaacgccgttgttaaagttgaatctagagacgtttctttggacccaatctttagctctttgatagtttcccatcgctaggagcagatcattagggatagccaccatcacttcgacgccggagccggcgagagctcccatggtgtttgtgtcggcatcgaacaacttcactttctgtatattgttgtctttaagcatctccaccaccgtcttcggcggtaactgatgactcgccattgttccccagtttactcccaaaccagagacaccgccggagagaaaacatacggcggagatgatgataaagacaacggcagagttagttatagcactctgttttcgtcgataattcatttttcctttgttttcctctgttttttccgggaaaattttgtgcttggtattagaaaaaaagaaatcttggaaaagttttaaagtttgaaagaagaatctgatgggagaagaattggaagaagtgtaagagatatataaatattttttggtgtgttttgtgttctgtttgtttgttgtagctcgatgattcgaataaagaatagaaatgatttgtttaagctgacaaaaatctgagtgaaggaaagaaagaaggaagaggagatcaaataggtaagagagactatagaaggaagaagaaggagaaacagagtcaaaaccggcctttgaaacagaaaccgaccattaaaatatctatagtttttaattaaaaatatataatttggttaacatatacatagactagtattattaacactatgatctataccatgcatttatagtttatttagacctaaccaacatagttggcgaagtgttagctaacataattctattttaagtatatatgaaatttaatcttttgcacaacacttcaagtttttgattctatattgtgtaagtttacacgtacgaatagagaaaccttataattgcaggttaatatcgctttcatagctttagtatgtctaagtagaaaacgttgattatctttttcaagatcgagtacgtacaaagtacaaacgtattttggagaagtaaccctgatggtgcatgtacgtaaattaaattgcaattaaatatcagaaacatccaaatacaatacatgacgatagatattcttgatttgatagcacactaataaaacaccaattaattcatttaaaaaagacatataattagtcccggttggtcgatcgtttcgatataataaaaagctgattatatcaaccagaaaaatcatagaacaaaaatttgaaatttactagttattataaaataaacttttaataaaatatcaatggaattagggagtcgacatgaaaaaaaaaaaaaaaaaaaaaatcccgtacgcggttagatgacattcagtggatatttattatcacaatatgatcatgttgaattttctttaggtcaacatgtcatcaatattactaagctgtgattttcattaatgggccttatctactgagccatcattgggtatttttaacagcactaatgggcccttgtagctgtttcctaaacataccgttaacttccttcgctcgccgaacattgtctctgtcattgagtagcgatcaaagaggcatttcgtcgaacacttggcgagcatagagcgcgatgatgaaaggaagcaaggcgaatctctctgccttagcggagaaatgcaaagtaattactctcatcttaatctttttttccagaaactgaatctctttctttgttttgatttaatttttttttgctaatttcttctctttgtgcagactgtaatcgtttcgaactggcaagggtacctaaataccgtcaaacctgaagataaagctaggtaatttcagattcttctatgaaataagcttttttattcgttgatttcattcattctcgatcatgggactctggaaaattgtatattgaatttgagtgtttttggctgttttgcttagtataatacatacttcaaagattaagtatgtgatgagaagaggaaagccatatctctgggtaccagaaagtgaaccacacaatgtcgtaagcttgcgttcttctttttgttacttagttttgaatggtaagcttataatgcttaatagagaggggttttaaaagctaagttctgaatctctaatattggcagaacataatgtttgatgaacgtggatccttttctattgcccatccgtatcctggtccccttgcagctttattcaagtctataggaaaggtttgttgtgtgtttattttacactcgattctctgttttctctagattacaggttcttgagtctgtatctctctcactcaaacggggctaactttctttgcagcttccagaaagggttgcttttactggagagattgttcctgttaaagagaaaagggtaagaaccatggagaacttctaatttagagcaaaaagttatgactttctcatctttatttatcttcatcatgcttgtcttcttgataaaaggttgatgcggtgaagaaatatgtcgaggaagctatacagtcagagatgaaagcgattagcgataccccaaattctgtccgtagtattttgaattcttccgatcagatgtatgcctcccggtgtgacagtcttagagccctgatcaatgatgcaaaggaaaaatacgttatctataagttcgttccaaggtaagacacaaacgcatctctgtttatgcttgactaaactaatatatctgtttaagcttaattgaagaatatatcttactgtttatttaatcttacttacattcatttaatattcttaagcattaaaagtggacaatgatacagaaccgattactaagatcatcttgtgatttcaaaagataatgaattttcatcaagtagtgattatctggttttcttctcagctcatgtatgtttattgacccaaatggtacgaaagaaatagacttgaaggttttggaactgtcaaaaccagatccattaggtaatgaaactaaagacatttggttccaaactatagataaggttttgttatttcttaagctttttgcattggattctaaatcgcagggacttggtcgacaaaacttgtggatggaatcaataagaacgaatcaagaagacgagctttgattcttttctgtttatattttcttgatataaacgcaagggtaaaataaaagcttatatgatgagttatggatttcggattctctatgttagtttggtcattgaccggtgttatttttttttggcgagtaggatgcttatatggtatcagtggataggaaaggtttccacttgttggggaaggtaccgagtgaacaagaagctggagatgagtatcagtggagagagtttaggtttgagtttgaagaagaggtgaaagacgttgaagctttttgccaccaacttgtggaaatggaacaagaggttgtaagcaagtttactgaccataccggtttgtgatttccattcttttcttataaatcacaagccgggctggtttacatttcagttaaattgttatttaggcaaagagcaagagtgattaatgatactaatacagtatgtgtaatatttgttcgcaacggttcggtacggtttagttttgatttattgaagtttttgagctttaccgatataattccggttcaatgttccataaaagaagtgaaaaataaataaatcttaccggtacttgattggctagcttatcggtttgagtaagatgcgtttggtatggtccactgtaataagtgaaatcgaaacccagacaatccaaagcatcggctgttcatgaagattaggtttaaaattcttgagtgtcgatcaagttagataatctctgtatatataacgtaattaacaatgaatagtttggtacatgatcctcaagaatcttgattcaaaatgtatcttggattgaggagttccctaataggggttcttctcctgtgtgaactcagaaatgattgaaactctcttttaactttttggttaatctattctcagttccagctgaaaccattcaagtcgaactgtttcgtacgcgttgtacaatagttttcaacatgtgtgttgagatctagctctgttgttgaatccatgcctttccggtttcgtgtttcaagcttatgatcctcattgttgccttgttgatgttggcttttgtgtccgtgcaatcctactcctattgataatctacctggacttctttctgaatatgagattctttgttctgcttcactcaccattgttgaaagatatggattccctcttagaccttctgtccatgtgagctccattctttggaacaatggttcttccataatctctttctgctccgatgttgaatcaccaatatacgttcttagtcctaatctgttgttctctagcattttcgagtttttctgcgttccctcgcttgaggtcaggcaactttcaagagagcaatcaggtggatagtttgtttgcatctgttgtgagcataggttttgaagttcttttggttctaggaaactagagtttgggtactctgctgatactttagatactagttccgagagttgaactttggcagcttcgatcccagctgcaccgaggttctgtcttccaagagtctcttgtgctttctccaaaaccgattgcaggtacttcccttgagcctctatcctaagctgcaaatgtcgctgtacctggctcagtttaaatacgaatatgtaaactgaatgcttttatatttctacatactacaaacttatcctctaaacactgactgataattctaagtgctttatgaactgcaagaatctttaacgtgtttaattggagtaaagaacagtgttgtagaaatatgatacctcaagttgctcatgaagccttctttggacctctatttgcatttgcagtgcttcacctattggtgaattcctatgtgtgtaaacagatttggtcagtttgtgataagctaatacattagatggtatatagacaaatattcatatttatacttgtttggctgtggtccaatgcttaaattctcgctttgaatttcgtctgcatcaggagtcttttcttccatcatggtcattatacctattttgttgaagctgttgttagcttgtccgttgagattcttgctcagcctgtatttctggtagccaatattgtaaacttaataaccttttgtgaatgcaaaaaaagagagcttatttctgtttttgcagtttttcggatctgcaacaacatcagcaaaggtatatttaagtgttgaaatgatggcttacctgaagatgacttttgagatggtataaggtaaggcctggaatccccatgactttcatgattgtcttaggagtagcttctgcaacagaacagacaaaaagtatactatattaatatcaaaaaagcgtgctagtcattatataatcctcttgctaatgatataacactcactatctgctccaccgagttgattgactgcttcaatgaatctctcatgaagatctggagtccattttaggcgtggctttgcatcggttgataggataagtccagaatcacctggactattccctctaaggaatggatgcctttcagaagttatatgcattcttgaagatgagaggatgttctttccttggtgctggttttggtaatacataaagtctgtgcaactgtaagtttaaatctaatttgcttctctcagaagttccaagagagtaaactccaaaaactaaggaagatgtttttgctgcttttgcttacttgtgctttatatttttctcaggttggtttggtgcaactttgctttatataggaagttgaatggagaaaaagggggcaaattagagaacgataattaaggtatggaatatgaaaaactggtccaatcgatgcttttgttacttgtgtcctaatcgtttgaactgttatgtttttgtttgtagatgattattattttatttctatgtattgattcctatggactacaacttttcaacccaactagataccagaattgatccacaattaatgcatcatatgctcattctggcggagggaagtatcttattcccccaatttttcctaacttttcttattctttgatattttcatagtcacaacactaataacctctatctctcttggaatattcccaatgcttttcagttgtctggattgtttttcttccttattcatggagtcattttcggtctctaggtacattatgagtctaatgatttatatcaagacttttagtcagctgatattgatgatattaataggggtttattttgctatgtttggagtgcaagatgatgatacacttttgacctagtccttcaaagaagcctttagtttgagatagcaaacaagtgaaagtttttttgttgtaaccatattgttttgcttttgaaagatgataaagaatattttcatactgtccctccttcaacaagtttagtacttattctctctacacactataaaattactggagggtcccattttttcttaacattctttgattagcacaaaacctttggcccctccatgcctctgttttattatgtttgtagcctttcctgtctcatctaataacaattatctctccggtccatgtgagtgtgtctatattttcattcatttatagaagtgaaacattactgcatctattgcttggcaactttctcacactgtatatttcatgcaactatttcgatgatgtcttcagttttcgagttgtcgaatagtttatgcgtgcatactactgtcaaggcatctcatcttcaatagaataaggtctgccaaatgttgtacttgtgtaggctattactactgtatgtgcaaatgagaatatatccagttttttgagtcccacatttgcttaatgagtgctttgatatggtctattgttcataaggtataaaaaacaaatataatgttctcttgaatgatatctttgcatttattttataccgaaccaaactttttaggcgatctctcatggttgtgatttctcaaaacactttattcggtttcgggaagaaagaacctatcataatctttgagttaaaagtatgagagcatattaccaaaatagtttcatctccatgtgggtgagaatatgctttccattttgtgtgttgcaagttctttaaaagtctacttgaatgaatctcatcaaacgcactcttctcataaacattctttccttcttaccaaattatctgttttattacagcgcctttgtatggttacagagtgaagtagttcataatccaatcaagatttcagaatttagagacaattcttgatattgtttcacttttatgcacttttgttgcagggcctatttcttggagtaaaatcgaaagggatcattgtaaaatgtttctcaaggttatactttataatttttttacctaagtttctgttaattttgtaaatattacagagacaattagttcttagttcttgataatagttaccctctctttttttgtttgtttatcttttaaccattcgaaaggtcactgttgtaagtgaaaagaaagagatagagtgagagagggagtgatagagactgaatgttcttccttgtacattcatttagcagattcttgttcttgtttacgactaactttgctaatgatgcttcgaagctctcgcgtaggaagcatacttaaacacgtgggctacattcgccggaaaaaatacccacggaattacattcttttgctcatcaatttatattgatttttaaaaaggaaagaagaaagtgatgattcttcagaatgagaatatgagaatcaaaaactcagaagaaaataataatgaaaaaggtgagtcgcattctcaagtcaagaatctttgttattcatcttaacccgaaaaaaaaataaagaaatagacaacggaaagaaaaaaaaactatatgagaggttcgttttctttccacttatagctagtcttgtttcattatttgttaacatcaatgtctttgttgttcaccgttagttacttatgatctataattctatatttctatatcacaaacaaaaaataaaacttacttatataaatcaacttcatttggcagaaatcatttttctgttgtaagttgtaacattaaagtttgattgtctttagccgcgagtggtttgtttaatttttgttttttcggttcaatattttgttcgtttctttatgttttttaactccatagaaaatggggaagaaagattccaaatataacttggttaagcaaaaacttttaactttttgcaaaaatgtgtttataaacttttttttgcatcaatttccacctgaacgtagagtttttaattgaccaaaaaaaaaagcctgaaagtctctaaattgaaaaagcgaaccgccgaaaccttcttcttctctcaatatcccacgttgcaacgtgtctctgttttgttctcttatcttgtgttttgcaattagtgggctaacttttggccatcttctgtaccgaatatctgcccatttgggcttttataaaacatattgggccgacaaaaaagaaaaagcgaaccgccgacaagaaaaagaaaaaacgaaccgcaccgggttttgatgcccacttacgactaaaccggtcccgtctcgttaacggatcgatattaattacgtggcagtaatttattggctgaatatacaattaaagtagactcagccacagatgatcagacgtctgtgttgtcgaacagaggagacgtacaacgaaccaacaacctacgaagtacgaaacactcagaaagaaggagaagaaaaatccataaataattctcgttttatgatcttttaatgtctgcaacaatggcggattcaggaaaggagatcggatccagatgtcatcactgcgcaggccctcttacgaaaaatctggtatataccacaaaattcatgttgttgattgatgtctactttttctcctattgttttgttttagtgaaatttgtatttgtcgccgaatttattttcaggaaaccaacgaatggactgtggctccgtttatcagggatagcttctctatggtaagttagaacccaaaacaattgatgtctctcttgacgaaattttgtattttggtgctaaaaatcgactcttttacactataccttgctaaggctaatagttgctcagaacaagtttctgtttttttgcttggatcaaatggttattagtcatttatgatttgttattgattaattagattggatcagctgttggtggtactgcaagtgctttcattgggtttcaccatggtatttcttttaatctctcactgattgatttctttgtgttggtatcttcttgtgaattggtgtcccatcattgattgtttcttcttttaatgacttaagagggtaaaatatatatgcaacctgttctaagaaaaggtcggggtgaatgtgatgctcgatttgtgtggttaatgctgaaacaatcgacattctttttgtggtgtgatatgttttttaagtcagaatagaggaaacaacagtttaaagtttggaacttgcttgaaaaacattcagaatctctctttgggttgttgtgttgttgatagtgtggttcttgattttgatgcagtaatgccgattgtacgcaagtggatcaaaggacccatgtggttgcattttcttgttggtgtaagttatcaactaagaatatagaattctctgttacatcttttctcattacatacttaaatggtagtaaaagagcttgcgtgatgattgtatttgatgtatggtttgcaggctccacctgtgatagttgtttcatcagcctgtgctggacttgcaggtttattccatcctcctccttttcaatactcatctagacaactttcagcttgtgaacgtagttgttgttttactcgtctttattagcttaaagttatatgtctttgtttggtgttaatttttatgcggacttggtcgcaggtggcgctgtaccggctttagcacagcttgcatcgtcgtcttatcatgcggctgttcattcatctcagccaccacaagggcaagataagaaccaattgcacaattcctctaccatttctcctttgtagatgttacacagctctcttctcttgctctttccatgtgtataaagattcaactttgtttcctttggacaaaatgagagatcaaattgtctgaagatccaggtttgccacttgacacttttgagggtatacaaaacttaatgcagaaacgtgattagacacagattaatctgtattacgaattcaaatttagtgctaaacaagcttcaacctataatatggcaagcagacgtcgtgaaatttactgtgtatctcggtgctaattttgtaaacttgttaagaaacaactagttttattatcccgtactttttattaaagattttttattacgtggtaataatatttgttaagcttttttagtttgcttgtttcgtaatctctttttgacggtttactttttgattcttgagatacaagaacatcattaaatgccaataagaaaatattccatttttcatgtttaacattaatttgtttccaaaacggtaacaaagtagtatttccaaaaaattctgtttcctaattgtttttataatgaaaaaaagaagaaattatttacttgatacacaagaacgataataattaagacaatacaaaaaagtaagttgtgtccttttcctttttctataatgtaaacaagggaatttattttttatatatacctagatacgtgaccctaatcatcagaatcataaacctaacgagctctcgatcttctcttctcaaaagtctttaaatcttttctcttcgtttttaaagtttttttcacaatggagaagttacttgctggacaaacaaacaatggatccctcaagtcaaagacgaagatcgtctgtactctcggaccggcttcgagatcggttgagatggttgagaagcttctcaaagccggtatgaacgtagcccggttcaacttctcccatggttctcactcataccatcaagaaactcttgacaatctcagaaccgccatggagaacacttgtattccctgtgccgtcatgctcgacaccaaggtaacctaattttgaaccgtcttttcaacttctccttatgttgttttaagattctattagggtctagggacataatctaactcggtttaatcttttctggtttatagggtcctgagatccgaaccgggtttctcaaagaaggcaaaccggttgagctaattcaaggtcaagagattacaatctcaactgattacaccatggaaggagattcaaacacaatctcaatgagttacaagaaacttgctgaagatctcaagtccggtgacgtgattctctgttccgacggtacaatctctcttaccgtcttgtcttgtgacaagaatctcggtcttgttcgtgcccgttgcgagaactctgcagttcttggagaaagaaagaacgtgaacctccctggaatcgtagttgatcttccaacactcacagagaaggatcaagaggatattctccaatggggagttccgaataagatcgatatcatcgctctttcctttgttcgtaaaggatctgatctggtcgaggtcaggaagttgcttggagagaacgcaaagagtatcatgctcatgtcaaaggtaagagttaaaaaacagaacacattttttttttttaagtgaaatttgatttcttagttatatactaactttgtgatgctcattacaggtggagaatcaagaaggagtgatgaattttgacaagattctggaatattctgatgcattcatggtggctagaggtgatttaggaatggagattccgattgaaaagatgtttcttgctcagaagatgatgattcagaaggctaatgctcttgggaagccaatcgtcacagccacacagatgcttgagtcaatgaccaaatctcctcgtccaactagagcagaagccaccgatgtagctaacgctgtccttgacggcactgattgcgtcatgctcagtggagaaaccgccgccggagctcaccctgaaaccgccgtgctaacaatgtcaagaatctgtaaggaagcagaggatttcatcgattacgacacaatgcacaagaagattcaagatatcgtttcgttgcctttatctcctattgagagcttggccgcttcagccgtttcgacggcgaggagtctttgtgcggctgcgattgtcgttctaaccaagggaggttacacggtggagcttgtggccaagtacaggcctagtgttccgattctgtccgtaattgtgccggagattactcgtacggatgatttcgagtggtcgtgctctgaatctgcggctcatgtggcaagacgtggtttgatctaccgtggaattgttcctgtgatggcgacgggagcatccgctaggtcttcgaacaaggactcgacggaggagacgattcaattcgccattgaattcgcgaagaagaagggaatatgtaagacaggagactcgattgtggcgttgcacaagatcgatggctcctctgttgtcaagattttgaacgtggagtagaatattcttgttttgatacgtggtcaattttgaagtttcatgtttttgagggatcaattttggatttctgagaaagttaatttttgtcaacagtttagaatttattttttgttgggttttattgatttagacaattgtttttttttatcgcattatttaaaagtttccgacatttttaaatattatctgagagacgaatcaataattttgttttacttcgttaatattttcttcttttaatcaagctaatcatatttttaatctttaaagatttgacatgaaagatacgaatcaataattttaatcatttatttattttaatcaacaacactaatgaaacttttattaattgtgatcttaccctcaaaatttcaattatatactattttaaaatacatgggaaagtcattttatatgggctcataaaagcccatgggcttattttctattgtcggcagcttgattcgaaaaactgaaaaccaattaacgcaaagaaatttctgccaccgataacgaggttgctggatccggttgacattttcgttaccgaggaataattaatatgatcgaggcaaattattggttggtgaatggtgagtgagaccgtccatttatttcatgcacaatttaggcatttaaaatgtattttttgtgggtgtaggtctactacatacatagtaatagtataatgaaaaaagagaagaaaagatgggaaattagcaaatcatctagaaaccgaaaaatggaaagaagcggttagctttgctgcaagtattcatcttaaagctttgctttaaatagaaagtttcttataataatgtgcattatcaatataatcatccattttctatcattacttttggagtgatctttcaaagtagacgaactatataaaaatgtctttctaaagatgttgaactagcttaagatatgtagaaaaaaatcgagtttggtattcaacattatacttgaaattatatactatttgatttgacatttctagtaattaaactgcaatcatgagtccattagctgcatctacattatagtgagcatattgtttttttaattcttgcaatcactgagtttactaatatataattaagcttatagtactaatattccgtgtgaattcttaaaaactaattaagcttatactataatgtttgttgaaaaattaagtaagaaaacgtaatgtcattgagtgtaataactaagcttcttaagacagaaggcttagggatctggagtttgtttttacaagaaacccatctttaattactgcccttacttagaatctttctcaaaaatttaagttatttaattaatttgtgtcttaataaactaatttattagccatatgaaaaggcttcagattcagggaacaaatcacatgtttcgtgagctgtgttcattttattcagattatataggtcaatattttccattttatgtactgaatgaaaaaaacaaaaaaaacgtaatcgtacaaattaataacaagttaacaacataacctaagatactgagatgccaaattttcatattacttatagttattgctcgagaagtgatatagtataacttattgctcgttacttgagattttacaaaggaaccatactatgcatgagcatgcaggagtctcgcgtttcgaaccggaatttcccaactcatagaaaagaccccggcattagaaaaagagtttgatatataaatgacaaaagattcactaattaatcactatcttgtcttgttaatgttgaccaagaatcggtgaccattaagtatacatatatatgtgttattgcatttcattagaagattaatgagagactaatttaaacgaaataaaccatacgaataatttaaatgtatatatgtacaagttaatcacaaagaaacataaccccaatgacagccttttttctcaagctaaaaactaggtaagcaatcaccgaactaaagtccaatgcctaataaacctaatgatcttatgtacatgtatattatatacgaactaattacacgattaaaaacactagacgagtaatcaatatgccactcttcaatcacaattaacaaataaccttttcccaaatttagctagtatataaatcttcccagaagatcaagtcatcaagaccatcacacgctgacttgctaccatccatcattgccggattcatcatcattggataagaagatatctctggcgttgcggttgtgttcacatcggaactcaaaccggtttcttgagacacactcacaagagaatgctccaacttgatcatacctttgttattattgcctgaacctgccccgtagccgaaatcagatccggaattatggaccgagtggtaagggaaattgagagcttgggtaggaaggtaagtgttgtcgactggtgcggttgtaggatggtggagaacaggtttgagatcgtgttgttgacgggcaccggagaagcttgggccgggttgacccaagaaacccggatctatgagaggagggagagatgagaagtctaagagatgatcaatgttatcaagagaatcaatccttgagagttgttttgtagtagtgattgtagtactaggagcgttcttgtgaaaaaccctacacaccacccattcatcctataaccatcacacaaacaaaaaaaaatttagcatttagattactaattaattaagttcctaattaagtttcatgttttggattattcttgaactaaggcatatataaaaaaaacgaactatagataaacatttctcaacaaacaaattttgtatgcatcaaactcggatctattttattaaaccgaatcatatttttgcaaaaagagtggtaaactttgacatacccttgcggttttggggaggttatgataagaatattttccatcaagacgatattcatgcataacccaattggtcttttcacctttaggagctcttcctgtatagaaaacaagtgttttcttcatcccaacaagacaacctttgcctctaaagatctccttgtccttcccggtcgccttccaataaccagacacggtcgcacggttcgtcctcatcccggtcggatacttccgatccctctggcagaaaaagtaaaactccttctcccccatctttgcaatctctgcactcaaatcaagaatcagaatcttgatcgatgatgatgtttgaaatggtcaaaataaaaaacgatcttgacttgacttacttggtagatcccatggctcgttcttgttgaggtcggcttgaccaatcgctgccgcggtaaatcggatgttgaagaccttctctttgaggtagtgagttattatctcttcatcagtagggtgaaaccgaaaccccggaggcaaatccaccacctcctgatctcctccttgattcacaactacgccgccttcttccaccatctatatatatgtatgcttgatcaagaacaagaaaaatccttcaagaaaacaataactttttgaggagatcgatcgatggatatgtgtttactgcagatacacgttggtgctgaagaagaaataagaggttgaataaagaaagaaagagaagcaaaggtatgagcaatttgaggaagaactatgcagttaaaggaaatgaaaataaaagtatgtgaaggtagaaaaaaaatgtctttatatagaggaagataagagctaaaaaaaacaataatgtttcttttctttatgttttgtttttttcttatttttttggtgatgtagaagagacacgtaagctctaagcaacttccttacttgttgaaaaagccccacaattagaaaacactcaaaaatatcttaaatgatatctcatatctgtatgaaattcagggtaataagcaatttatatatataattcaagataagctaaatattatttttcttcttagtgtcaaataaaaactgtattttaattaataaaatattgctatatgtaacaattaatttattgggatggttatggaattttccacaaattttcatattttagattttagatcctaccattaaattttagatccatagggtgacacgtctgtcgaataattttatgttccatatgagggttagtttattttttccttgtacattacataggactatgtcagtatagtcatcttatggggttccttagccaaccaccagaaaaaaatgggttcgatagccacatgaccttcatctaccttttgaaaataacctcttttggaaagaaaataaagagtcgtatggcagaaaaaacgtttgaaggaaaatataccactcaaaagtgttaaaaggtttggctcctcttcgtgttatgtggacccatattgttgaaaatatgtcccttttaaaattttattactatttaattttattatcctactgaaaggaatccctaatgaaaacctcaaaagaatttgtatgttaatgttcattttgttaaacttgaaattttaagtttctatgaaggtttatatacgagagtaaatgataaaatcgatcacataaaattgatatgcagtacatatagctatgcctatgggtgtggttcaatgagttctcagttcggatatttatttggatgtggtttaatggataatatatataatctaaattatatatgtgatcgtactttgtagcttgattagacatttatcaaacgaccctaagagtttagcaaccatttgtggtgtgtttcttaaccttaccagttaagctgaaggaataaaatagtgtaaattatcaaccaattggtggtagtgtgacgtaatcttcaattttattattggtatataaataaatatatgtttattattttagaattcatatcaatggagaaaaatattatgtcaaaacacaatgatcaaattatacttatatttaaacagagttaaatatcaatgttaacttttatatataccataagtaataagaacatatatactataacttattataatattatatttttgaagtcatagtttcaatgagtaaattcaccgtaataagaacatattctctcttttttttattaatgtcggcataatcatgtgtttaataaaaaggtcaaagaaaccaccgcctgcaaagattaactaggaaaaaataccaaatcaaagcgtcctaatttaatttttgaaattatagattaaaatttgtatatttgtgctgattgaacacaaaaatattctcagatgactgtccatatttcaaatgaaaaacatgattgtcaattataaactgccgctgtagatttttaaaaatttagtcctattatcaacaatttctacaattcataaattatctgactttcgagtcattggctcattgcctatgaaactgaacaaacaatacgataaatataaattcagtatttatcgaagggagtatattaaaagttggggatttaatgagcgaaaatacacgttgggttttctggatatgatgactactagttggggtttgtgccaataaagatagttggtaattattaaaaaaaattagaataaaattctctgggtgctatatataaaaagtttcaacgatatgacgcctaaactccaactaacttaactgtctatttgtctatattgtccattacattccaattgtctgggtatttacatataaaaaataatggatagtaatttccaaaatatcatattatttgatttactagatgaacgcactgataatcgtaatcaaaattcaatttaatttagttactgaatcccttattatttgaactaatatcatgttcaaaactcacatatggttcgagctggtggtctgcaagaagattaacataattaattattcatatgtacgtattttaacaattaaactcctaaattgtactatttccgatattatagaaaaagtcagtcaataatagtatttgcagcaactcaccgacttaattcatcattttcaaaaacaattaactcctgctttctaatgcaatcacgatttggtctattcatattattgaccgactttttattttcttaccgatcgacttcctaaacaagttccaatatcacctttattattgtatatgtccatcaatagaaaactgtataaaaataaaaattgatattacaaaaaaataatgtggaccgcaagttgtggagattatagaatttaaaagtacactgttcttatttttatgtagccgaagtttctccatttatatatttgtattaaattcgtatatttttggcgagttaaattgtaatattttattataacttaattttctaattaaattatttttttattttttcaattatctaattataaacagtcacttatgcaaatagtttctcaatgattactacaaaatttctctctacataaacgtttttttaattatttttagttatgttattctctctcctcctttatgaattatttatattattttagtaaagagaaactctcaaaattgtaatcgatggaaatgctctaatactgtagtttaagaaagttgacttttgcttcaaaaagcaatactttaaagcgaaggattgaatgacgtaatctgacgtaaattatggcatcatcatcatctcccttattggggtatgtggacccagcccaggccttttaactgtcaataacattaacatacaaactcactgtcctcatctgcaaatcagttttaaagttatttttaattagactatacgaaaagcatgacaaaataaaacttggaaccattacaaaatcacaaaagtaacacattctgtttgagctatttgattatcatcagcagcttccattaattataaattttatgctgtgatgatgatgatgatgatgatgatgatgatgatgatgatgatgatgatgtcattcaccctttttcaaagtaatggctaccaccacttatacacaattacgcagatatatgtggatttaaaagtttaatatttatgtgtgtattggaaatcttgtaagttaatcccactaaatattaatttaagtagtagtattgtagccttcggaatcaagtgggtcgacttattataactatatagtatatatagctaaataaaatatagacttcaattatatctttcttaaatctaaggcagattatttcagttgcatctgcaactatttatttaggatgtcaacattactattggctattggtgccattctaaattattggcctaacctaaccatcaagtagccatatttatttatcccataaatattggagtttttaatatccaaacaataatctgagttcaatgtacaaagataagcggtagagacaaggtgttggaaacatatatatatatatatatatatatatatatataattaatcgaaagattatatatgtggcttctattgttgtttttagtgatttacaattatgttggtctcagaacatttatactatacacttattaattagctggacagtatactcactaatcttcaaaatttatatataagatcaaaatgtatcaagaggtccacgtatacctattgactgaaataattagtatcatgcactaaggggtcatataattttattttattttggcttgagggggccgtatactatataatcagatggacttctcaataaagctaattaataaatcgaacaaatctctagttttggacactagtatacccatttggtgtatatatcattgaattttagaaaaaaaatagtaacgatttggccggctcgcgtcacctcgatattcaagataatatttttaatcagcctcagacaaaatttatttaatttaatttgtcttaattcgtttctaaaaattacaaaaaaaaagaagaagcatattttcttaacatagaggagttaagcgttggactgttctcaaaatttagtgttgcacagtatttagaatctgccacgaaagattggacagtctctcaaaactaattataaagttttctataatctccaaacacatcatttataaactttctattcatttaaaaaactgaagtattaatattttactgagtgcagcagcagctaatgtatgtgtaatctttttaatcagtgtgaactttaatttacatatgctttttccaaccaacatatgatgatgtcgtaagcatagtctcgtttgttttgtctgtatatatgattttacaaaactataattaacgttaacatgaaagagaaagtgaaaaagaaaaacaaacaaaaaaaatagcgaatgatggcagtaatagaaatagtactcacgtcatcacgtaatttgtgtttcgttcttgaattttcagcacctatgaaagattaattaatactactagtttatttagttaatttgatattttgttaatgaatcaaagtcgtcaagatgacttaaaacaaattgtagattaagcgaatactactattacaaacgactttatcaaggttcggtgaaattgctccgtcgttacaaaacagacacacacaaacatttggatcgaaatttagaggggattttttaaaaataaaataactggttttaataatgaattttgcatacaaaaatgaagacttacgagaaagttcagacaattgttcggatagaatttcgaccaaatttgtgaatcggatgaggataaaaactttgtgttgtgaaaggaacccataagattctcttcgaaaaaatatgtgcttataattagctgtcgttactatgatggagatataatttggggttgctaccatattctaccgtagaatttcaacgtacgtgtctaaatgatcccacaataatgcagaaagaaatgaaacacaaagtctggcttccctaagaagccttagagcatcattattgctagtgtcttagattactcttaacttagttcttagaattttttatgaattaattttaaaatttctgaaacaaagactaagaaaacttcaatttgtctcttatataagagactctcttaacaaatatatgattaaaaacattaaattcataaccaaacttttctaagaattaacctaagcaactatcaataatggtgctcttagcaatcatcaacttaagaaatctcttgtcatgtactatttctggaaaagtatctaaatgaaatgcaaattttctcgaaattttaagctcactagtagtagttataactgattcatcgtaatttgcaaaacaaaatatataattttaaagattactctattgttacatacttacattttttttgttaattatctaaagtttcaaagaaaaaacagtacttctgagtatataaataagattaacatatagttgtgagtatacctttacgaaaaaaataaaatgagtatactaatttttacgaaatatcccttggagttttaacatacaccaaaataataaactgattaacgcggtatgataataatagatacgtgttaattgttactaaataacgataaccgacttgtttagtgtactaagcacaatggattcacaccagattccaccacaacgcggtttagaatcattctagataagataaccgacttgtttgatgctaaatgggctttgatactaaatgggcctttatattaaatgagccgtttatgtccatttatttatctttcacacttgtgagttagcatgatacaaagccgaataagatgattcaccaattgacgacaaaacaaaaaacggatgactcaccaattcgttgtgtgcaagtaagtaactactatgaagatgatctttctagggctacgaaatagagaataactgggattagtctccacgtggatttacgagaccgcgcaatcgtaaaccgtccaactaaattgtactaatctttattattatcatttaattatagtatcgttacgaaactttataatatgaaaaattgttttaaagaaaatgagaagaagagaaattgaaccataatattctataaaataaatatctttccttctttttttcccacaatagtttggtaaattactaacaacgactcctacttttcaatcacataccgaatgatccctaattcgtgattaggttttcaaattaatattctctctagccttgatattgaaggtgagaactcatcatgagttcctggttcaggaaactaggttgttgcatcatactatgatccatttgatctatactattattgtaactatatgtgttcatcatcttcttcgaagcgtttatcgtttcttccgcaaaatccactctctctcttttgcttccgatgccgcttgtctctgaagtgggagagctcaactgcggtaacttctgatccaagtaatggtttccgtaaatgtcaggattagagaaattgccaatcatgaaagaaaaatctgattcagaacgattttccggggtttcgtttagaaaatttgcgagaaacgtcaaatctgtagcgtctagtaagtttgagaacgaacaagaagacttctggcgtttaaggggttgatcattttgcaaatttggcaaaaaggttccgcggtctacgaatggttcgttgtcattttcctcatgctcttgattgcttgtgaccaaagcaacatcaggtgatgacaatgaagcgtgtgatttcttgtaaatccggcaaagaacccaatcatccagctgcatgaaattaaggaatataaaaaccataagtattggggcaaaataataaaacaatcaaagtaagtggcgattgtgaaaaccaaagagataaataatggtttattccagccctctaataaccggtttatgccttccggttaaaatagttggcgataccaaaaatacaaattttgaaactgaaatcaccataataatagtctatatctttagtagtagcaaaaacttactctcatcgaatattctttagaattcctatctccaaaattattattaacttcgctaccaccgctcctagaagagttaattcttttgggagataatgaatcggcaagacgatattcatgcatgatccaattggttttaacaccttttggaggctttcctctataaaacacaagagctttttttataccaatgttttcatgaaacccttcaccatttggtaccgcaatcaatttatctgttccggttgctttccaatatccagacgcagctgctctgtttggtcttgctccgtttggatatttcctatccctcggactgaaaaaataccactctttctccccaaatggagccttagctgatgatacaaatatataaacatagttatatcacttataaaaagtagaatatatatatacaaagataaaagggaaaatatattggttagttacctggtaaatcccatggatcggatttgtagatatcgacatcggcgataatcgaaagcgggactggggaagaggaaactttcttccttaggtaatggagaatgagttcttcatctgttggatgaaatcgaaaccctggaggtaaactcgatcttggatccttgcttatcattgtttaaaggaatgatattttaagtagaaagttttgatagaaaagaaagaacaacaaaggagaaaatattggttttggtgaagagctatgagataaacaaagaagtgagccaaagattgaaatttttcgtagagcaggttttgagggcaatttatggtgtgtagagttctgtcgtttagtgcttgaatgtataattttttaaagaaaattgagattgaaatatttatgaaaaatatagaatattattttctgtaaagtagaccggaggaaaagatccaaaatagtgtcaagtagtggataaaaagtaaataaaatcagttagtattaatatcttcaaccaaataaaagaacctttttaaaaaacttattagaactttatggagaaactagcaaatatcgtcatcgaaactcaagcatgttttatgaacagaaacttgaatatataatttatatatttcttattaatatcttactcaattttggtcgttttgtgcacgtagtctatatattctcctaatattaaatgcattatttatgtctaattagactttttatgtaaaggcttcattgtttatacattcaaaacaaagattgctaagtggaaaaatatatatatatatatatatatatattgctaattacgaacgagttcgtagtatctagactttattattttgtaaagtctgagacccatgtcatattaaattgcaaatttgtatttgtaaataaaactcaaattggatttgtttgataaatgtatttctagggattgaatccgaaattttgagtacaaaaaatttatatacttatgagaaatagtcctcaagcttttccaaaaaatacaataacatagtaagaacctaagtatgaacacaaaatttccgtttcaatatttaataaattatttaaattgtttatatgtgtcattgtattgtgtgtgaataattgaagaagttttgttagagaagtggacccaaatgagacagctgtgtcctctgggatgacatctgattggttagttttacttttgtcctaaccatatccacgtaagcccagatgcggctgatgacgcaatcatcatactatagtcctagtttattgtatcctttttctgagtgaaaaatttcgagaaaacttgaatagaagaactatagcataatgcatattcgtatatataatgtaaaataagatcatgagactgtaaattcacttctgttttttgtttttgagttatttatcttcaatttttgtaaagaaattaaaattaataaaacagtacgcacagcctaacgtattgttttgaatgcgatgctcgctgctttatctgatttatgaacttttccaattttgttaggttaattgaattttccctgtttttctagcatatatagcaattatcatgcataaatggtgaaattaggtagtatgtacaaaaatagaaatcaaacatatgaaagtgattttcttcttccctcaaatataaactaaagggataagaacaacttaaaatgataaaatcctttacacagttgttaatgtatatgcataaacaaaaagtatactgcatagttatacatatatcatgcttaacaagatatgtatctcatctttgctgtgatgtagaacaaaaaaaaatcatgaaaaataataaatcgagtcaaaaagtaaaacataaaaacaaaccgagatctgattggattaaatgagataagaactaacccaaaagtttgaatcaaatccatatataaaaataaatgtgtaaaggctaaagatcaacaataatttgttgacaaaatcaaataccaataattttgattaatgttagtagtataacttataagtaataacgtgttttgtctaatgaagcaagtattaaactaatcttaatttgatatgtttcttgctgggatgcaaaccaaattaaaacatttaatttgtttcttctcagaagagcaaacgtggaatcataaacacccacatgatctagttaacgttttctttaaaacgcagtttactaagttaaatatcctagaattatgttatttatacatacataatttagataagtttttctacttaaaaaaaatgacatgccacatcggcattcacacacacacgctaaccacacgctaagccaaaatacccttgattttgatttcttctcatttttatacgtggcagttatttacttttccagctatttatatttcggtaatcgtgcagtcaatcaaaacaatagtttttgataaaaaaaaaagagagagattaaaacaataattgaactttagttcacccttcaccgtataaaagatacttcaaaaacaagtttcttctatttagaaaaaaatatatggttgtcaattactcaatctgttttttattatttaattatttacaaaaaaaaaattgttttaaaaagttgattttgtttaagtttttgtgcactatttatattgctaacgaattaaaagatttatgaacagttttttattgtactgcatatgtagttaattttttttgttaaattagtttcattagttttattaatagtcgaataatgtgacatcaacgttaaatatactgattatgaaaaagttcgcatagaaggaaacctatgacaaaaactgcaactgtaagtaaaggatacatgttacacggcaagtctttcaaaacatctcgaataaaacactcggcaagaaattgatcaaaatgtgactttttggtttggtttgtatgaaatggagtttctcatacgtagttatactaagattgtcaaagttaagaaactccaaaagtctccttcaaatattaaaatatataatcaaccaattaaaacgttgtaataaactaagaagcatggaagattatatagtcaacgtgcatgcaaccacacgtgtgacttttgattcgtctatgtcaacaattttgcacctagctagaattataggtggagcatgttcatttgaaatgaatcatatctatgcttataatcgttttctaataggaaaaagttactctgtggatagtttagtttgaataacataaaaataaattataatttatatacgttacagctacaatgacgaatactagtgttgatttgaaaaagagttataccagacgagttatttgaatatagaccagtgaatattgtccttgttttttaatatttcagcacatatacctcgatcattatgaaatatagagaatttaatatttattcggatgttcaagaaatgttttgagaagaagtcccttgtcttggtcgaagttctaaagtcgtaagttgtaaataaaataataatgagaaatagacagttgtagaaaattggaaaacgccaaaatctaaagaaacctactttaaaaattataaatttataataagacaaaccataaaagatagcatatgccaaaagaatgaagtaaagtccacactcctcataaaaagttttgagattatccacttgaatgtaacggttttattttattttttcgaactgaaacaaaaaatgatgataaaatgatatatggatcatttcattgtattattcctatatgagatttaaatatttgatttcttcaaatttggtttatttactacgactagtactgtttatttgtaatctttttttcaatttagacatattgatatctataagtttctaaacatacatattattgatttactaatatcagtgctcatcttaattgacatcattttcttcatttttcctttttacttttatattttgaggttactttttcgtttatggaatgaaccgaatgatgggtactaacttagttgaatagtggtctctttacgtaatttaggaatggtattttgtacttttagcacttatttcctcctctttctttatattcctctactttataaagataaagatatgggtatggatccttctattaagaaaatatctaacaaaattagatttttgtttatctgctcaataagtgtggttagatacaatgaacgcttacttgttctactgaaatttgaacacccacttgtcaagctt

SEQ ID NO: 398 - DNA, 95310 bp, Arabidopsis thaliana
gaattctacgcctgcaaaaccattgacaagcgcgtgctcatcgacgcattagatcgcgagtgtatagagacggagccgaggatcatggcgatgttaccgccgcatccgaatatcatcaggatcttcgatctctacgaaacagaggattctcttgcgatcgtcatggaattagtcgatccgccgatgacgatttacgatcggttaatctccgccggggggaggttatcagaatcagaatccgcctcatacgcgaaacagatcctcagtgcgcttgctcattgtcaccggtgcgacgtcgttcatcgggatgtgaaacctgacaacgtcttagtcgatctcgtaagcggcggtgttaagctctgtgatttcggatcagcggtgtggttaggcggagaaacggcggagggagttgtgggaacaccgtattacgtggcgccggaggtagtgatggggaggaagtacgacgagaaggttgatatatggagcgctggtgtagtgatatacacgatgctagctggagaaccgccgtttaacggtgagacggcggaagatatatttgaatcgatattgagagggaatttgaggtttccgccgaagaagtttgggtctgtatcatcggaagcgaaggatttgttgaggaaaatgatatgtcgtgatgtttctcggcgattttctgcagaggatgctcttcgtaagtcatcttttttttctcgattttttttttttttttgagtttgctcatcaatttgtaatggtgaattgcaggacattcatggatgatgaacgttggaaacctccaaagcaattagtcgaagcttttcagatatgtgattagagagtgtaattagagaagtcgtaatatagatgtgagtgtgtaattgtttgattcgaatagtcaaacgtagttgtgtgtttcagcaatcttcctacgttttgtcactagagaaagtatgttgaaaactttttgtaacgattcgccagattcagaataaaattgattttgagatcattgttgagagttaggtcaaaatctgaattcgattatttgctccccaagaaacaaaaagaaaagattactatggttggtaaatctgggccagtagaagggatctttcggaaattgggcctaactgatgaagtttagatattttgggctagatttgtcgaattttggggcccgtttcaggctaattatgatttgttcgagaaaaaaaaggtttcgaagtcaatgcaaaggcaaatggagttcaattattctccagacctggttttcacattaactaatactcaagtaattcgtctagactctaatgtatactagggtttttaaactaaaagggacatttcgtttttaaaaacagccgtggactgatttactaaataattcttttctatataaaaatatcttatagccaaaataaaatattattagtatatatgtgaaagaatatccaccaatgttaagaaacaaatctttttttaagtcaaaataaaatatggttggtatattgatatatggaagatacatcaatggtgagaaagagaaatgtcaaccttgaacctaaatgttctataaattcatcttttacttacaatccagaaaatcacaacatcttttttgaatagattttatagctgatacaacgagcaagagaaaatggccatcacaaagacttcagtgactcttttacttttaataataatggctgcttcgttgtctaatttcagcgtcttggcttcaggtatgtttgaaataattctatgctgttaatttcttattaggtttcatcacttgaaagcaatgacattgatatgtatgtatgtacttaaatcatgcatatatatatatatatatatatatatagtcatatagatatgatattcatgttgtgagtttgtggacatgcagagatcaaacctacaggaagagttgataatcaatgcaaggagatgtgttcggcaacgtttggggacggtaaatgtgccgcagactgtaggaaggctggtttctcatccggacgatgtcttacttcttctcctttcggaaataaatgttgttgcacctagtgatagctagaaccaatctatatgactatatgagttttctcttgttgtattgccacatattataattgtactgcaatagaataaaataattttattgttatatttttctttaatcatcaaaagtaggagctacaattacaatgcacgagtcgattaacatactcttatgactctttaactactcaattattacgtacgagaagttttctaaaatttcaatactgaagtggtgatattgtttacacaacgcaatgtcaagttttttcataaaaaaataaaataatcataaaaatatatgtttgcttgtgtttaaacaatcctaaacattttgtaaaacttcagaataaaaatgattaatttcaaattatgattgtcagttaggtcgaaatcccaaatcgaccatacccttatcggattggactttagatcttttgttaacaatgacgtgcataaatgaattatgaaaagttgagttaataaggctttttttgttcctgctctaaaaagatggccaatattgccagtaaagaaaagaaaacaaaaagaagcaagcaaataagtgttaacattcatggcttaactatgatgaatattgatgattacttttctatatccaacataatgatacctgttacttacattcataaacaagtttgaaaaaatcgcctagagatgctagattagtttagttattgcaaggagagatgagccattgatgtatgggtgaaagctcgattcgattagtcaacgtagctgagaaagttaagttggaaacattattttgtaacgtttcggaacaaaaaggatcttttgggcctatctagcaaatttgtgggccgttctcaggctaattatggtttgcttataacttagttattcgcatcactcctacgatttgttctaggatctgtggtcaaccttggttttgaaacaaaaagggacattttgtatttcaaaatagccacggattgatttgttaaacaatacattttacaaaagaaaaaatcttttagtcccaaataaaatgttattagatacatgtggaagatccaccaaatccaatgttaaggaaaaaatctttttaaatcaaaataaaatattattaatatagaaagatccatcaacggtcttcttttctacaaccacaataacctaaaatgttgtataaataaagcttctacttacaatctacgaaaacacaacatttttttgaatagattttatagttaatacaacgaggaagacaaaataatggccatcacaaagacttcagcaacgtttgtactcttaataatattggctgcttcgttgtccaatttcaacgtcttggcatcaggtatctttctaatttctacgtactttaattgtagttaggataactttatttgaaagcaataacattgatatgtatgtatgttattattcatgtggtgatattgtggacatgcagatatcaaacctaccgggagaattgataatcaatgcaagcggatgtgttcggcaacgtatgggaacggtaaatgtgccgcagactgtagaagtgatggtttctcatccggacaatgttttacttctccacctttcgacaatagatgttgttgcaacaattgatcgaaatcgatcttgtttttgcattgatctatgttttctttttttctgttgttgacttgccataatacgcaaatggaataaaactataactttactattttatgctttcaaaaaactaaaagtacgagctattattagtctatcaccatgcacatgagtcgatttaatttgcagcccactcttattcctcgtatcatattagtcacttactacgacaagtttaactttggaaacctccaacaaacctatttgagactatgtggtttcgatatgattagggtttagagttaaagagtggcatcagataccgctgttgaggttgaatagtttaattatttgtatctgaactataaaaacaggaaataaaatattttaaatctacatatttgtaaagaagaaatagaaaaagtcaaaaacaattctgatttgttactataatttcttccaggctccactaaaaataaaaatatcttcttcttttttttttttttttttgtaaaagacagaaatatctaatccggtttatacgaatccggtttaaaatcggtttggttttgttacaaagataagaccagattaataacatcttcgtcttcacacactctgcaacacctctcactcaaatttcattcaccatgttctctctcaaatccttaatctcctcacctttcacacaatccaccactcatggattattcaccaacccgattacccgacccgttaatccattaccacgtaccgtttccttcaccgttaccgcttccatgatacccaaaagatcctcagctaacatgattcccaaaaaccctccggcgaggcaacagctctaccaaccgttccgaccaccgtcatctcccattccaacccaattccgttcactcgactccgccggtaaaatcgaaatcctcgccggtcgaatggctctctggttcgaatacgcacctcttatctcttctctttacaccgatggtttcactcctccaaccatcgaagaactcaccggaatctcaagcatcgaacagaaccgtttaatcgtcggtgcgcaagttcgtgactcaattcttcaatctatccatgaaccggagctcatttctgcgttcgacaccggtggtgcagagcttctatacgaaattcgtctccttagcaccacgcagcgtgttgcagccgccacattcatcattgatcgtaatattgattcgaaaggagcacaggatttggcacgagccatcaaggattatcctaaccgtcgtggagacgttggatggttggattttgattacaacttaccaggagattgtctttcattcttgtattacaggcagagcagagagaataagaatccatcggatcagagaacctcgatgcttctacaagcattgggggttgcagaatcagaaaaggctaagaacaggttgaacacagagctatacggggacaaggaagcagagaaggagaaggagaagaagaagaaggaagaggaagtcaaagctattcggattccagtggtgaggcttaagtttggagaagtagcagaagcgacctcggtggtagttttaccggtttgtaaagcagaggaaggggaaaagaagattcttgaagctccaatggagatcatagccggaggggattttaaggtggttgaggcggagaaaggatggaagagatgggtagtgcttccgtcgtggaacccagtggcagccattgggaaaggcggtgtggcggtttctttcagggatgatagaaaagtgctgccttgggatggaaaggaggagcctttactggtagtggccgatagggtgaggaatgttgtggaggctgatgacgggtattatctcgtggtggctgagaacggacttaagctagagaaaggatcagatttgaaggcgagagaggtgaaggagagtttagggatggttgttttggtggtgaggccgccaagagaagatgatgatgattggcagacaagtcatcagaactgggactgaattaatagaatcaatactcatatgctgtaactgattacggagtcatcatggtcatgtaaaaattttggataaaggtggtaactttttgttctaagatacaatcagaaacagagcaatatttttctctatttgcttttctagttcatgtcttagtgaacaaatcctaccaatcagacctttttggaaactgttttattaaccgagccattgctgtgcacggcgttcaccgctggctccaactgagcttcggatgctcattttctcgttggcgtatttatcctgaagcgattcaaaagctgtaacgtctagttttcctgtgactgatttgccttgcttcctacggagatgttgttctcgaacagaagcccagagtttctccactgcttgtctctgctgtgatgtgaaccttgacacgttctcaaaggcatgtttcaccaatatgtctataactgtttggcacctgaaaattaatccaaccattcctcagtttcacagttttgacatgataacaagttcagtgggataaattcagatcaattactgggaatcatggcagcattcttaccatggaactttgtaacggcgtgcagcaatctccaagcatgtaatcaaagcttctctttttgacctgagaaacctcttattctcttcggcatctggatcttcatttgttctctttatctttgttttaccatttttctttccagaactgggaatccaggcatctagtccaaatggatcagactcgacagcctcattatctccagctgaagcagcttcagccacgtcctgcgttgtctggccatctccattgtctttcaccgctgcttcttcaagagcagctgcttcttccacatcatcctcctcggttgaaaccggaagatcagatatagcctcctttatacgagtagcagtcttggaaaactaaaccaaaaaacaatgtaagtgagacactatgaaaacctcagaggatgatagttcaagacaacaatatccatattacaggtcataacacagcgacgaggcaatcaatactctgaaattaagtaactaaagccaaacaaagtccaaaatattggtataagtcacacgaaggttcataccataaagctgtcatcagtgaagaggtcattagccacaactgctttgaatgtccatatggtcaacagattcttctggcttttatcaaggcactaaataaaaacaaaaacatatgaacattcatcaacatgctaatactaaagctgaagaataactttaaccatgagttctatttgtttacctcggctacatcctgagctgccgagaacaatgcatgatagtctgctcgaaccgagcgatctgtacaaggagttttagacgacatggcagcttcaagtatcgcaataaaatagctgcttgtttctggcttcacactaccagcttggatcagccgtatagcaagcttcgaggctttggagaatttggaagggttcttgatatgagatgttatcttctgcatagcttctatcacttgttcctctgatgcatcggttgatgtcttaaactgtagacgctttttaggagctgcaacagaaatttcaaagattcatagttccattcgtattctaattagcaacgagtagaagtacaagtagctcaaacttgtaccttccggttctggtactggttccggagtagattctgatggttttgaccgctttagtgcgctcttgagaacaggaggagctgtgtcattggagcattaaatcagattagtaagaacagagatctcaataaagctttctgctttataaaacacggtaccaatagacccattatcggataaattgttcaagaattaagcatacctgaaagattgggtgcagattcttctggcttcgatcgctttagggcactcttgagaaccagaatcggagctggagaggaagtttcaatctttgactcgtctggtattggagaaattggtagctcttgctgctgagatgaagaaggaggtggcagccctgagaatagattttccgccatctctctccagttcgtcgacggagacggtcacgcacgcgtgtggggaagacggagccgaaactggatttgtgtgtacgtcttatgggccttttatgaaataaagccccagattctcggcccaaatagttttggagctaaaaaatacttttttggacaatgggtaaattttttttatattatttatgagtttctctcttctgcagaaagaaaatatacaaattacatcatacacaatttcaaattgataatattttcgttttgaaaaaacaaatactttacagtctctcacaattgaactacatactccatgcctttcaattaagaaagagtgaactacaagtgttagctaagtacacaaatatattaaggggagaaagagataagacttgtgaaagttaatttatagaaaagaatagagaacaaatcatataatcggtacagtcgtttatttaacacaattaattctttttgtttcattattgtgtgttatgtagtcccgaggagttcaaccaccctttggctttttgtctacctcaattaaattaatcaataagttatgttttagctatatttatacataaattatgttttagttgagagttgttgagtagaaaaaaaagaagagtaaaaagactaaaatattataaacgacttttaaaattttgtttttctttggacaaaataatttaggataatatgcatatgtacatatctaagaagtagtttagtttacattagaagacgattaaactttactttagacaatggataatggataatatgacaaggaggtggctggaaagatatggtattggttcattttgacattaatatgaaacaaacttaattttgctacaactagtaagtaattacttgaaataattatgctttgatccatcaatatagaatctcctaattaagtttcttacgatgcatgcgtgtatgtaaatactagtattttatttatagcaattgtattattcttaggcttatttgactttcatttttaagtgaattttaatttccttcaagtattcaaacatttcaataattagcaaattataaatcttttgtatgtgtgattgtttaatattttggctgttatagattcgtgaaatatatttatatttggatccaatgaaacacttcgtagatattattttatattgttttttatattccaaaaaaccttatgattcaactttcgatataaatattgaaatgggaaaacgatcgtgcgccccattagttcaacctcggcgctcgaccctacacatcaattataacgctaacttaaaaaagacaaaatacaaaatgacaggtttttaaaaaattatcttaaccaattaatatttaaagccaatttttaacaaatttttctgtcaaatgacaataaaactgcaaaacaatatgtcatcaaaattttcccaagaaaacgtacgatgcatattgtatcctatttgtaatacgactttttttctgtcttaaatataattatgtcactctctcaagccttgagttgagggatttgttttaaatttttatttcttataaacactatacgtatacatgtatgtgtatcacatatacatatgcttccacttatttttataagttagcttccattacatcttttctctttcttgcttagtatcattctttgtcgtgttcttttaattaaccttttgcaatttgtcttgtgtttctcacaacacaaaaacttgtaaaagtgttaaaaaatcaagatctgaaaaatcttatcaccgcttctaggtttttcagttttttttcttccttttcctgatctaaattaacttatatttcttagggtttcacttcttgaaacatttaatcagaattaattaacctctctagggctttcatggcgaatccatggtggacaggacaagtgaacctatccggcctcgaaacgacgccgcctggttcctctcagttaaagaaaccagatctccacatctccatgaacatggccatggactcaggtcacaataatcatcaccatcaccaagaagtcgataacaacaacaacgacgacgatagagacaacttgagtggagacgaccacgagccacgtgaaggagccgtagaagcccccacgcgccgtccacgtggacgtcctgctggttccaagaacaaaccaaagccaccgatcttcgtcactcgcgattctccaaatgctctcaagagccatgtcatggagatcgctagtgggactgacgtcatcgaaaccctagctacttttgctaggcggcgtcaacgtggcatctgcatcttgagcggaaatggcacagtggctaacgtcaccctccgtcaaccctcgaccgctgccgttgcggcggctcctggtggtgcggctgttttggctttacaagggaggtttgagattctttctttaaccggttctttcttgccaggaccggctccacctggttccaccggtttaacgatttacttagccggtggtcaaggtcaggttgttggaggaagcgtggtgggcccattgatggcagcaggtccggtgatgctgatcgccgccacgttctctaacgcgacttacgagagattgccattggaggaggaagaggcagcagagagaggcggtggtggaggcagcggaggagtggttccggggcagctcggaggcggaggttcgccactaagcagcggtgctggtggaggcgacggtaaccaaggacttccggtgtataatatgccgggaaatcttgtttctaatggtggcagtggtggaggaggacagatgagcggccaagaagcttatggttgggctcaagctaggtcaggattttaacgtgcgttaaaatggtttttaatttacagaagttaacaataagattataatgatgtttattatgatgatgaaaaccagtcagttgctacttgttactagtgagctatatagtttgtggacattatattatgttctctcttgactatgattattatttgctaaatttcacttagcttacttgtgtttttatgatgttttattaaaagtttttctctttgttggattctccaattttttatagtgaggttaagtgtgcatacatatatacatgtgtacatgattgacgatcctcattaaattagaacaccttggggttgaccctttttcaaatatgattagcatatacagactatatataatttgaaaatgataaaatttcaagtgcttggtgtaattcctttcgaaagttcatatattttcactaaatgtataagatatttttcctatagtatattttttttttggtaggctttttcctatagtatattactaatatatctatgtatgtctgcatgcatttattggattgggaatcatcagcctcaccacactcacctggcctcattaatcataaatttgtgctataaattatgcaataaaatatttaatcaatacatgtaaggaaatttgccatgacatgcatgatgaatatactaaccttctgaacaaaacaatcggattctaactcggttaattaagagcgacattgtttaagcaatgtacatcactaaaaaatatcaatatttagcaagaaaggtaaattcactcaaaaaagaaaagaaaaaataaattcactccgattccgggaagttggttcgaatccaaatatatatacaaggaattttatgatcttttggtgcataaaatagcatttgcgaaatcatccctacatcagctccactatttttagagaatacatacatatacatgtaattcatgcaaattcagattaaaatattcgattaacacacaaagagataatgaataattgtttttttttaagatctattcctgataagttaccctaatttatttttaagttcttttatttcaaatgataatataaaatatttaacatgtatatatatgcagtgtctttcggaaaatcaatgatcggattgaaacctaattaactactattgaattataatgattttgtgaatctgcaacggtcaaataacaaataagcgatagtcaacctcaaataatataacaaaacaatcaactacaaaaaaaatatatggcaaactgccaaaccaatgcagctaatatatataccaggggaaaatagtccaatgcaactattataccaaatatatatatatattacctcttgttggtcttcttaataagtgtcgtcattttaccaattttctaggctttcttgaccatcttttaattaataatcataaacaaaggtatgccaatagaggaccatttcacatggtaccacatgggttcctcttgcaaaacgcaaaccctaatggacatggtaattgtttgtttaatatccgtactttctcgagcagaaatgcataatacttaaaatgatttatgattagagtgcttttgaattttgaattactcacataaattagtcccctttgcaaatgtatgatttgaaaaataatttatctagatccaagtagtcaagcagataaacaacaaaatataatagacttatcttttgaatttcttatatttatctattccgaaaactagtcgttgctattaaggtgtgacgaaaatttacatatataaattaatctttaggcatacatagagcaatattcatatctaagtccaacaaagttagcactttcttctaatgattgagttaactcaatttaaataaaataaagataattatcaaataatcaaacctgattttcaggtttttaaattgtaatttaagtaatttgaaaaactagaaatttgaaaaagtgttgtgtagaaagatcaaatcataattttcttgtgatattttatcaaaaaggaagccctaaaccgcactcaaaagacaataataattaattagccaaaagttaacaagagcaattaacaaataatactttgaaaaggaatccataaacgagcattattaaaagtataactaagaccacaagataaaagcattgcttaggggtcctaaaaaaacaatataaaaggatttttaaaacaattagtagtacgccgaggtactgcttatcacataaaaaggaataattttataattcccaagataaatatccgttgtagatggtcctcactttaaataacactcaaatgataaattgataatgcgtatatgcatttttttgttaaaagttttatttttcttaattttacatcttaatatattgatagtagaaaaaaagattgaaaattaggaataaattgatatccaataaccattacaaacttctgattttcttttgtcaattgtttgagagaaacgagaactgaattaaagctagaatggggatttattttttgtcgtttggtatttgttaatatccaatccaaataagtacattttaaaaaattcgaacatcgatatgtcgaacataatttatagcgttacgtgatgttcgttcttaagactacacaaagcattaaataacattaactttggtgttcgtatagatactaacatttagcaatcaaacgtttggtgtggtggtctggtctaaactttagtctttaagaaaaaaacgtttttgctgtcaaataaagtttttgccgtcaaaaaaagtatttttaaatagactttttgtttatatcaaaaaacaaacaaaaaatacatttgataaaatactaactaaattacattgacaaaaaataaataattaataaatttcatttgatttgatacaatattatttctttttggttgacaaagaaatgtccaaaatatacaatgcttgaaacattcagtctgaatagtaaaactaaataaaaaatgtcaaaaaatagtaaacaaagaataaaaagttagagcaatagattagagaatacaagcgatgaattttgacaaaatatgatgaatttaataatgagatgcaaaaaaagaattgtataaatattcagagagaatttactcaagacaaaattataaaattaattattattaaatctaataaacttatgttattttttcgctaaaaatgcgaaatcattacgtataaatagtttcgaaccaaccaatctccaaactaggctaaatagagaaaactgactcaattctcatcactgtagaaccgagacaacaacaacaacaaaaacatttccccagagaggtgtctctatgcttcacatcttcaaagaatcctcactctgcttttcttcgtttcaagatttttgcttttcaagattcattgatatctgcttccttctctgagctcgaatcactcgctcgcggtctgcaaagcccgtctaagctcagaagccataacatgcaaaagaaccggtttctggatcataccattcatccccatttgcaaacatctttccctaacatgatcttcagtactagcagtcaaagctataatcaatggccaatgatgtccacaaaacttccttatcttcattgctacttcgaaaccatccatctccggcatctgcagatccaaaatcacaactctatacgacatttccacatttgacaacgcattcaaacactcaaatccagacgagacagcagttacttcgcagccgagtttctcaagaagtctcttagtcacggttctgttgacatcatcatcgtctgctagagtgattcttagaccacgaagaatggaatttgaattcggatgttgaagctctggagcatttcctgctaagattgatctcctaatcgatggtcttgtctgaaacctcagaactaattgcatactctgtgtttgtccatgcgatttaggtgatatccatatgtttccttgcatcatctgcaaaacaaatttcaaatcaaatacactgtttataattagaatctctatataccaaacagaaacagagacatgatgagatcactaacctgtgcaagttttctacacatgcctaagctcaagccttccttaatcccattgctatgatatcttctgttcggaatatgtctcatagccatagccgaaccatccaatggaggattctgaatctcattaatctcaacttcaaatttcacaccgagggaatcatcggacatatgggacttccacattccagtttctcttttgctcttgtcctgacttgttccagtaccttcacagataactcggaacgtaacggttttgcctccatcagtcatatccaagatatacccaagcatatacatcacaagctgaaacgttctcttttcatctcctactactaaattaggcaaccgcgtttgaacatccatctcaaaaccgtaacctttgtaaacgcttaagcatttagcaacacaagcggcttctcttatcaaggaatgtagctggaaccgtttaacctctaatgcagatttcccgttatctttaggcgaaatgtcaatcacgtcgttgattaaagctgagagaactgtgcttgttttcatgagcgcatcaacgatgattttctggtcaagactcatactttcggactgaaacatggagagtagaccaagaattgtgtgcattggtctcctcattccatgactcatcactttctggcaagtgttcctcgcttgacttgccatcatcgcgttctgttttgctcgaagtaaagctcggttttgaataccgagtttttctctcattaactgtgattcttcaagaactgaggcatgagagatagcaaccgctacttgatcagcaacaacttccgctatctcgatctctttatcggtccaaacccgtgaattcgcactcggaagtaccaaaaccattatagcataaggagtatccacaaactcgggagtgcctcctttgaaattcaatccgtgaagcatcggcatccgaattgcagcaaccggtccaaactcttccgaaccgccacaaccactgctctcaaccgcaagaacagagtttttcctcaaaattgtcactactttggtctccctaacctgaacaacatcgggatcattaatcgggattaccctgaaactcctcatcggattcgctctaagctcatgagtcaaatgcatctcggttctgttctcgttaggcatccaaacagcagagttctgtaaatcaagaatcttggatagctcaacgagagtagtccgcagaatcatatgcttatcgagcgatttcctgatctcccgagtaagcattctcacctgcacactcatttccttctgcctcttcatcaatccaacctcttcattaagctccaacacattctgcttcaagtaaagctctctaactttccatttcaacagcaacggaatcaaagtcaagagcgtgatagccgtggcacacgagacaagcgccgtgaggaatttaaagatggtaagccaaagcataagctggaaagagtgtggtccgtaatacgtccaagcgttaagcaaatgagtcattccacataggacaataaaggcaatgaattgaacaagaacccatttgaaaggaacattggagaagctaatgaagtagagaagctcgagaggtattgagaaataggcaatggctattaagagatcactcactctttgacattctaagatggtgtggacacttaagaaaccttcgtcgtcacaattacagctcacgtaatcgttatcaccagaaaccagagcaagaagagcaaacagaagcaatccaagacctaaagatcttaacatcttctgatccaatctttaatctctctatctaaaaccctaatcaaatccagccacaatcttgaggctctctacaagttgagatccaatgaaccaattaaacataactgacttggtattcatagatttccacaacgcgtagagaccaatgagattaaacaactccaaacacgcatacccagaagaaggcaaaggaatcaagatctatgttcctcgatattcgtagtactgagaaaagaaaccgcctttgagttttttttttttaaattccaggggaaggtaatcagagaaaaacgaaagctaagattcaagccaatagaatagagaaagaacacacctctcgaatctagtaagataaataagaaagacccatctccatttgtagcaacgaaatcgagtcaatctgacatctttttcacagaagttggagaaacagaagaagtgattagaaaagagaagaaaccgagttggtccggtggtggcagatcttttccgggagtttcagttgcggattttcagacttgagtcaacaatattcaaagtttttttaagacaaaagcagcagacttttcgcttaagcaatttccggagagttgctcaagtccataaaaatggtggtgtttcactttaagcttagatgtcaacaaaaaattcccattaaagataagaatttttaacagtaatttttggcttcacataagttatagcattccaacattatcaatcaagaaatttacaagttgacaacttgacataaagttaccaagaattttaaactaaatcaatattaatatgaataaataaacagaattctcaaatgagtttttttgttcttcgtcaaatgagttaatgttttggtccaagtaacggctcataggaaccgtttactaaattaagataggttatgaataattaacataagtagaaaccgaacaaacgaagtgtatatatttcacaaaaagagcatttccttttttagtaacaaacgaaagaaaaaccaaaaaaaatattataagaaaagaaaaagagtataaaaaaaaggaatgaaattgaaagtgaaggagaatcgttactgaaagtataaaaaaaaggttgtggagttaatataatacaccgtaccaagaagaagaacaaaagcaatcactcagcaacttctttctatgattaaagacccttcagacgagtctctgtctaataagtcctctctcagttcagattctttgctcgccttctgtttctctacttgggatctaaactctacacacttctcctggaagctctgctaatccggtatttgctgctcgtaatctccattctccgacgactcatgtcctatccttcctgcacaagattacatccatcagcgtttcaagccattgccacaacggagaagagctttagcctgtaatcttctagaactctacaaaatactaatttccaccaatctccatagcaattctaatctgtccttgtttggatttaagggtttgaactttgatgaagaaagatgacatctttcgagaagttttgagcttttttgttacctgacaaatcatacccgccaccgcctctgccatcatgaccgctgttgcctcctccgcgccattcagatggcctggaatgtgtcatgtgtatcccctgcggcgcttgcatcatgaaatgatgaggtccacccaaaccggcttgatgatgatgatgatcatgttgctcgtcgtttcccctcattggatttcttcccgtagattccataccaggagggaaacccatgccaagcaactgtccagagcttacaggagaagttaaccgacttccactgtttgaagcatcccctttcccaccactcccggcggcatccttctttctatcaagctgaaacgtaccaagaatcacctgcatttgcacaaatctaaggcgatcaatcaaagccagacctcctatcttaggaaatgatcagttttgtgtaagatggttggaaacaataacaatgtttcaatatatgcaagttgaaactatgatacaacagaattgtacctgaaccgggccagcagctgtgagatggctaccaatcgctccaccgatgatctgaccatctgaagcagataaagaaacgctaaggccgccggatttaccaccttgttcagttcggatataggatccagatagtgagagaatctcgtattgaccctgaataaattttttgaaatttgaggcaagtttaacaatgatatgcaaacttcaaagaaagtatctgaattaagaatctctttgctttatcaacatgctaactgtattgtgtatcaattttcctctatcacacagaatagagagaaaggatcagaaagaaaaaaccctcctctcccctttggaaagaaacaacaaagaagcaagctgagtactattttactgcaagagaaaatcacctcatatggtaagttgcctcctgatggagccggttggcgcaaggatgcattagagatagtgcctgatgcagaaagaacgcatagttcatgcttgctttggtttgcgaacatcataattttctggaccacatcctgacagtatcacaaagagaacacttagaatcattaaggatcctcctcgatttgcattagtatcaatgaaacaaaaagagaaatagaatgacttagaattgaaagaatgatagatattgtgcctacaccaacaaatctctattacaagtaaggatcttgagtgtacaagaacatgacatacctcgccaggagctatattaacaatatgcggagtaaaacattgtccagttttccctgcaccaacaaaaaacttgtagtaaagctcagagtataacacaaattccagaatataactaaaggatcacttgaaagatactcaatgggatctaaaaaagaaacaaattgataaactatacaaacaagaatctaactacacaatcttcagtgtaattaagaaactcaagatgtaaatctactgctgtaaattatacataatgctaattcaaggcacttacgtctcaaatcacaccaacgaattaacagctaaagaatcaaaatttaagaattgggagattaatcattgaccttaaagttggaaactttagatatcaaattgaccaacgataagattcaaaagaagaaaagattaaacccaccgacagaaccaagctgagatttcttggatgacccggaattagtcgataccgtaccaccggtaacagcagcaagctctcgcctctgtttagcagacgaactactcgcagaagacgccaatttcttagccgctagggcttgttccggcgtcacatactttcttggtcgacccctcttcctctttaccggctccatcggcgccgtcacagccgaggacggaactgaatgagggtacaccgcgagagaagatgacccatcattaggctggtgctgtggctgaggctgcggagggaaaagcccattgttggaagatggaacggcgtttccggtagaagcggtggttgctacggtggttggaaggtggtgatggtgctgtagttggtggtggaagtaaggagaagtgagtcgttgctgctgctgctgttgctgttgctgttggtggaggtgatggagctgttgttgttggtggtgatggtggctttcgttaggatccattcctttttagagagatacgcacaaaaataagaatttctagagagagagagttagggattttttttcattttttctttttgcatttttttttgttttcttttagggttttattattttatacttatatattaatcgataagaaggaagatgatgagatagaatctcaaccgttagatcttctagatttgacttaagatgtttttgacttatgtgtgttaaagcatctcttctttttacccttttttatctgtttttatttctcgaggaaacagaaatttaattttttcagagggaaacgaaagatcactcactcaccttctcagtttttcacttttctctagtcatttagtacatggttgatttaacatatcctccaatttcaaagaaaccatgatttgaatgattaaaagaaaatgataaagtcaatgggggtgtaacaaaaagattgaactcctttttcaactttgcattcgtcaacattggtattcaacaaaggcctttaatcactaaccaataccccggttaggccacatattcactttcttcctaaacaagcaacaaagcatcaaacaaaggggaaaaaaagactttgtaactgtttggaactcaatgatctgttttggctaggagattgcataaacggatgggatttcaagtactgaaaaatgtagctagcacaaaatgaactccataaaaactcaaaggccggccttttcagatttaatgcatcttcaagtcttgtattgactaaccgaagcatcctttagagatgaaaagaccaatgagagaatcaaacgtcccatcactcaccactcttttttttttatctcttgacatatcttgtttagttataaacatcatcagaattttcttccatcactaaacaacactccaaaaacttctcccttcttcttctttctcaaattcacaaaacatgattttcatatctaaaatcttttaacacctattttagtgcataaactaatcaactattggattatgaaaatttatgaaattatgataacatcttatagactatggaaagattattaacggatcagaaagaaagacgaagaagatattcaataaaccggaccggtgcatttagatgatgaatgaacttctagtgaaaaaggcaatcatggcgtcaaagactttgattagtgatacaattgaaaaaattaacgagagggggatatttgttctctctaaaagtaaagggataaatgacgataattgttttaattttgggccagagagaaaggggtaatgtgtatatctaaaacttgacggcaaaattgacaaaaataaaatattctgactcccaaatagtaataaatatatgacttaaacctcgttttgttcttcgtcagtctaaagactatctccagtcgcaaaaccaccgccgtatatccacggccgtcttatcaccggcaacaaccgtaggtacttggatataacaatttcattcagctctattcagcttgtttgctaataggattttgaatctgacttctgtttttgtataggtttttgttttccgtcgcgatggaggtggataagaaggacgagagagaggctgaatcttcggagcaagtggtgaatccatgggaagtgtccgccaaagacggcgggaagatcgattacgacaagcttattgacaaatttggatgtcaaaggcttgacgagtcactgattgatcgtgttcagagactgacttctcgtcaaccacacgtgttcctccgccgtagtgtcttcttcgcccaccggttagacattcactgttttaattaattgtgtagaaatttctcgtcttgcttgttttaattgtgaggttttaacagggatttcaatgagattttggacgcttatgagagaggagacaagttctatctctacactggaagaggaccttcatcagaagcattgcatttggggcatttgattcctttcatgtttaccaagtaagtgagatcctggagctagtattgtcttaccatgtttacggatttggtagattgtgcttgctctttatacttgaaatggtttgcagatacttgcaagaagctttcaaggttccccttgttatacagctcacggatgatgaaaaaagtatatggaagaacttatcggtggaggaaagtcaaagacttgccagagaaaatgcgaaagatattattgcttgtggattcgatgtaacaaagaccttcattttctcggacttcgactatgttggcgggtaagtcgcattcgaatcttctatggaaataactagcaccgctcttgctttgtagaaaatattgcttgaagagctcttggtagtacatatagtctacatgcatgtagctcaattttttattttttttttggcgaagatttgtaagatcatatattgtccttcgtttttttttttttttttgattgatgtatcacagtatatttggctgatcatatgcaaaaactttgtgtgtagtgctttctataaaaatatggtgaaggttggcaagtgcgttacacttaataaggtgactttactatctatctccttgaattgcacaatgcggctgatatgttgtatagctactttgtgtttgtggttttcatttgtatatctccttctttgctaggctatgggaatctttggcttttccggtgaagatcctatcgcgaaactcagtttccctcctgtgcaggtatgtcgtttgttctgttggtgtggctatgtgtattctaactgcatatagactgtataattgttttccgtatatttgcaggcagttccatcttttcctagctcattcccacatttgttccctggcaaggacaatctccgctgcttgattccttgtgctattgaccaggtgtgctgttttcttactttttatattaacctgtttgcctttttaaaagattaataacttcccattggtataaaaatgtctgtgactgcgagcatgtgatacttccatccataatcagtttcttttatgttttccatgtatcacatttgtatttataaccaatctttctttctttttggttttgttcaggatccttattttagaatgactcgtgatgtcgcaccccggttaggctatagcaagcccgccctgattgagtcaacattttttcctgcgttgcaggcaagtagtttcttaagtacactacacattcctgatttacacaactaattgccttggtcactttacgcagggagagaatggaaaaatgtctgctagtgatccaaattctgctatctatgtgactgattccgcaaaggacattaaaaacaaggtaaattctgtaattctttttgttctttccatctattataacaagccattctgggtttccacatcaaccttgtaggctttcacacacattcatcgtctagattggttgctactcgagtccttccactcgtttttttcttttgctggtgtaacggcatctgaaacacgttacagaacattaaataccagtcctaataatgaactcagacactttcgtccagcatttaaacttggtatggtttcatatgcagataaacagatatgcgtttagtggtgggcaagactccattgagaagcaccgagaacttggagcaaatctcgaggtaccaaattccttgtatcctcttcgtcccttattctgtattatgtagtggcaactctcagctgtgttccttatgcggtaatatccggttgaaagttaagaatgaatattcactttgtttagattgtgttcctcagagtactagcaagccaacaaaaactaacccctaactcagctggaaatgtagaaggacttgctataaactaattgactaggaaagaattttaaatcagttgcggattcttgatagttgatcttatcggttctggtgctttaattgttcttttggggtaatctcccttctacgttttataggttgacatacccgtcaagtatctgagtttcttcctcgaagacgattctgaactagaacacattaaaaaggtaataataacatcacacttagtcgctagcttgttatacagagaaggaagaatgtgttgtgtggatttttcataaaagtaaaaacacaatgattataatgtttcaggaatatggagaaggaagaatgctaacaggagaagtaaagaagagacttacggaagtgttgacagaaattgtggagagacaccgcagggctcgagctgctgttactgatgaggtaaaaagatcaactaaatttgttggtgtcaatcatcaagattcaaaatatcatttgtactaagtgattcgacaaatttatgttccagatggttgatgcgttcatggcggtgagacctctcccaagcatgttcgaatagaaaaagtcagaaaccctttttggctcctcagcaacttcacatcactccgtttgatttggattcagacatctttgggtgtctattgatagatttgatccttgaaattgaaccatacttgttagttacaattttcatatttacatttatttatgaatcacattctaaaatgatttgcattgttaattgaataaagtgaaactacaaatttatgaatttttttaaaaaaaagatataacaaaaattacctacctcaatagaattatatattacaagatcaaaataaaagaatattaaattttaaatcagaatatcaaaaagagaccaattttatataactgagaaataataataaaagtaaaaaaaaatgattttttgttcatttacatcaaatatctaacaaaagtaattttaattagtcaattttgatggtaaaataatggtatagtttagttatgaaatccaaaatcaatgattagtttgagtgagaaaactatctataggttgagttgggcctttctttgctttataatacttggggtggtttccaatttagtagctggactcaaaaaaatcaaagagggcaagtccgtaaatagtagtaaatccgaagggcagagtgagagcaaaaaggaactaaaagacataaatagccttgtcgaggaagaaggcaacgtgtaaaatggacatcatcggagtaagggaaacctaatgtctccctcttctgccccttctgtaaattcccaatccaacccttctctccttcctcctccgtctttgccccttcccccaatttcttcttcccgattctctcctttccctttttctttttacccgccaaaatcacatccaccttcactaacggctccttccccaatttccatttcccatttcattcatactcgaaaccctagatttctaattcctggatcggtgcttggatcttcttcagttttctcgtgttttggttgatacccagaatttgattcaagtgagtttctcgatctgaagttaaagtttcgatttttatttggatttcttttccttcctcttgttacgaattcttcatttgtacttagttgttttttgttcagctcagatcttcgagtaaactttattatcctgataaggatttcgtttttaactcacaacttttttttgaatttcgaatttggtttttagtgttaaatctgatagtgtcgatatgagattcggacaacgcgaaaaagtcgtcatttccttaattttctcgtctctatcagattttgttcactcactttatttttcttactctgcttttgtagctccaaattctccgttttttctcaaagagtaagttgctgtttttcgctgaggaattcactgtccagtgaaattgacgatgcacaagattaagctagacgaccgtgcgttttctgtttctctaagtcttaatcgtatctcggaaaatccttactttcttacagttcgtactgttatgtcgctgatgctttggtctcaatcttggagtctcaatatttggagctcacgtgacactttcaattatcaatatctttcgttatttctggatctttgttacttcatttgtatcactcttgttagtgttttagtgttggactactcgatcttactgtcgcgtttggttaatgcaggtactgataatgtgagagagaattagtttctttgtacaagttggttgttttgaagaagtgtgttgttgttgttgtttgaattaagaagattgtttcagcaatggccaatcgcgatttgatgcttggacaaaatcgtaatatcggtattgggcagggtcaatctttggtgcttggccacagccacagtctagggcttggtcaaaaccatgttgatgtggagctaggccaaggtcacaatatggatttaggacttgctcatcatgatcatgatcatcatgaaattgatttaggaaatcctcatgatgatcatgagctagacttaggaaatagtgaagatcaggatggagaggatcatcatcatcatcatcatcacgattatatgaacgagaatgaaatctcggttgatcagaagcctggacacgacgatgttgatcctgatctggttctttcatcgcaaaaccatgagttctcattgtcagataataatcatcagttggttgttggggaaaaccatgaactagatgacaatctggaattagccgttgactcaagtcatgaacttgaaattgatcagcatggtgaaatggttatggttagcactccggttcaagctcgagctctcactgctgacatgacttaccaacttaccgttggacaagagtttccagatgtgaagagttgccgtagagcactgagagatatggcgattgctcttcatttcgaaatgcagactataaaatctgacaaaactcgtttcacagctaagtgttcgagtgatggatgtccatggagagttcacgctgcaaagctccccggggttccaactttcacaatcagaacgatccatgaaagccatagctgtggaggaataaatcacttgggtcatcaacaagcttcagttcaatgggttgctagctcggttgagcagcggcttcgcgagaatccgaactgtaaacctaaagagattcttgaagagatacaccgggttcacggaatcaccttatcgtacaaacaagcttggcgtggtaaagaaagaatcatggcgactatgcgcggatcttttgaagaagggtatcggttacttccgcaatattgtgagcaggttaaaaggacaaatccgggaagcattgcttcggtttatggaagtccagctgataattgcttccagcgtctcttcatatcgtttcaagcttcaatttatgggtttctaaatgcttgtcgaccgcttcttggattggacaggacatatttgaaaagcaagtatttaggtactttgcttctcgctactggatttgatggagatggtgctttgtttccgttggcgtttgggattgtagatgaagagaatgacgagaattggatgtggtttttgtgcgagcttcataatcttcttgaaaccaatactgagaatatgccgagactcacgattttgtcagatagacaaaagggaatagtggaaggtgtggaacagaatttcccaactgcgtttcacggcttttgtatgcgacatttgagcgaaagcttccgcaaggagtttaacaacacactgttagttaattatctgtgggaagctgctcaagctctaacagtaattgagtttgaagccaaaatacttgaaattgaagagatttctcaagatgcagcgtactggatccggcgaatccctcctcggttatgggctaccgcatattttgaaggacaacggtttggacatttaaccgcaaacatagtcgaatccctgaactcatggatcgctgaagcatctggacttccaatcattcagatgatggaatgcattaggagacaactaatgacttggttcaatgaacggcgtgaaaccagtatgcagtggacttcgatactcgtcccaactgctgaacggcgtgtagccgaggctcttgagcttgcaagaacctatcaggtgcttcgagccaatgaagcggagtttgaagttatttctcatgaaggaaacaacattgtggatatcaggaaccggtgttgtctctgtcggggttggcagttatatggtttaccttgtgcacacgccgtggcagctcttctttcttgtagacagaatgttcatagattcactgagagctgttttactgtggctacttataggaagacatactctcagacgattcatccgattccagataaaagtcattggagagagctttctgaaggagatccaaacgtgaataaagctgctcttgatgctattataaaccctccaaagtctctgagacctcctggtaggccgaggaaaagacgggttagagctgaagatagaggacgagtgaagcgggttgtgcattgtagccggtgtaaccagaccggacatttcagaaccacttgtgctgcacctatttgatttgcaacgacatatgtttcaccagtaagtgtcttggctgttttaggataatgttagtagtacttcattgtattcacagatctgatttgtgtggacttctctgacagaaacaaaaccgcagactccagtgagttatcggaaaagaagcaaaaaccgcaggggtaaactctgctcagtgtagtataaaattcgatctttcttgatcaattgctagatttcaggcaactacctagagaacaacattacattgcctgtttgttgaatcctttccttccttattttatatgctcagctcgagcagttaagcagcaacgctttttctttttattcctgagatcacatttaatttcccatttggaatgtattttatttaggtttgaaattcacaaagtattatgtgattatactttttttaacttatattttgattcatataacaattcccacacagaaattcattcaagcaccaaattatgaaacaatgatttaccatagactaataatctctcttaaaaagggatgagaaaatcgtgaaggacacgataatgaaccatacattttttttttttttactttttttgaatataaagaagatttccggttagatcaatgttatgaatagtacacaaatgaagaagtctcaaaacaagtgatataataattgattgtcagtacacagagtgctcgctaataacaacatatactcgattaggcatctagcgtttccactcttgcttgcaactactagtaaaacattctaaagaaacttaaaatctttcatcagtaaccgtagcctgagctgtaatccgtagcgtatcctccaggcgggtttgttggagccgctgcgtaaactgagccgtgtgttgcgtatgggttatagccttgctgctctggtgctacagtttgaggctgtgctggtgccggcgctccagcttcagccatgaagttctgtcataaaacacaatcaacagtcagatttcatcataaaaaaacactagcttctgcctcggttttgagggtttaaaggttacaatggttaagaaatctggtgtgagaatataggggtacctgaataagctgcacggcagtttggacttgtgagccagttccgctaacctcaacagtcatttcaccaggtactcccctggtctcctgaatagttactgttgctccactaagacgtctagtgtagcttatgtttgaacccgacgtcccaattacagcatcagcataagacagtggaatctgcatttgctgcgtaacttgctgcaaaacaaacaaatccccacaccactcagattttcattgatttactttacatacataaattgcagtagattgaacagtcaacttcataacatgttgcagagattggcggaatacctgagcgaccattggtggggctgatgatacgtgcacattcataggaggctctctaccatatgcagatataccttgatgaggctgtttctccattggaggttgacgcatctcaggaggaggatagtaactatcatgtctaggaggtggttgcatatatggaggtgggttgtgaccatagcctcctccaccaacacttggggcatgaccttgaggaggaccccatgactggtgtggtggtggcatatggtccatttggcgagttggcttttgcatctgtttaaaacgcagagtaaagaaaaacgttaatagagacaaatgagaaacatttttaaacatacaacggaacaaaagataacctgattttcaaagaatgggatgatgctacgatcaaccaagaactttctgagatgtgacgcaatcagctccaaggctctatgaacacttgttggttcccccacaacttcaacaaccctatcgtcttgaagagcaaaaacaggtaaatcctctgcaaaactccaccataacaaatttcagttagaactaccaatggataaggaataaacgaaacaaacaccaaaacaaagttgaagttatttcagaatctaagccaatctgaacatttgatgttgaatggttcagcaaatcttgcagatgaagataacatagaaacttatagtggcctttatctctacaaatatggggaaaatagggaatagtccatagcacaactgaaaccaaaaacacaaagcaagaaagaattttttcagcatgtaaattgtgaagagaaggaacctgatccaagaactctgactatacaagcggatgcttcttgaatagctttaactgttcctccctgttttccaatcaaacttccagcctgagatgctgggactagtaatcttgttgacacctttgaaggcggaggggcttgagaagcttcaccatccaaaccatcaactatccgcatgtggactctaagaaggccatccatagaaggtggtagagatgattcgggctcttctttaccagaaaccataacctgcgacaaagaggaaacaagtagagaacattaccaaatgactaaagcatttcacaaacagcgatcttaggatctataccaattattattttggtgccatatttctcaaatcataaagaaaattccaaagaggtacagacttaaatgcactttgaccagttagatgtttatttcctgttataatcttcatttaaagtttttacccatggtgattaggttatcgccttttaagatgccatagcagccattaccaaccttctagacttaaaaaacctcttcatagaatctttttcatgcaaacataaaatttctctttacttaattgttgcctaaaccataatctcatcgtccacatattgttacatccggttaagcaggtccttgcatgctacagaaagtctgcagcaagacatcaatcatccaggtactgaagttaccagaaagaatgcagagcttcatggaactgaggtttatacaagaagaatcttgcctattcgataaacttatcagcactgtgtatgtagtgctcaaggctgaatccttgccatctggctttggttcttcatatttgagaccttaccgatgattgttgccataaaacttgcaagataaaacctgcacagattcatggtggtcacagcaataaaggggaaccctactcacatcttatcaacttcgccgattaacttcctcctttcacttgaaggaaatgataagcaggcctgctggttactatattccatataggtataattactaactaagatggtttcgcttgatgcactatacattcgtcaacacgttttttagcagctcaggatcatatcactcagccccattaaaacactttttctgacaaagttcataacttttttgagttaaaagggatgttcagtttcctcctatccgtttacttatatatttattaacgtcaaggggagaatatgaaaagggttgcctcttaactaaaatttcatggctttttaacatttttaacaaaagctagtgcctgaaaactttagatcagtgacttatacagccaaaaagtgtatgtattctactatattagttttcttatcactaggattttagttttagttcaagagcattatatgactactagctgcaactcatataacatgaaagggaaaaaaggatttagagactcacagctctttctgttgtgcctggaggaccatcgagaatctttattcgagcccttgtctcctcaactattttcttaatgacatcacctttgcgaccaatgatgctacccactttctgtgcaggaaccagcatacggaataccgtctctccgggccatcccggccacctcttctcctcacctccaactgtcgcatcttcttcaggctctgatttctgtagagactcaagatgctcaggaattccttcctcatcttctactttatcttgcacttcatcaccattgtgatcttgtacatcaccttgcgcctgatactgagcctgatcatgagcctcgtcttgtaactgaaactgctcctgattttgtggctgatattgtaggtcatcttgcgaatgatcttggacatcttcattagcctggtcctgcaactggtattgatgatactctaactgatcatcaacctcgtactgctgaggttcaagagtctgatctggtacctcgtactgctgtggttcaagagtcggatctggtacctcgtactgctgaggttcaagaatcggatcttcaacctcgtatggttggtgaacaagggtctcatcatgaacctggtacggtaacccattatgcaactcatctgacccttgatctggtacctgatctccattgtgtgcaacgaaattttgctgatcttcagcttcagccatgactagagcgctgacataaattcagagtccagataacacacattagtcccgttatacatatacaaacagttaaagtttcattgaagatttcacttccttcaacaagttattgttataaagcatgtgttagaaagaaatataacgcctagaattaaaacatttgcatctataaagtaacagcttcgccaataatatgctcaaaattcaaaatctaacaaattattctaggtcacctaatagctgcttcatataagaggtatcaacttagcctaagcttattctgcagaaaatagcatctataaactagaggcagttagtaaagaaaaatataagcttaatgaaacacgaaaatatcgttttcggactagtgaaaaccctaaattaacacagcgaacatatagaccccagcgaggaaccctagaattgacaatgaaaaagaaagaactatagccccaaaagcttaaacttaggattaaagataacccagtgaaattacgtggtatcagtggaaactttaacaatattagagtgataaacggaaacttgattcgaagaagttcggcggagaaagagagagattccggtaacaatggaggcgggtgaaaattatcttaaagttgagatcgacaactagtgaacttttcttttattaacactttagtccttctaattttaacagcttctagttttgtcaaattgagctagcccgtatatttataatccaaagtcacattcgtatgggccgtgatctgctttaaggcctatcataacttttttttttaacatctattttattgatttggaagtgggataggtcattgaacaaacatttttttcttattaatttatttattattagttcaatttatacctgttttaattttcttttaactttgcttttttttaggctaacattatactattctcattagactttactatgtaagcttagttatttcacagaaattgcattgattttgcagatagtggacaccttatagaagattttgatattatagagtcgtcaaataataactacaaaaatttggtgctaaggttgcaacattgttttggtcttcagttatttagcacaaatgggagtgctttccacgaaacaaattttaatttgaaaacttcttttctttatttttgccttaaggacaaagactaaaaaagttgagaaaaatcagagaaaaatatttatatcaatattgttcaagatcctaaatggaagcagagagtgaagaatactatttgttgctaaacaaacaattactatcatatctagagtattatgttcgatatgtcacaaacgaaacaaaagccaacaaaacatagtaaaagagaaatcagtccttctgcagtaaatctctcaaccggctccaacctagacctcggtggcagcggcaacttcttcttgtgcttccacggaagcttccgtctctgcactggcttcctcctccggagtcttgccgttggtcacaggtggcaccaaagagtcaaacttgtctgacttgcccaacactatctcaatctgcaacaataacaaacccaaaaggagataaataaaacttcaaaagggtataaggaagtagtaaaaaagaaactcgcctttgccttctggaccatcttcccttttgtctcatctttcattcccacagtcgatgttagcacctctgtaattcaacacagaccagagatgaaacagtttcttcaatagaacgaaaggttcaaagattgatggtaagaagggagagatctgactcactcttctctgttgcaagtccattgttcttcaagatctcagagattgttaccacagttgtgattgctatacacacattaatgattatatacatatacacgcaaaagatgagaaaccgatcaaataaaaaagataaaggtaaaagaaagagtctatatacccattccaagtgcagaaagctcgacctcgttgtgttgctgaatgtacctctgcatcaaacaacgaaaagatccaattactctctaagtaatacaatcaaacacttggtggacacaaagtatcaaatagataaagatcgatcctgaatcaatactacaagtatccaaaaacagatcggaaacaaaatccaggcgaatactgattgttcgtttcaagatactaaaacgatgtttcgttaactgaatctacaatcttaaaatcaagcgaatctcgaactctagtaaacagaatcagtcaaaattgagaaaaaggaagactcgttgatctgaaaaaccgtagatccggtgatgaatttaggtttccgatcattaccttggcgagattaacgtagaagaacaatggcttcttggtgttggaaacttggatcctgttcttcttgtgagtctcaacagtggcggttgttgttgttgttgcaggcgcgagaacgatgttcctctccgatgggattggtgccggagccggtgttgctacttccatcgccatctttctccgatcgatcactcttctttcagtctctctgcgtaacttttcttcttcttcttcttctctctctctctctagcgggaaaagttctttgatcgctttgggttgttggttactctcggggaattagaaaaccgttacgacgcttaacggcatttatatagcactcgttgcgcttctcgtaagtcctactaaaacgtgacacgtgttcgtcttcaaacggttcgttgaccgagtaaagagcgaatgacggagagagaccactatgcttgtgaggtataaaaatttagtggttgagccttttgtaaatctaaatgggcctgagttattttgtttgcaacctaaatgggcctaagtttcttttaaaaacccatctatatatttcttttcagcaccaaaacaatgtgagaggtaaactgattttggatcccattgatcatgtaagttaataaaaaaatttaaaccaaactttaataatataatttttttgatattataatcctgatttatataacttttagatgttgatatcatataatagtgttatggacaaaattatgatatattgtagagagagattttaacttcgttttcattgtgtgtagactgtgtggtatattataatatccacagaccacaatacatgagaccaatctcgttgaaggtggtagccatttttcataggcaatatctttttctctgggaccatttgttggaccaaccgaccgatttgccttttgttttctttgattatcctcgttaagaaattttgccgccaaaaaggatagatgaagattttgtgatttttgagttgcgacgtgggtcctacgttattccaaaagcaacgtgggtcctacgttattcaattgaataccattgttttgttctcatttcaataacaaaagttgtattcggtcggaattggacgtttctaggctaccaattagtattatatgttttcatctaactaaatttttgaaattaaaaaaacaaatatagaagaaatttcttgtgtttttttttttctttttgtcaacgtataaactgttttacaattgtatgctattatactttcaaattttctacgtagtgtatatgtagatgcgttcacaagccaaaccatatttcgaaaaataatactagaacaaagctgcgaaaatttaaacaaagtagcgagggaaagtatataaaattacactcttgatgtttaaactcgtcatgaagcatttttaaagcttatagttctcttttacactatactccataaagtgatatacgtactctactacagccttcaaggttaaaaatactcaataggattacgtatttggataaaactcaaaaagcctgtgacgggttaaatactggtatcacgttagtcgagaggtggttattaaatagaagtaacttgtcacattggtgtatttatgattattattaaatgaggtatttttcacattcgtatccgtcttgtaactttaatgaccacgatgattattgatgagtttgaatttccttctaagatactgctgcttaacaaatgattattgtgatttttttgatacattaaactcaaaaactaattggaaattaattgacacatttcaaaataaaactaagcaagattatatataaggtgaatcaatttttcaaatcctgatttttaaaatgaagaagaatcatgaggtagtaaaagcgccaataaaatccaaacaaaattaaagtaaaccgatttgaaaaataatatattaaatttgaaaaatgcaaagtcccaataaataaccaacagcttaaacaaatcaaacaccattccaaaatagtcaccgcccaaaaaaaaaaaaaaaaaaaaaaatcctttttttctcttcttgagagagagaaagagagagggagacaagtttgttctggataaaaagacaattcatttctattttaattgtctgcaaaattctcacgggccatcggagagaggagacagaggtggtgctgcacaagaatccttcctcctatatcctacaagacttgtaagaaacaatttttgttttgcattttggttgaaacatttatcttctgttttttgggtacctgctcttccttaaatccttgttctatctgtaaaaattgctctcaaagttttcaaatttattcgttattcttactatttattgcccatctggatttttaaattttgaaaatttgactctttcttcatttggttgtttatgcgtgttggtttcacttttgaattgttcttctttggccctttctacagattcaagaatgtttctaactttgaaccaatctctgttcattacgttccaattttgaaatgtcagatgaaaaaagagttgtgaacttttagaagattatattttgttatcgctagggtatagagaaagctgagattttacaaattgaaatgggtctttgagaatctgtgtaatagagaatctgtttgttttgtctttggttggtggatatgtccagtggaatgggaagagaagttgttgaggtgcttatggaccgaaacgccgacgtttcaagcgctagagttcatgttgctcctaagatagctgcagaggagactgatgaggaatttgaagtcaaagaatgcacagaggagaagtctctttctgagaatgcaccaaatgttggatctgctgagagagttggagctcagaaatcacctaaaacccgtaatggaaatgctaaagtttcaaaggtaaaactaattcataagatcttggttttgagaataacgctttgtagatggtatatgattgaggcctaaatccgattttgacccgtttcttaatgttttttttagcagcaggatgctcctcttctcgcggtgaggaagccattgcaacccgagaacaagaagcatattgatgacgaagataattgctccattgcttcttcgtatccttttcccatctctatcattttatacttgatacttatgtatggatgtttatgtacacgatgcttaacagaatcgatattgtttccttaacgttatttaccacagcgttgcaacttccatgaggatgggtaagtctggattgacttatggaagtgctccaacgtttaggagtgctcaacgtgctgagaaacgcaaggaggtaagtacatattctatctttctgcttccacatctcagttatagatcacataagctctttaaagccaacaaaaactcataatcagaaacataatctgcattaaacgtgtagaattcactctgttctgtatactgattggaatttattttgtggggtctgcttggctcagtattaccaaaagctcgaggagaaaaaccaagcgcttgaagctgagaggaacgagcttgaacagaggcaaaaggtaaagtacacatttccggtagatgcagtttttttacctgattctagattggttgtgaaacctcatagatttaaatggtttgcaggatgaacaagaagcagccttgaagcaacttagaaagaatctcaagttcaaggctaaacccgtccccaacttctactacgaggcacctcctgcgaaacctgagctcaagaaggtatccttcgaaccaaaactttatctttgttcagagctcagcattgttctacttatgtgccaaagtaacttatgttatgtttctttctagcttcctttgacacgtcccaagtcgccaaaactgatcctttctcggagaaaaagcttcagcgacgcagtcagctcgtcttcccgtgaagagattctgaagacagtctctaaccggaaccgacacagcactggaacagttcagaacaaagacgatgatcacaggaacaagaacaccaatgctgcgcacgacagccctcgtgtcagatcaggcaaaggtaaatccggattgaaaccagtgaacgagtcctcagaagaagcttgaaatttcaaaagatgatgctttgttggtctaacttgatcttgccggagaaaatgtaaaatcaaagactctttgtttttcggttatttccggtatacgtttggttcactatgtaactgtcttttttcgattttaagttttaacatgaaaaactttatgttgattgttgaacaactcctcctaatgttgaaatttgtaaatctgaatgctgttggatttaaatttagcagctaaggttattttcagaaataatctctaatcgaattatttacggactgaaaccggcatcaaacatttatcctaaaccgaaatagtcctaacaaacttctgataaaatccagagagcaaaccagtggaaagcaaaaccggcatcaaacatttaacctaaaccggtaaatcaaatatagaagctttaaaaaaccaaacctaaaccggctaaaatcgatagacctaaccaaccactagcagtttcccggccgccgcttgaatgatgaccactgcggtgcgttccaccgccataaatcggaatcggacgtaatcctcctcctctgctagaactccctcctccgcctctgctagaacttcctccaccgcctctgctagaactccctcctccgccgaaactgcgtccccctccgccgaaaccgcctccacctctgcctcctcctccgccgcctttcttaacaacgactgttaatttcggtaaattggcttcgattacgtcaccgtctggcttcaattctacttcttgaaacgggagatcatcatggtttggatcaacgaaggctaaacttgttgaagatcgcgagaccgcgtgagcaaagtggtgttgcagttgcaggtggagacagagaagaaggaataaaaacaaagatgctttcttcaaatccataattcgtttcgtttcgtttctttctttttctgtgtgacttacaatttatacaccgaattgtttataaccgcgtgactatatgactattctaatttgaatatctgaacgcgtattttaatatatccgactaattacaaaatatatcatgtttagataactattactatctgagacccattttcctgtcggcttctgagaaatatcaaagatggatttgtatacgtatataccaattttccataaacaatgctacaggtttcgttaaagaaacgaaatgttatcaatcatgcatgatttcatacttttgattatcatatagttttgttatgaaaatctttagtagattaaggaaatagaatttaaaaaaaaaaagagagggtaaaacagtaattttgtgttccgaaagtttaaaagataacagataatccgctcacactcgagcaaatttatcggagcctccctccaaaattcaacaatggccacttctttaatgtctctgtcttcttcatttcttcaacctctgaaactcaaaaccctagcacaacccagaaacactgacttatctaccaccagaaaaatcataacaacatgcgattcccaaaacaacactggtaagtcaaaccccagcagcagaaaccctaatttccagaaacggcgaaactcctccaagtatgggacttctagaaggtcgatcctcaagaaatcgtttttacaagagcaagttactttcaccgcacgggtctctgatgacccccacgtggcaattatcggtggaggaatggcgggtttggtctgcgcattgaacctggaagctcgtggcgtccagtccacagttttcgatacggttcgtcaatttagataatttcgaatctgaattaaagtttcttagaatgggttctgtgaaatttgtggtctttgggtgtttttgcctttgtatattcacagttcacttcaaagtcaagttttttgggctcaaatgtggctaattgaatcgaattagtccattttcatggacagagcaatcaagtaatactcttttgtgttgcgttcatgtcctttggaaactttcttttatttttttctagtctgaattagaatttggtagaacgggtgctgtaaaatttgtgattttttggggtgtttttgctgttgtaatttcacttcaaactccaagctttagtaagaatatcttgtgtcacttctgcaggggatacatgggttaggaggaagacttggaacaagaattattgaaccacagggactaattttcgatcacgctgctcaattcttcaccgcggatgattctcggtttatcaaattggtcgatgggtggttagagaaaggacttgttcgagagtggaaaggtgccgtgggagagcttgaaattggaggtagcttctcacagtttccctcatcatcacctccaagatacattgctgctaatggcatgcgatctctcgctgattctttgctattagaggtgtgatatgttatctctgtgcagcgaaaagtttgagtcttttttgaaatttttatgagttgaagtaagttatactggaatttgttgcagagtcaaatggtgaatctggtaaggccttgttggatcagtaagttggaaccacttaatggtatgtggcatttaagtgagaatggaacacctcgtggtcagtttgatgtcatagttattgctcataatggtaagaaagtgtatatatcggtttctctattaatctctttagatgctttgttatgtcttctttatagaaatggtttgcgttttgttcaggtaaatgcgccaatcgcttgctttcagcatcaggcttgcccctagtggctaaacagatgaaggtagagaatatctagtgaaacagatatttttttaagccctatgatatcttctgatacaatcctcttgatttgttctagaaactggatttgagttcaatatgggcgctattagcagcttttgatgatcctcttcccacagtgaactttgagggagcgtttgtgaaaggagttgaatcactgtcttggatgggaaataactctgcaaagcttggaaatggcagaactccaccacattgttggacttttttcagtactgcggcatatgggaaacagaacaaagttcctcaggttagtttcttcaaagctatacaaataatgtaatgcagaaatgaaatggttttccacccttttttgctcataggaaaacatcccaacggtcacggcagagaaagttaaagccgggatgcttcaaggtgtggaaatcgcattggggttgcctgaaggctcacttcctaaaccggtttatacacgtctccagctatggtaagtaatagttgtatcaacggtgctaaaatgtttgaagatttgtggagtgattcaatactttccacacaggggagcagctttgccgaagaacactcctgcagttccatgtatatttgatccacaaggccgtgctggtatatgcggtgattggcttctcggttctaacttagaatctgcagctataagcggtgcagccttaggaaaccatgtaagaagcttcctgtgactctccttaacaaaaatttgcggatttcagaataaaagatgacaagtgttttggtattttgctcctctttttttcctctgtagattgcggaattcttacagaacggtgaagctaatccagaagaatttgcaatcggtttacatgataggttaagtcctcttgctggccatgatattggtcagtttcctggtttaacatcagtgggagaaaaggaagaagctaatgcatatcagctgctgtgaatacatcagtctactgttacttgacgaaaaagctaagaagttttgcaaattaagcttacagtgatatcagtttctacttagaggctcaccattttcagcctccttcttcattggtgacaaaaccacagccgatttgaggtgctatatgaaacaaacaaaaaaaaagaagctgaatttgtctagctagttatgaaaattttgtttaggctcttcaaaaatcaatgaatatatattgtgatgaaatatttaacctttttggtcataaatggtttctattacaaaaaaaaaacaaaagagtactattgtatttctgttaaaattttataatacgaggttttatttacaaatccctaaattgttaaagaccctgccgtgaaacgttattaggtttaggttaagagtggggaaaaaaaacgaagcagtgagacagtgagaagaagagaaatcgcgatgaagaaaaggggaaggaagtctaagaaaccagaagaaaaaagagctgaatacgacccgagttcgattcttcctctggaactgaaaatagagattctcatgaagtcaccgccgaaatccatagccaagctaggtttcgtttcaaatcattggtcatcgataatccgcggccaagttttcaccgacttgtacatgagacgatctttggctcatccacgacttcttttctcagtgtaccgtcccaacatgcagatgcagttctttcactcctgctctcaggaagatccgtcttctgatcatcgtagcgtcagttacactctgaattcagatctacggtactcattttctccacccatcggcggtttgatattcggtcaaaacaatactaaagctatgattggaaaccctagtacgggtcagtttgtacctttacctagaatcaaaacgcagagaaagcacattttctccatttttggatatgatccagttaatgatttgtacaaagtcttgtgtatgacggtaagaactctacgtggaccacattattttagatgggaagatcctatgtgggaggagcctatgacagaggagcatcaagttttcacgctaggacccaaacaaaaatggagaatgctcgaatgtaagtatctacatcgtcatcattctggatctcaagggatatgtagagatggggtgatgtattatttagcttctttcaacgataaacgatctctgatgagctttgatctgagctctgaagaatttaatgttactaagctacctgaggattatatattacaacagtttggtaatatggtggaccatagtggaaagatagctatagtgagtcaggcatacagcggtccaatggacctgtgggttcttgaagatgtcagcaaagaagagtggtcaaaagttgctgccatagttccttctattacagatatagttgggaatgatcaaagagtcattttcaggggtatactttctactggtgagattatactttcactgctcccaacccccaagccgcccttcttttttctctgttacgatcccaaggaaaaaactgctagaaaagttgtgattcaaggaattggagaagactatgctgctattaatgtctttttcgatcacgtagagagtcatatggttctgtcgaagctaacttaatatatatgttgatgactagttcgtttggtttttccccaagcttctcttctttgttcaatttccatttcagttctcggatagatatagttttaaagactctcttctttgatattggaattgagacatttgattcaccatttgtctagtcttttggtcaatggttttctatgctttcggattatgcaaatgcaatgcttatgacttgattaaagtaacttttgcgtggatcttacaagcttcggttttatatttggagagaagaaaaagagttttgtgttgcctagacggatcttcttcatcattttatgactcaaccttatatatcgttgcatgcattgatacatatattgaagaaaaagctcagttgaaaccaaattgttgatgtttcttggtactgcctctgccacataatccgagttcacaagtgctcttataacttctgtcagagtggaaatatacaattgcaaatcagagctacaaagaccggtttcttgaatcaaattcattctttcttcaaatccaagagtagacgccaaaaggacatacatattgactctgtatcatcaagtgtgagctgattgtgaagacaatattcttgaatggttatgctcgccttcgtaagttacaattaacattgaagtttcatcaatacatcgctccacatgcttccttgctggacaacctctcacactgctgcatttatagtatcccctgcaaccgaaacaacaaaaggaaacttatatcaaaatcgacataaagttattgaaatcttataccagaagatgtttatatatataccgtggatgcggtgaaccctttatcggtttctgtccatacttcctccaagaatactcatctggaggaatgtctgcaatcttgttactgattgcaggcaccttgattgatcgttttaccctcagtttcctgtataagatcaaacctttacaaagagatacaaaaagaacaatttaaagggtcaagattgtcacaaagaacaatgacaaaccttttcttggaacagtgacatttgcttcgacttccgcatttcaaactaccagagcacatcttccgggtatgctgttggtcagacccacgggacaatccggtcaaatggaacgagttcctatcgtagtctgttacactagcatccatgctaagagatgacacaaatgatcttgatccgtttgatacactcggagtatagcaactactaccagatccatcaaacttaaggtttacaccgctattactcctggagtaagctatctgctggtggttgtggattaactgataaggagcacgaaaaggaggtggctttaactccagaaacgacttgtcaacacacattttgtgactaagcattaatgaaggatgacccaattggtgttttggctccatttcattataaacagcagaagctggaaccatctgaagtggctctggtgcaagaacttgagtgtaatcaccacttagatcattaccgcagcaaataggactctctaagaagatgtgttgaggaaaagatgacctaaacttgttggtactcctaaactttccatggcctaaccctctagttaacagagaagctactcttttgaacttggaaactacttctcctgtttcaaccgttaaggatttgggatcactggttcgttgtgacaagagatttaacactccatgacagctttctatagctgatctgttagcagcttcaacttcctccatgtttttcttctacccaagtttcagatcagagaaccaaaaaaaaaaaacctaatttcacaattctcaaactcaaacagttaacaacacccaaatctctcctagaccaagagaatcataatcaacacagaaactaaaaagcctaacaaaatacagaacttgcaacctatataacaaaagatctcaaaataaaaatctaaaccagattaagacatgaaaaaagagagtacattagatcaaatccaaggcgcgtgaaaaatccagaactcaatctctaataaccctaggaagaaaccaatcaccatgagttccaccaaatcacttccaaggaaaagtgctaagtaaaaatcgaaactccctcaatcctaaagctaaaaaatgagatctttctcaacacacagaggataaaaattagctcatgacaaagggtcttcaaaagaagaagaaagaaactccctgaaaatttagagctagaagaaaaaatgagatctttttgaatacccagaaggtaacaaatttagctcaagaggaagaaatcagataggaaattttaggataaaataaagagaaagaaagatttgtcttgtttgkttctttgtgagagagagagagagatagagatggtgagataaaaaagtgtcaaaggttatgacttttgctttgtgggtggggaagagtttagacttgcttttacttaaaattcccccaccaccaccatttctacaatttttaaatattaccaaaaacccctttttatttcctttttttcttcatttattcacttctcaaggagaccaaatttcaattttaaattttcctttttattcttaaaagctaaagttattcaatttctggggaaaataaaaccaaacacaaaaacataagtggaatacagaacagagatgtggtcgtcgcagtttcagaggagaggaagaaaaaaaaaacagagccctctgttaaaaaagagtttcttaggtgggtcctactagtggacctactttatacctactgtttttcgtacaaatagaaaattgattaaaatcataaaccgtatcaattaaaggaaattagataatgtatcttaacattttctgattttcggatatctttctcttaaagtaaatgatgtgattaactataatatctttaaagaaaaattagagaaagagaatggattagagtcaaatatctttaatgataattggacattgactcagtaaaattcttgtactactatattcatatgttttaaaaatgattctaattccaaagcaaaattcgaattgattttgtattcattttagaaaatattttttattttttatttaactatttctcgattgtcatgaaatggaaataacgtccattgtggaacccacgtgtctcccgttgatttcgaattccgagcacggagttagaaaagtaacggtatagatttcgacacgtgccctatctcatctggtcgtctctctagcacgttgtatcacgaatcacgattgttgactagctcttttttgttttctttctttctgtttttttttttgtgtttgttgttcttgttgttaattatacgatatttttattattcttgttttatcatattcacaatgataagtgaaactttcttcttatatctataaatctctaatcatcagtcaaatgattgaaattttctgtatttaatgtgcagggttaaaaaaaaaaatgaggctattaaagcatatagaagatcttgtagcatgtaaatttagaattttctaaatatgttttgtctattgcaaatgaatgacaattttaacattttgaactcaaaacatatccgttttaattatctttcaattgaattagcataagaataaaatattcttttctattctaggagaatcatataagattaatgcgacttggttagacagaccaactaatattcttcggatccgattctaaatacagagcttatacaacaatacaattgaagtgacttaaaatgtgatagtaatttagttgaattaataaccaataataatacatgtgtgactttgaacattatcatatactatttcgaaatcatccaataacataagatatgttcgacctatcaaatttaaaaatgctacacacatcacttgaatatgctgaaccaaacaaacagaactaacgcactagtaaatcaacattattttttgctcacttcataacatcaaattacaaccaaccatctattccgcaataatgatcttttaaactcaaaaacttgtgcatttgataaagaagaaaaaggctatttgtaattaacgttacataatcgagctgctgcatcattctctcaagcaaaaaacatggctcctctcttctctaagtaagtcatactgactcaagccatgccaatgatccagcgaccaacaacttgctaggtaatgtcccaggcgatggtgctaaatacgttatcttcttcttctgcacattaacttccgtcacatacacaaacccagaaacattgctgtatcaaagaaaaaacagagagaaagaaatatcaaaatcacgaagaaaacatacacgaaagcctttgattctggaaacagcaagaacttttagagattaccttgagatgatctggtctggttcttctgcgtatgagacagcaagaacagaatgcagcagatcccgatcatcgatatttacaggcgtcacccgcaacggatttgaaaccgaggtagacccggctggaagagccgattttggcgcttgtggtccaccaccaattcggaacacttgcagatcactgaaactcgatgtattggcatacggagagagttctttcgataaaccgtaaaaatattcctggaaaattcagtttttgagttctgagttacacctccaaaggcatgaaaaaagggatattaaaagatttgagattgaaaattttacctgaatcttaaagttccttgatcttttacggacctctttgaccctggctacaactccaccagacttgtgaagcttcacgacgtcgacattactcttacttctcagcacatctttaagcctgctgaagagtttttcctgacccaatacaagtacaaccgaggcattgaatgtgtctattgcgtggagaagcagctgcaagacgaagcagatacagttctttatcaggcatttgcataatgaaatccactaagaaggagctaactataccaaaaaatacgctaaaaaggatctaacttttacctcataaccaatcccctcgatccatcccattgtgttgatcaccattccagcagctcgcgattcagggtttccgacaaactgtttctccagaacttgagcaagctctttcaccagagctttgtacagttcaacgttcatactgagagagccaaagtagacatatttaaattcctcatcgaggggaataacgtatgatgggtaggagaaatttgagaatcacttactttggtgatgcgtggccgtagtagtaaacaagggccatatcaagaggaaacccttcaactggatccagtggcatttcaataggggcagcagcaatagatcctggtattgtaatcgagccttggccaacatcaaggtctacaaatgtaggtctccatccctgtttagctgcccaactaaggagcatctttgtcaatgtgctcttcccggaatccgtaggccctactacaataacccgaggtccctgcattaagtgaattcttaagaaccaagtgttttaactatgctgatattgcaatacaataatattgaatatcgaagaaaagtacctgagaagattctgggtcattagatgtggaagctttggcaaaacgtctccttgcatctagtatggcatgcacattaatgtagctgaccatcggcgtctggaaacagagatgtagttagtaaacaaaatttgctctacatatttaaagcaagcgtaggaatgaaacaagtaatccaacctcatctgctgtatagtcagtttccgtgacaccatccatctcaattgtcgctccataccaagtgaaaacctgacaataatcaaaaggcacaagatggtaagcacggtgtttcagagctccgattatgaactttacataaatcattagcagaaggaaaaatagaaaagaaagaaattgggggggaaaatcacatctatcatcaatctttttatacaacccacttaacaattcttacctagacagcataatcttcatttacaacctaaatcataagtctttcatccaactcaaacccaaaaaccctcaaacttcactggcaaaggatgtacctttccaaccccaaaaggccagagggtgaattcaatagtaactcaagaacccactttaagaaagataaccactaaaagaaactaaatcaagaatggctagttattttctaccaacaaacccaacaccaaatatgttaccaacaagctacattttatctataagccataaagcataatgcttacgatcgctctaaaaaccaaggattaagaaaacacataccgcaaatttcatgcgaggagggaaggtacgccatatttcaggaggcagttcagagccaaaaatctcagcggtcccgttaaccacacggagtctgagaggctcttcagagacttcgatcctgagctcgctttctctctccaatttcacttgcttcagattagcagacccgggaacagctccactcaaagccggtggattcatggacggaccaccgtacgccattgctttcactcagagtaagatataattgtagactatctatcactcggagtaacaggagctctctttaagtcattatacacacttgcgcttgtaatcgctcttcttcttcttaaaaacaaaagtataatcaagttaatctctgcaaacagaaaagaaaaatgcaaactttactagatttaaacagccaatcttgaccccggaattataaaagcacaacagagatcaatttcaaacaaccaatgtatcaaaattcatcactagagtaacaatcatatatatataagagaaagtaatagaacagcaacagagaaagaaaaacgagagccatcgatttctgtacccagaaatcgaaaaagagagaacgagagagcaaaaagaagacgaattaccaaaaaaagggtcaatggagggaagactgaaggcggcgaaagaatgaacggcgattctacggcgaggagaaacggacgtcggagattcgcaaacgtgtgtgtgtgtttgaggagaaacagtgaattcgacttacgaaatcaatttactttaggtttatatcgctgtaatttccattttttcgattaaggcaaaattggaaaacgaattaatcccggtttgagccgttaaccgacctgaacaaccttttccatttttctactatacagttttccggttaatataataatttgtttctagcttaataaactcagtaaaatataacttaatacaaaaatttaccatagaaaaattctaactacgaatcttaatacaatgtatttttgattacatgtaacatcacaaagggatataattttacaaatgtttttattgaaaaataccactcaatataaatgaaatcatcttcaaattttgttacccagattccttttctaatcctgcaattaacacaaaaacaaaaactttaacaccaaaattaagagaagaaaaacaaaattagtatacgtattgcgaaattaccttatcgtcctttgggatttacaatctgagagaatatttcggtattgtcctctgaggagagatcactcacatcatctctaccggcgacgttaaccgccatgcctcctctaccgagatcctcagagcttcctccattattcggagtccgatgacgagtcccgtcagcagtctcttgaagctgaagtgcgaattcgagattccacaaaacatctcccattgtcggccgttctaatccactatcgttaagacacttctccgccgtgtctgcaaatttcttcaaacactctgcattgatcttccctttcagattcggatcgattatatcctctaaattcccttttcgtttgcaattcattgcccagtctccgagactcacttgttccttaggcaaactcgggtttaacgctggtcttgcgcataagatttcgaacagaacaactccgaatgagtaaacgtctgatttctcagtcagttgttgtcttctgaagtattcaggatctaaataaccgaagcttcctttgacgacggttgttacatggcctccattcatgttaggtccagttttggataacccaaagtctgaaactttggctacccagttctcatctacgaggatgttagttgttttaacgtctctgtgtataatcgtgtactttgctcctgtgtgaaggtaatgtaatcctcttgctgctccaatagctatctctagccttcgtttccaagttaattgtggtttctttgtgttgtatagatgctcacggagtgttccaaatgccatgtaatcgtatacgagacacatttctcctccctcgtcgcagtatcctatcaaggagactaagtgtttgtgtcttagtcttgagaggagttcgatttctgtctcgaattcgttgagtccttgttctgaatttgggtttgatttttttaccgctactttagttgtgccgtctataactcctttgtagactttaccaaaccctccaactccaatgacgttggaatcatcgaagttttgtgttccgtgtttgatttctggtaaagagaatctacggcataaacctgctgcgagattggataggtgacttccattgttgctcttccctgagatggttgatttggttcctgatgtggtagagtttccatatataggaagccaacttgatgtgtgagagtcgcctccttgatatccttgtttcttcttgtaggccgtgaaacacaaggcaccgattaaaaccgctaaaactcctccggccgaaccaatgatgaaagcgtgtctcttttcgttcttgaattcttttttaacctcttcctcagcttgcataggcgatggctcggggtttggacccgcaagatttttcatggtgtccatcttgaaaatctctaacccgttaagagatgaatcataatattccggttgaccaaaagttgatggagtcatctgaagtgtaatctcttcgcctccgttgttggcatcaacatatatcgcgtagtctttgtacatcgggattcctttctctcctgtccaccctattatatctgcaggagtagtatctgcctgcgctgttctgttattgatgtaaatgttgaaaaccttctggttgatcttggaaagctggaattcgcagaaatggagtctcaaaatgtaggtgaagttcttatcgatttggaacatccatgtaagattggatttgaggttgatatctccgtttgggccttgagatcttgcggttttgtatatatcggctggagctatagacaccggcatgttctggtagttgatcctaaaattgttgcttgcttgaagtgtaacaccaagacccgcactaaagatgtaaggtgcatcattataccaagttcttgtcaacccaccggagtcttggcttccagggatgtcctgaccaccaacattaagtctaaacattgactgaagattcgcagtcttggcatccattgtttggtctgtgaaaccaacaagagccgccgtgtcaaacaattccggcatctgaatcacctcgataccgtttataaaggcaaatgcgtctcggtatttatctgaaggggtaaacttgatgctcaaaacatctttgtcagtgggtgcaagagagtattctttaaccagataagcttgagtcaaagcttgacacgtaatcgcggcgctgaaattgctcagtaaggtaacatcgttagcttccacagtgaaatacgagttggaaatgttgagaccggtgtatgttgatgggtagaaatataaccgaagcaaatgtcttttatctcctttaatcgggatttcataagttgctggagctgtaaagattctggctgtcatataaggaactgttgagagaagtgaagggtcttgatatgtagccgttgcgtgaattgagtttccagtctttaaaaactttgtatctggttcccattttttcttatcttggtcagcagaagcttctgatgtcccgcagctcagagctaaatcttgtccgttagatctagttggaaaaaccaatagaaaggagagacatgtgaggaaaaagagaatccgagttttcccgctcatggctgacacatcaacgggtagagactctttgccttaaacaaaaaatgaggagagaaaagctttcttttttgtaagaattaagatcacttttacgcttgtggacaaaattagaagtttatttcttattgtctctgtaacctaaccatagaaagtcaggacttgcatggatgaacaagaagcaaaaaccttgcaagaaaaaaaaaaacaaggtacacactcttttttcttttctattttctcgttttgtctagtttttttttgtttgtaattatgaggttactggtgtttttctcattttccgtcgttctgtctgaaagagaaacaaaattagttagaaaaattcgtggtggagaggattacccgaacaagctatgtttagcatatagttagagaaactgaaaagacttttgttctttgactacaacatgaaaattcatgtaatctaaatatagaactcttagaccatattgtttcaataacattattacaaacttttgaaagtttgacttgatagagatagactacgacatgttttgaaactcttttcttagaatggtcaaggatctaaacaaagaaagtccctaaagatctggatgaatcaatcgtcaaattttaagcaatggaagaaaatagctttttgacttttatccattacatagatcaatggtggaaactagtttgttattctccattaaagcactaagagtctcttcaaagtttatctggtcgggttgggaaaaatccaactagagaagagcataaaagtagacatctgatcaacccgacccataataacctttttttgttggccgcgtaatatgttcgagcgcggccatcacactaagaacattcataaaaaaaaatccacaggattcaaagcccttaagctttgatcatagtctcttaaagaggtagtaaaaccataaactagagccccaatttgcattcacaagccacctaacacattagcttctggtcatttctgctttatatacacatcaagtaaaaaatggtgagaagaagagaaggtcttacattgccaatcataaaaccggcgcttcccgaggtcagatcagcagcgacaacgccggtggcctcacagaaaccaaaacatcgtttatcgaaacaactatctatgtgtgaaacaccaagagacgttgcttgggaaagaagaaggcgtcagatgataatgattcaagaaaagaagctgcttcataagggcgcttcagacaatctttgtatacaggcgaatctaacggatgaagatttaaacgagctaaaaggatcgattgagctaggtttcggtttcaatgaagaagcaggacaaaagctttgtaatacattaccagctcttgatctttactttgcagtgaatcgtcagctctcgcctcttccttcacctagcagcagccgtagcagcagtgcatctgcgtcaactttctcatacagtataccttgtagtccaaagaaaactgattcagattctgttaaaatcttatgcccaggtatctaaactcatgtttttggtattttgttttgaatgcaataacatttataaactaatggtttaatatgatcttttttggcaggggacgatcctcaacaaatgaagcagaggttgagacattgggcacaagcagttgcatgttctgttatgcagtcttattgaagattataagcactcagattttcttttgagagataggaagaagcgaatcttttacaattaggattcgaaagaaacaaaaaacaactagaaaattttggagaaaaagagatgaaaattgtggctctgtatataactcacaagatgagagaaagaaaaagaaaaacacctcttgttcataagctgtaatgatgtatacaaaaaaaaagattacaatatgatcttggattggataataaaatgaacttttttctagataatcgattcttaaactgaaaataagcccattttgatctaacgttagaatgaaaatgaagagatttgagaagtcagggtgtattttttacaaaacgtattattgggtgtattttgtaatagttaaatatatgagggtctaagattcaaatttattaaaagataaccaaaaaaaaacctctggaatcttcttaaaacctagaagcctccgactccgaccaactgaaaaattaaaaggcaaaagctttttttcagatttctgataatcagacagacagacacaaacaaacaccggtatcgacgaacggaactaactccgatatccaaaacccactccaagtttcacgaacgaagggcttagtatctgccatggctcctgatgcttctactgctcttgcaggtatgctcttttctatattttagaatgatgtatcgatctctgtcttttgaatgcgtatgaactatagattccttgatgggctctcttagttttctttagctgaattgatcttatggtgaagtttcgattttttcttcctctgctgccttttcttcttccttttgtgaaattttcgttggctataatgtttcggctatggccattactagaactgtagaaactcaaatactaattgaaaattttctttaatttggtataagtagattagaattgaagttgacacttggtagtttgaatctctaattataatttttgttttcgtttcatctttggattcttactctagcgagggagaaagttcagcaaatcctgaatgcagcttgtaccggaaatctcgaattccttaagagtgagtgctttatttacttttcgtttctctgttttctttgagcagttatatgttttgtgtactgattatcacttctccaagcagatgttgctaagcagcttgatgaaggaaaagacttgacgaaaactgtggagagtattaaagacgcaaacaaacgtggagcgcttcacttcgctgcgagagaaggacaaactgaaatatgcagatatcttttggaagaactgaaactcaatgctgatgcaaaagatgaaactggtttgtgtttccttgtgttttacaatttgcagaacttttctatatatgtgaaagttgatcactgagattgttatgatttggtaggtgatactccgcttgttcatgctgcgaggcaaggacagattgaaacggttaagtatcttttagagcaaggagctgatcccaatatagctagtgaactaggagccacagctttgcatcatgcggctgggacaggttggttatcaattgctctgtctttttttatttcactctcttgggtcatgaagtgttctgttttacttatatagcttctctctatacatctattaggagaaatcgagttgctaaaggaattgctctctagaggtgttcctgttgattctgaaagtgaatctggcacgccattaatctgggctgctggccacgaccaaaaaaatgctgtggaagtcttgttagaacacaatgccaatgtaaactttgtgtatatctctatttgattatctgtctaaaaccgtactttcttataaacctataacctttttgttgatgactctgcagcctaatgctgagactgaagataatatcacaccgttattatctgcagtggcagcgggttctctgtcatgcttagagttgttggtcaaggtttaacatcttcttaacatcctctagtattgcgttggttcagctgccaaatatcttaaatcagagctaacaaaaaattgttctttttgtaatcacaggcaggtgccaaagctaacgtttttgctggtggtgcaactccattgcacattgcggctgatattggaaaccttgagttaattaactgtttacttaaagccggggctgatccgaatcagaaagatgaggtaaaaccaacttggaaatcagttcatatgcaagaacctgttcccttgttcatatggtacgacatgaatacaatcttgtggtactatactgattctactgtaaactcgattatttttaggagggtaataggccattagaagttgcagctgctagagacaacagaaaggttgttgagatcctcttcccattgacaacaaaaccagaaactgtttcggactggacagtagatggaattctcgctcacatggaatcaaacaaagtaggcatatcagatctttcctggcattagtgtcggatatttcgatattttttgtctgaaacaacttaacattttcaggaacaagaggaaaactcaaacaaggcgaaatcccaagagactgggatcaagaaagatcttcctgtggtacttcatactttgatcaatatgcatttctctttcaacaaattgtttaaagtacttaaagataaccatttttaacttccacaggtctccccagaagcaaaggcaaaagccgcagaagcaaaagccagaggacaagacgcctttcacagaaaggattttcagatggctattgatgcttatacacaagtattctactctaaaacttcttctgaaatcaaaacaagattcttaatttttgcctatatgtgattttgtggtttgtttgaacacaggcaattgattttgacccaacggatcataccttattctcaaaccgaagcctctgctggttgcgactaggacaagctgagcatgccttatctgatgctaaagcctgcagagaactaaacccagattggcctaaaggttgcttcagagaaggcgctgctctgcgtttgctacaggtaaaaagcatctacaatgccactaaaaatctttgatctcttaacgttgaaactgtatgactcaccgagtttctcatgaatctccagcggtttgacgaggcagccaatgctttctacgagggagtattgcttagccctgaaagcaaagagctcattgatgctttcaggttcgtaagaaacacttatggtgttgatttttatcggttggtattgggttttcgagatagatgatgttgtttttttgtctatttcttctacagagaagctgtagatgccggaaggaagtttcacggcaagggtgaggttaaggccaaatcataagatcttcgagagatggtttatgtagtatatgtatgaagttttgatctacttcttacctttgttctcccttgtgcactattcttaggaacaaagttttgtttgtggtcgaatttggtaatttgtccgagtttacagcttagataaaaaagagttggtaatacattagactgattttgaaacttttcttatatttacaaacaaaaatttaattacgaaaatcaatatcaagaaacaaccaaacaaaatctttacttcgtctcaacaataatttttccttcaaggagagctagtatacttgtgttcaagcttaaaatgacatacgaacaacgatagtgtttaatcacaacgtaatattagaaaaatatcgaagttaagacattaaatctgaaaaatagtctacgataaaaagatgaagatatgtcttacaatgacttcaaacctaaggtgccgaaactttagcacattcacacacaaaaatcctaaaaattagcaagtagaacctaacttttacttctttccttgagaaacaagttaaagcccaaactcaaccaaaaccttaatacgactcttgacaccgaaccctaaacttacgactcttgacaccgaaccctaaacatacgactcttgacaccgaaccctaaacatccgccttagcatgaaactcctttcttttgggggctcatctccaccgtttatgtcttcatatcaaagctttaaggtcttcaaagcatcattcctccttgttccaccacgttgtcaattatggcggaaggaaaccttaaataagaatgacacggaatcatctctggcaatggaacactgactctttccgcaacaaaaggatggctcaacagctgggctgcggtggccctacgtgacggctgcaacgccaagcaccgcatcaagaagtcgttggccaccggagatataagtttgggaagcccccacatgtaacagtctctggtcatcactggacaacctccaaacatctgaataaccacacaccctagagaccatatatcaacggccggtcccatcactccatcatgtccaagagattatggtggcatgtactgcagcgtaccaggaaataacgacctagaatccgtagaaggctctttagatgaaccgaaatcagcaagcttaagatcccatggctctccaaaagtggtggaagggaagacgaggacgttggctggcttgagatcgcagtgaacgtaaccatgtgagtgaagagcgtcgagtccttgtatgatcataagagcggcacctttgataatattctcaggcattggtttcccacgaaactgggagatcatattgaagagagtgcctttggaggcaaactccatatagatgtaacattcttcgggttggatccctaagtgaagaacagggcttgaggcttggacgatgcgaggatgattgtggaaacaaagcatgatcctaagctctttcacgagaatctttatgtgattgaacgaagacgactcttcgcatagagtcggaagttagaatcctgtttgagagagacagagccaaagctccctctgccaagaacagagacatgcttcaatgaagactcgggtacaccaaggggttctctgatcatcttctccgtagtagtagtactctcttttaattagattttgcttcgatattttattttttttgacaaataagaaagccaaaaaactgatggtttaatggagtgcgataccacctatttataagacctacgtaagtcggcactcctgagataaaactagacttatttataagactgagtcaaaggataaagatcaaaaactatatttactccctaaaataatatttcaacaaactatttccattttacaaaatagaaattgtaatttttactgtgaaagattaacctcgtgatcatgtgtaatataatgatatctattttattttaaaacttatgaaaggtgataataataagatgcaagacggtgattggagatttgatgaacttgaagatctctagcagttgacaataaagcgaccacgtgagtatccctgaccgttagttcaaatagccgttagtacactaatcaatgattctcaccgtcctttgtgtttccgtcgcagtattcgtcacctgcgtttgcgtttttgaaattattctgtatcaaaaattgtaataggatacattacacgtgattttaattttactaagtgagtatcaacgctacgcgtgggtttgttttgaaaattgttaaaaaaaaattacattgattgttctttatgttaatttctatttactatttgtttatttttgtaatgttaataaaattagatctataatatgtagttacaatttttatggttagattcatttgtgactcgaaatatcaatttatatatttttgtgtataaagctaattatttataagattttaatattttttcacttcatgaatacatataacaacaataatgatattttgatacaattctgtgtaactatgttatttttgtagtttaaaattttcctaactcgattataaataaatcaattccttattttatgtacttcaacaacattgtgatagattcatgattaaagtttggattgacatcaactgaaaaagatctgaagagtattcgtacaaaaaataaaaagatagcaaaaattgaatgtcattgaagtcaacacttttggattttttgtcattgcatatatcaatattagagaaatgatcgtgtctttgatgatttgaaaattgttcaacttaattaaaaataaactatttatgattttatttattctccaaatataataatccaacaacattgttatagtctcatgattaaatatatagaattgatataaactgaacaagatttcaagagtactcatatgaaaataataataataaaagaaaattaaagtataatgatttaatttgcttatttaattttattagttttattaattttaaaaaaatcgaatgacatatgtcattttgttgtgtgatgatgtgtcatttatatggagagagttgaccaacttttatatatatgatttttgaatgaaattaaacgtgatttttttttatgtaaacggtgttaataaaacgcaatgttttagaaatagagtgacttacccttaagcatcttccgctcgggataatagtaatggtaaattgctattacgttagaagtggtttgagctgccgctttagctgcatatgtgcatagctagcaaaacaaagacacatctgctaattaagtcttgccattggcgatcttaatttagatgtttgttctttaaaatataatgggatataatcagagatggactaagaaatttataatcatagggaaaaagttttttatacactgaataaattgctataccaaaaagtttgtcacgttatgagtaattttcttattaggctttgaattttcagtgtatgactagtcttgggagatgtctatggcggctttttcaagctttgtggtagaaattagaagtttttgaggtaatatgattgagcatttattagaggggacatatgtttatgtttaatctttagtctttaggcgttattacttatttgtatcgtacgtggtcaaaattttacggtatccagaatttttggatcagttaatggatcaaagttgattacttagcttgctgcaagtaagtgttctaacataaataattaaatctatgtgtgtttgcatattcgttaacttttttatataaaatccgattatcattttattccttaccaactttccaaacgcactatattttattgggtttattttcattgatatgaaaagataaaactcgagacatttattttctcttattaaaattattagttagagtttaaaggtaaataatatggagatgaactagaattcgaaaatctttagcagttgacaaactcgtagttgactattaagtgaccacgagcgtttccctgactgttagtatcaagctgtctgaaaacaccctcctctaagtccaaaccaccgttactacactgatccacgattctcacagtcgcttgcgttccggtcgcagtattcgtcacctgcgttcgaggggacatatgcacacattcaataaatttgtatatgaaaagagcattcagaaacgtgatttttgaaatagataaaagaacttacccttaaacatctatcgcaagaatcacgaccgcgagcaatacacacttactcggtagagatcccagttgttttgtgcaggattgtaaatatggtaagttgctcaaacgttaggtgcggattgagcggctgctttggccgcaaacgcacatagcaacacaaacacacataagctaagtcttgacatttctttctatatgttgttatttgttttttagtttaactttgtggtagataaaataaagaattgatgaaactttatttatagaaaattatatactatgaaatgactagattagcctaacaaaacgcttggagcacgttgtgtacgtatgattttctttggctttcctttgaatattcaatgtacttactattcttgctaggtgtttcaagtcgtttgttacacgttccatggcggttgaagttttttcattttactaaagtagtacgtatcgaatgataataatatttaaaatttccttattgatacgaaacatatatccctcgacaatacatatatagcggtctttattatttttatgtagaccgatcgatattgacctcaaaatcattacataatatcaaacgcgatcaatggccgaaacaagcatgtttctggaatcaggctgcccaatgagctcattgccacagtcgacaaattggtagtcaacaatgagatggccttgttgatagccaaaaccatcggtgtctatttgattgaacattgctacatccaaatccaagcctccgttgctgcattggtccactattctcacagttactgcagcatttgttcttgtgttcttcacctgaatccatttatacccaccggttaatcacaatttttaccggctatacatcttttgaaatatttcactaacacgttgacgttggtaaatggtaacaaattttatcttgtattcgtcttaattccaacactttctatatgatctccttttgcacaaacatacttatataaagatttgagaaaaagataattaattaacttacccttaaacacttgccgcaagaagcttgaccacgaggtcctgccggcccgcagaaggcggtccagccatacttgctccgccatgcgtacggcttatcagcatcccacgtggagcaataagcactcacggctctcaaatcccaattattctgcgccggattatagaaatggtaggtggcgcgtacgttcgacgcgctctcccctggtccgctaggcccacttccccaacaattgctctgacagttgttggtcggagaacagtagtccgcggtggtaccacagtaaccgtactgactgcagcagatgttaccgggacaagttcgaccaccgccttgacgaccgcattgttgtccggccaccgtagccactgtgtatgataaaagtatgatggttatgctaagtctgatcttcatgatcgataagtctttgttttcttggtggtctaatgcatctatctatatatctatatatatatgaaaataataaaattataggatcaatagttaattatataataatgtttttcttgtgattctacgcaattgatttaattacatacgttacaggtaacgtgcttaaaccatatgatacacacatgtaggttaaatatttgtatatagatatctgtatattgaaatttcgttggattcgatagaataatgaaaatatataattctgttgttagatttttttaaaagagattcgttacaaaataaaagaaaattgggtttctcctcttaaaatttctctacagaattggagtgctgaagttttaataaattaattttatttggaaaataaaaataaattatgaagtggtataatttggaatatcaatgtaatatgctcttttacgagaaattaagatgacctgtgagggtgagactccggtgaaaaatgtgtctaagaaccgtcgatattctttgaacggaaggtcactggtcaaagtcatctgatcggacggtttataactaagcattgcgtatcttccccatcgcgatacagataatgactaatgaggagaggcggctaattgtgattgtttttgtttgtttgtagaaaatagcagcctagtagataagagtcgctctcatttggataaatattgaatttcgatcattgactaatcaaagttaacataatcggtccattgaattagccattttggattatttaaaattttgtttctcaaaactcacttagcagtttaacaaatttcttctatgatgcgtaagtaaaaaagcaaatctatccgcttcctcgtaatttttctttattgacacgagatgaattttcagctttgatctaaaatagtatagagactgggctggcgagcctacagatctttaagtgttgacttcagtcaaagtcaacttgaattgtttgtctatgggcttaacgggcaatacgggtttggtttaccgaaactgagcccatatcaagtccgcttcaaattgttataagttggataaaacagagtacacgagagaaagagaagagcgaagagagtattctagagtgcccggaccaaatggatagggtagctgttatcgggccaaaggcccattaatatttaagaaaattgatgaaaagcccattattatgagaaaatgtaaggccccaattttttttccctagtgttaaccatggcccaaaatgtttttccccccaaattacttaattattgttgggacgaagctgtgcttcttgtttatttttgtgtatctttcatcttcttgtaatcatcttttgtgaatctgttttttgagaaccatcttttgtgcattttgtacttgttaagttacaagttgtaattcacaacgagagcaaaatcagccaatttatattgaactaagtattctacaaacaagtaaatacatgtggtgaatttgacaaccaaggatacaaactagatcaaatttactaaaaaatcagataaataataaataaaacaaatatcatcattatcaaccattgtttgttgaggcaatggatgtcgatgacagcgtaaagcatcaataatggagcatacatattaaagacattattaatttactcggaattcattaaaatattgtcccccaacaactctacattatccacatgctcttgccctttccaccacccacattaccttgatctatttaaagttttttcatttgtgtttcaccgaaaaaacaccaaaaattgataaatgtaatattagaaataaaaaaaaacaataattgaggccaggccaaccttattaaaaaagaaagaaatagacactaaacaccaattggatcctgttgaggccaaccttatatatacgcacgacaataattggtcttcgagttacattgatacaaaaagatccgcactactaatcttccgtttgttggttttacgattgttaaccatctcatgtcatttagctccacttattgaaaagttactaaaataaagaataaacaaacaaaaaggtataatttaaggtggttgaaaatgttggataaaaaaagattgttgagaaatgaaataatgtaagtaataatttggtacgtcaaagtaacacattaagatgccttacggacacagaccatatagacaacacgataatgcgtaaaaacaaaagttggttttaacggaaatagatgcaacctaattaaatatacatattaatatatgtatataatacatataacaaaaacgatttaattttttaaaatgtaatacaccacaatattaatattattattaattaatattataagcaaactccttgctcggaacaatagtttcgagccggtttagctttctcggttcgagatatccaaccgatcgaaacaggctttcttccttttttaggtaagaacacgaaatgtcgtcgagaactcaacttctgttcttgcacttttctaatgcccttggagctgcaatatatagaaaattagtattagcaaagattcatagtataattttacaccaccagttttggattaaacaatactaaccaagtccgattgcttctgatcccttcattattcgtatacgtttgcatgaatcaacaaacatcctaaaatagtccaaacaacatgtaaataaatattttgtatagacgtatttataataataattcatatataaatttaaagatataaaaatactcactcccacggtacgtctcctacaagcatccagtcgccatctttatcttcatatgttggaacataatctgatccgtttagaagatcgatcaatttactctcattcatgaaatctttcattccttgtggtccatagttgcctgaaaaataaaatttcaaatttcaaacaatatatgataaaaaggatcatgttttagtagatagatatattgtcaatttttatttacctatggtaaaagagctaaacattttgcttaaggcgttggagagatcttggtaagttttgtagagtttcaagtcaattttccgtaggtacggtgcaccgtccatgctaaccttcacataagccacggtggcacatgcggaggcggatgaggtggctccactgctgccagaagtcttatcgtttccttcggtggcatctccggtggtcggtttttggccggacatgacgttcttgcggaaagatcgtaccggtggccatcccacaacttgtgccctgaaatttcgtaatgattttttttttttaatttcaataatactcattacttcttttttttgtaaaatgtttgtaaatgatctagttgttctacacgtgtcggatgttaggtggttgtagttgtccaaaagtttatttaatctttaatctttttggtagataaagaaagattccttatgttttgtatttttctagttcttcccgacaaaaaaataatcaaacagactctcaacctaactacaattgaaacatggagcaaaaccaaataaaaaacaaagatcttaggagaagtatcagcataattattccgttcgagttccctaacctagctagaaatcatgttaaagcgtatacatctctacataatgaccgcctagtataacctaattttaccgaacctagaagacaatattattagttgaaatagagattgaaattcagtttcttacttggctggtggttttacgaccttctccttcatattctctaaatcgactttggaaactgaatccatagccgtcgatgaaagattcagtttgagatcaacagtctcagaaaatcctcttttaccattattttttccagccatttctcctccgtgattcccacccggtagccctaatctcagctccgtggcctcaaaattaatcatatttctcgatataatgattatcaacgagtaattagttaggtgatccgatcgacaacgagtaggagattcttcggcttctagggtttttcttttagttcttttgatatttttttggggaactaaaacgtttgaagagagagagagatagggggatgtgagatgtgtgtagagaaacaaagggctaaatattggatcgtgtgtggtataaaattatatatggaattgatcattgaggatgattatttgaacggaggtgatgttgccaggtggatgctgggattggttggaccgtaaggagtgttgtcgggagagaatgatgtcacgaatggcgtcattttcctgagaataattgcggccaagccagtgggcaaaggccaacttggcacagtctctccttttctgtgtcgaatttatccacccaaaataaattctaatcaaacttgaaatatgaatcatttttaccactcgcataaaaaggtatacctcttctttttagtactttaatcagtttttacggcaaaagatattcgagtcttttgaaaaaatatcaaaaacagaaatatcaatttgatgaaaaataatagcaaagaaaaaaaagaagaaaaagactaaatatataaataaagagtgttttgtcggagattatttttatttaattggtgatggtttatatgaaaatggaattaaaaaatgacagctaagacataatggagcccacagatgggaaagaaatcgaaagtggtcagcttcaaacatgtgttttgattcccgtggattcgattcgttcgttgtccttcttatggggtccgccattcacaaggcctattggcctatgcttgcctttttttaagactattttcaatttcttatattataaaatgccgacaaatactaattgaattcaaataaattttaaagtttaaacgaactaaaagtcctggtctgccatagcattttcgtactatacttcccatgtgcccctgtggccttgtcttggctctaaattcatggattattgtgaagtcaatagataattagggattcatgttaattcaagtaattgtgcgttaaacatgattaccaattatgtaattaggaaacattccttccgatcaatgattataatatagtataatgctgggaataatttaatctagtgctaatttttttctatgcaggtgcaaatgctaactaattcttatgtgtattgggttatataatcttcggtggggagggccaaacacgactaactcaacagtaaatggtcaaccatatgtggtatgggcggcggtacatgtcatgcccatttcgtcgaccctaaaatatggtaatgtagtattttttcacaaaggagcataataataatagcgttgataaataaatggctccatgcaaattatatataataaaattataacagcataatgatcatcaacatcatttattgctaaacatcatcatgttcatgcccccatgcatgattacgatggaagaatctgacataaaaaattgaaggtccaaattgacaacgacttcatcttaatcttataatctacatgtcaagaattttatataaataaaattgattaaatttatataggtgaaaaatttcatataaacgtgaggaggaggaggagaatgagataaaagggtccacctgggcccaaaaacaccaaccctgttgagagatgttaggaccctcgtgtgggctgggcccagtcaaaaatcattgtcttgttgtgtataacaaacattacaggttcacacgtgtgacacactaggtccttaaatgctatgaatatatgtgatctgatttgttttattttaccattaataagaaggagcttaaatcgaacaaaactgaatgataaaacaagatttcaccactgtatatatcgtaatacaataatacatgctgaaaaatattaaggtaaatgtgtagatgtagagaacaacatggcttaaacacaaccaaacccataaatttattattcatggatattggatatatgcattatatgcattattataaattaattgacctcgtattaacatttttctagaaattggtgcagggggtgaatcgcgtctacatctatgtattttactacatccccgtctgtaaggattcactggttgttcggagggtgcacatgcagaaggataccgatgatgatcacaaggaagatcaggcttcaaccctggatacccaattacttttccaaccgtcatgttcatgctgcttatgaacacacatgctatgaatgttgccactagcataaacctatttgttattttcatattgctcatgatttgtgtttatttatgtgtgtgggagaaatatatatttgttggtaagaatggtacagttcgtggtatttatagtgaataaataattgtgaaagagtcttatacaacttttacttaaaaggaaattacaataggatgttgaattgaccggtagaaaatgtacctacagaattctttagtaatacatgtattatagatatagtccttttttagccaaagtagtcaaactagcttttagatatgcatgttgtggtcatagtaatactaatacaaaacagttttatagccaaagtagtcaacaatatttgagttctatgtactcttttttttttggtcaaagagttctatgtactctaatatagtatatcaatatattaggtttcatgttcttccagtacatggaggtgaaaacaaagcacttttttcttacagaaatttttttacatcaataatatgcaaatatcataaactaataataattataaatacaccaaaatagtgtgtcaaaattggttgtagacaactattagaatgaacacatcgctgggctttttggtattgggttcaaagtatatataaaaattcatgctggttctttatttgccgcccaacataaattagttggacaagtgagaaggccttgctactcctacatgcgttacactattacagtattactattgcttcatagaaaaataaacctcgtaccaaaatctcaaataagtgtttcttgtggttccttatgaaaaattgttatacactattacagtattactattcaccgtttattgtcggaactcggaacaacgttttcaccgtccaattgttatacacactattcaccatatatacattaatacatcacacatcttctacttaagagtgtagtgtacattaatgataattttgtaattaacctttttaatgatggttaaaatgtctaattaataatttaatagtgacttacttgcttacgtggataaaagagagaccccacacaaaaattagattttgccgtctgttaaaaaaaaaggcttcttcagccgatttctccaaaaatcgtttttttttttttttttttcatcttccgttcaacgttttgcgttcgactcttccctgacccctttcaattttaaaccctttttctctgtctctcttgtccgaatcaaatccggttgctggaaaagggaagctttgtgcttttgtcgtcgtggtgggggaagcggaggataagaaccctaattttttacgaatcgtgagatctcctaagtttctgaatcgggtggtggcgattttgtttctttctccgcgatggcggaattagggcaacagacggtggatttctctgctcttgttggtcgagccgcagaggaatcgttcctttcttttaaggaacttgtggataagtctaagtcgacggagctttctgatactgagaagaaggttagcctccttaagtatgtcgctaagactcagcaacggatgctccgcctcaatgccctcgccaagtggtgtaaacaggtttgtctttctctgtttctcgctaagtattaacgttttgggtctgtgggtcgaagtgaaagtttgaagctttcttggactggaattggatatgttgcaagattagggtttggttttgttgattgcatgatctattagttttaaacacatttcccgtggatatagttttgatgtttgtaggatgatttacagactttgaatggaattggaagatccttttgtgtgatcttgtccttgatgggtttttgttgtttggattacgttgcttgtctactaaagtttagatttgtctcttaaattccatggaacttcacattccaagtaggcttatcaatgttatcatgtacttctgttatttctgcatattttaagaaatttatgactgtagtgtctctgtaaaaattcaaggtagtttacttcagatcaacgttccattttaaaaaattatgatttcatagattgttgatgcttgcttgtgttcactttctttacagagtaagtattcgaaaatttattgagctatttattcatttttggctaaacctcctgggctgcaggttcctcttataaactactttcaagaccttgggagtacattatcagctcatgacatatgcttcacacaagctgcggattcgctgttttttatgcatgaaggtctacagcaagctcgcgctcctgtctatgacgttccctctgctgttgagattttgctgacaggttcttatcagcgcctgccaaagtgtctagatgatgtgggcatgcagagctctttggatgagcatcaacagaaaccagctctaagaaagctggaggtacttgtacgttccaaactgcttgaaatcacacttccaaaagaaataacagaggtgaaaatttctaaaggtacagttaccttatctgtcgatggggaatttaaagttcttgttactcttggttaccgagggcacctatccatgtggcggatattgcatttggatctacttgttggtgaaagaagtggccccattaaacttgaagtgacaagacggcatatccttggagatgatttagagcgtcgaatgtccgtggcagaaaatccattcacaattttatatgcggtgctccatgagctgtgcgttgccattgtcatggacacagtcataagacaggtccgagctcttctgcaggggagatggaaagatgcaattcgcttcgacttaatttcagatactggtaccacaccagcgaaccaagaaggagaggcagattctgttagtcttcgaacgccaggaatgaaacttttttactggtcagattctgataaaaattctggcccatttattaaaattgaaccagggtcagatctccagattaaatgttctcacagcacatttgtaattgacccacttactggcaaggaagctgagttttctctcgaccagagctgcattgacgtggagaagcttctgcttaaagctatatgctgtaatagatatacccgtcttcttgaaattcagaaagagcttttgaggaatactcgtatttgtcgaactccaagtgatgtgatccttcaagccctcctggatgagcctggtattgaggtaaagaaagagttgttttcggcttaatgttgaatattttgttccttgaaagttgtaggactttttcccaggtcagagctacttacactagttggacatttagtatgtcacttgcatgtcaatagatagatttctgtttatgacacatagcccttgctaaataatgcatagctttcatgctatagaccatgagattaagcattaataatcgcaaatttaaatttcagagatggccgaacctaggtttcgataatttatattttttcgaaaaagtagtttaatttttgcagttcacatggcctattgcctagcttcttttggctggggagctagtatagttaggccatatttctcttgctgtctcaacaactaattgaatttaattggatcattttctctttcgccattcttttagggagataacatggtagactctaaagagcgagtagagccagaggtcttacgagtgcgagcctatggatcttcatttttcacactggggataaatataaggtatgatatcttcatctatgtattgggagagatcttattttagctgactattctcactatatgttattgattgcaggactggtcggtttcttctacagtcatccaagagtatcttgacctcctccatcttggaggaatttgaagatgcgttaaaccaaggaagtatatctgcagttgatgcctttatcaacttgagaagcaaaagtattttgcatttttttgctgctattggcaaatttttgggtcttgaggtagtaattgtttgcctcagcttgttgttcaaattcactctctggagttgggagtgttgacgtttgcgtttaatgcaggtctatgaacatggttttggtataaacaaagttcctaaaagcctcttggatgggtcaagcattctgactttgggattccctgactgtgaaagctctcaccttttgctaatggagctcgaaaaggacttcacaccattgtttaaattactggaaactcagatggatggttcgggaaaacctcagtctttcaatgatccaagcaatattttgcgagctaagaaaattgatatagggcagatacggattctcgaagatgatcttaacttgattacatccgatgtggttaaatttgtatcttcattctcggatgctgagggcataaatcaagcatctggacaccgtcagcctggattggttgacgaggctttgacagaaatgagtggaagccagttgagtttctctagtgtcgtagatggagtgtttggacttcagaaagtgacatctgctcttatgtcaattgatggacatggtttagttcccaaaaatctctctgctgttaccggccatggaaaagctccaatgttgactagctatcattcagattccttgtataatcgacagggtcccttacaatctagctcttataatatgttatcatctccccctgggaagggttcagctatgaagaagatagccatctctaactctgaccaggagttatccctgatactgtctccatccctctctactgggaatggagtctctgagtcaggctctagactggtcactgaatcctcattgtcacctcttcccctatgtaagaacatttttccatagcctttttttttaccttcatagaactttctcaatattagaattcaaaaatttccgttatttgcagctcaaacagctgatcttgcaacatcatctgctggtcctttgttaaggaaagatcagaagccccggaaacgttcagcttcagatttgctaagattgatcccatccctccaggtagtggaaggtgttgctagtcccaataagagaagaaaaacctctgaactggtacagagtgaattagtgaagagttggagccctgcatcacagaccttatccactgccgtgtcaacatcaacaaaaactataggatgcagctatgggaatctcatagctgaagcaaacaaggggaatgcaccttcaagcgtttttgtttatgctcttctccatgtggtcaggcattcttcgttgtccataaagcatgccaaactaactagtcagatggaggcattggatattcaatatgttgaggaaatgggactaagagatgcattttcagatatatggttcaggcttccatttgctcaaaatgattcctggcaacatatatgcttgcagcttggtagacctggaagcatgtgttgggatgtgaaaataaatgaccaacactttagggatctctgggaacttcaaaagggaagtaaaaccacaccatggggttctggagttcacattgcgaattcatctgatgttgattctcatatccgttatgaccctgaaggtgttgttctgagctatcagtctgtggaagccgatagtataaagaagcttgtggccgacatacaaaggctttcaaatgctagaatgttctcccttggtatgcggaaactacttggcataaagccagatgaaaaaacagaagagtgcagtgctaattccactatgaaaggatctactggaggaaaaggcagtggtgagccagtagataggtggagagctttcaagattgaggctgtgggattaacaagcctgtggtttagctttggttcaggcgttttggcgcgttttgttgtcgagtgggaatcaggtaaagatggatgcaccatgcatgtctctcctgaccaactatggccacatacaaaggtgagtagttcgcaggacttaacatttgctctcttcatgggaaatatttttattataagagttccaaatatatgctttttctcatcgtgagttactcttgtacagttcttggaggatttcataaacggagcagaggtagaatcccttttggattgcattcgccttactgctgggcctttgcatgcattagctgccgctactcgccctgcccgagctagtactgccactggcatgcctgttgtacctgctacagcgtcttcaagacaatcaaatcagatacaacaaactcaaggaatcattgccccttcaactttagcagctcctaatgctactggccagtctgcctcagcaacttcaggaaatactgttgcttcttctgctccaagcccacttggtggaggtttccatggagttgcaatgctagcagctgcagggagaagcggacctggcatcgttccaagctctctcttgcccatcgatgtctctgtagtactccgtggaccctattggataaggatcatataccgtaaacgttttgcagtagacatgagatgttttgctggagatcaagtctggttgcagccagcaactccacccaagggtggtgcttctattggaggctccttgccatgtccccaattcagacctttcatcatggagcatgttgctcaagaattgaacggtttagaaccaaatttgacaggtagccaaggagcaacaaatcccaacagtggaaacccaactgttaacggtgtgaacagagttaacttttccccttctagtgcaagagctgcaatgaatcgagtagccagtgttgcttcaggatctttagtggttagctcaggattgcctgtgcgtagaacaccaggcactgctgtaccagcgcatgtaagaggtgaattaaacacagcgataatcggtttaggtgatgacggtggctatggcggaggatgggttcctcttgtggctcttaaaaaggttttgcgtggtatccttaaatatcttggagtactgtggctatttgctcagttaccagatctcttaagagagatcttgggttccatcttgaaggataacgaaggcgctctcttgaatttagaccaagaacaaccagccttacgcttctttgtcgggtaagccaaaccaagaaacttatgctcaatcttgaaggattatgcttaagcttatctattgttttgtttttttgttgtttttgtttttgcagtggctatgtgtttgcggtgagtgtccatagagttcagctccttcttcaagtccttagcgtaaggcgattccatcaccaagcacaacaaaatggttcttctgctgcggctcaagaggagttaacccaatccgagattggagaaatctgcgattatttcagccgccgtgtcgcatcagaaccgtatgatgcctcaagagttgcctctttcataacactcctcacgttacccatatcggtcttgagagagtttctgaaactgatagcttggaaaaaaggattatcccaatcacaacaagctggagagattgctcctgcacagagacctcgaatcgagctatgtctagagaaccattctggtacagatttagacaacaattgtgcagctaaaagcaatatccattacgaccggccgcacaacacggttgactttgcgctaaccgttgttcttgatcctgtgcacataccccatataaacgcggctggaggagcagcatggttgccttactgtgtatcagttaggttaagatacacatttggcgaaaatcctagcgtgacgtttcttggaatggaaggaagtcatggaggtcgagcttgttggcagcgagtggacgattgggagaaatgtaaacagagagtgagccgtacagtggaagtcaacggttctgctgcaggagatttgactcagggaaaactcaagttggttgcagatagtgtccagagaacattgcatctatgtcttcaaggtctgagagaaggtggtaataataataacaacactcatcaaaaggaatttaccatatagagagaggtcaaactcttgtcagttttgggaatcgtaatgtgtacatacgtattctgctgttttttttttctttttcttttactattgggacttggaagaaacatgttgtgtagcctttgaattttccagtgcaaagaggttttgcctcaattaccaaccaatgacaaaagagagtcaagaaaaagacctaagcactgcttaagttcagaaataattacgatcctaataacttcagcaagaaacaacgtcgacatttgtttctgtttttatcaattccttatcatataaaattaaagaaccgcgaacaggatgagagataaaaggagctggcgaagcagcaaacagagacaatagactatctgataaaatactatggatacagggaaagttcatactatgtgtcttttcttaaacgaaattcttctatatatatatttggacatagatataattaaatacaacagtttgcattttctcaatacaacagtttgactttgtgatctctaaagtacgtgaacaagggtgggctattgcaacaaacacgctacgtgagaaggtaccaatactcttgactttaccacttttcctttgctagcttcatcttcaaatacagaggatattgctggcggcactgtctctgaattgattgatgataaggttgatccaaatgaggtgatatctctttcaaggaggaggattgttttatcaacacaccgtaagccaaccagcaccggcatttgttctctcgggagttttcaactttgaaatcatgctttaattactttgtgtcgagaaatctcctccctgatgcatgctctctcaaatgcttagattgctatttgatctctatttctaacaagtccaaacaatccaattttggcttcatttcattatacagatgctgcaatattctttttatctccgtccatcttggatggttttgcttctctgcagccacaaacctatgaagtccctctactccaactacactactatatcctgcagtcttctttactccgcgattctccattgcttctctcgtcttgtctgaatatccccatcttccaacggttgcatatatattagacaacaaaacgtatccgccttctttttcaggttccaacttaagcaattcagttaaagccaactctgcggtttcaatgtcttcacctccccgacaagcacttaagattgatccccacattgactgacttggtctcattggcatcttcttttgcactatgtctttcgcttcctctactctccctgccctacacaacagatccacaaggcttccgtaatgctcagtttcagggtcaaagccgaatttatccttcatgtggttgaaaacgtgtagcccttcctccacgagtccgctatgactgcaagctgtcaggacagcgagcagagtgacattgtttggcgtcacaccttcttcttgcattcttccgaatagctgcagagcttgctggccatttccgtggaaggccaacccagttatcattgatgtccatagcgcgacatctttctcggtagctgtcttgaaaaccataaaagcccgctcaatgataccacatttgcagtacatatctatcagagccgaactcagaaaggcatcacctttcagttgcagacggatcactaatccgtgcacccatcttccatggctcagttctccgttgtttgctgcaccacttatcaaactaaccatagtgacgcggtctggcttgaccttctccacgatcgtcatttcatagaacaattctctgacggttctttggtcacatcccttcttcgaataaccaaaaagaagagagttccaagaaacaagatcccttttgggcatctgatcaaaaacagcctgagcagcttccatgtccccaagcctaacaaacccaacaaccatggtgttccaagagcgcatgtctttcttcttcatcgcatcaaaagctcttttagcaagaccagattctttgcatttgaaatacatgtccaaaagagcattgctcagaatcaaattagatgaataaacaggtcctctcctctcaatccaaccatgaactcccttcccaagtctaatatctgataaatgaccacaacaaacaagaagactcagcacagtgtactcatcaggttcaataccatcactaaccatcttaaaatacagtttaagtgcctctaaactaaaaccctgcttagcataaccaacaatcataacgttaaaagagctgacatctggatgaggcattctagcaaacaccttctctgcaacaccaaaatttcccaactccatgtaaaacttaaccagagaattccacaggtaattcccaagagacaaacacccagaaacaatgatatggcaatggatctgcttcacttccgacagaaaactcgaagctttcatgagatagagaaacgtttgcctgtcaggagagacacggtgcctaatcatagaactatacagaccaaagcattcatttttcgagctcgaaacagcagatatcattgtgttgtaaacaaaaacattcgggttgggagtgaaattaagaaatagaagcttcgccaagtcgagattctctgggtatgtgatcgccgagaagaagataagacggctcatgggaaacgtatcgcagatgagattgaaacgcatgatctgtgccaaaacctgcttgaattgattcctggaattgcaattctcgagcaagacaagagattgatgattcagctgaagtgattgaacaggatcccatttggttgtcttgctcccacattctgtgccaaataatcgaaatcctcgccgcaacaacaacacaaagcacatacttctatttttgataacacaaagcacatcaagttatgtaattatgttcttaatttaaaattaatttaggccgcatcgatatatcatctggcccattaaaagcccgattaatatggactattctctgtacttgaagatattgtttttagtataagaagaacccttttctatggattttgtatgtacatctaatacatctgccaatttggttcgatttgttctaattatcttagataataggtgtttaactttacacgaatcgtagaaacacaatgaaagagctgcttgcacattatgtttggtatataaaactagagggcaaaacgtcttccgggaccaagtatgagcagcaggtagcagttgcagctatggactgtcaatatcttggtgttgcacaggtgaggtttccttacactttccattggtaccttgagaactacgtgatcgtattttaagaacaccctttcttgaaaacctggatcagttatctaggttctcgactttcacttaataaccaaatgtctgagaagatctctgtaaaacattaagtaaagggaaagtcctatgcaacctcttgaacgagtactccgaaatggcatcgatgcgaaccaaatcatttgctaactccattgcttctgctctatatccagcaaacccaatcccttcaatgagcacagtataagtagtttcattaggcctacatccatttcccaccattgattccaaaacattgatcgcgtcctcgatcctatgagctttgcagaatcccaaaagaacaatgttgtatgtaacaaccgatggatgaaactcacagctcctcatatcaaccaataactcaaaagcttcatctaccattccttctctgcacagacacgatatcatcgagttatatgtgatctcatcaggatctatcccgttactcatcatctctaatatcatatgtaacgctctgattttatctccactgctccataacgcgctaaacatcgtgttgtaagaactagagttcggtgagcagccaacttctcctagtttcccaaaaatctccaacgcttggtctgctttcccgttcttacacaacgtagctaaaaccgtgttgtagttaactatgtccggtaaacatccgtcagagatcatagtttccaagaactcaatagcaacatctaacctaccttctctacaaaacgcagctatcaaaggatcatagctataagcatcaggagttaaccctttttccttcataagcttaagaagattcatcgcttcttcgatctttccatcgcgacatagagtagtaatcaaaatgctataagtcacaacattaggatcacacttctctgaaaacatcttagtcattagcttctcaccttcttcccatttcccttgattcaaaagagcacgaagcaagatgttataagagatcacatcaggctcacaacctttcaattccaaattccgaaccatctcaaacgcgcggtccaccatcccttctttacacattcctctaatgattgtgttataagtaaacatatcaggttttaaccctctagacaacatctcatccataagcttcaacgcttcatcaactccgccttcgagcatcgtagcttcgatcaaaatcgtgtaagtaatgacagtaggttggcaattatcacttaacaactgatttaaaaccttcaaagcaagatcaagtttacctctactacacaaactaccaatcattatgttgtaagtcacggtatctggtgaaaaatctttacttctcatcctatcaagaactctcgtagcatcatcgattcgattcatcttacaaaacccattaatcagagcgttgtaagcaaacacatcaggctgtccgaatttctcgagaatctccataaccctaacagctttagggatgtttcttagagtgaagaaccctttaatgagcttagtgcagagtatcacatcaggattgtaacctttgcgtaccatggtctcgagtaagtgtagagattcgatgtaattccctgaacggcatgatcgatggaagattttgagcatctgtgtatctctaaatccgagagattgtgaatgttgttgtcttcgttctgtggggagtgttgcgtctgttgtggtagtggtttgaaggtttcttgctcctgaagatgaaaaggatctaccattgtcgttgttagggttagagtttgagaaggttaagagggagcttcgattgtgagatagtaggagtccgtgagaagaatttgaatagggtttctgagttttggagtagaaagggatagtgaaaccaacgagttcagaggataacggagtcattatttgtagacaaagtttcgatttttcatggaagatagttttgtgggcagaaacagagtgtcgaattgggattttcagacaaaaaatcgaaacgcaaaaccgaagataatgcgaaaagttaggattttttggagtagaagtgggaagaacagaacagagcaacaccactcgttttattgtaatctcaatgcaaatttgtgaggataggatagagtccaattttgtactttcgtacttccgtgacttttgtcttccaacgtcaaaaaggtcaaaacattacgttgagataaacggcgacgtttctagtctcaaaatttagattttgggctttagatactctcttgaagtttggcccacaaaaaaagaagaagaatactctcttgaatcaaaaaaagaaaagaaagaaaaagaatctacattttctaattaatgtcttttaaaacatgtaagattaaaaacgtctttggtaatagaatattcctttataacctataattcaagccctctctgtccagttgtaagttgtaaccaagtagtatgatttttaatataattttgtttttgaaacttattgattggatcatcacactgacaaatcttatcacattcttaagtttcttaattatatattctcctcaatcttaaccgaataacttgatgatcctagcttaaatttctaatttgaattcatgattgtcacactagcacaagttatacatcagttaatgaaaagaatttaatgttcaaaaacaaagtgatatgaaagaaacaaatttaaaagaccaataagaaatctcggagcgatcacatacctgcttaatataattaatctctgctgttttcatgagatcctctttctgaatgtaaaggattataggagtatttactgtatgtcttcttcttcttcttcttctccttcatgctacaatcattagcaggtgaaactaccagcatgacctagtctctctctctctctaagctatgatcatataatcttgtaagaacaagaaatatataaaatatttattaactatatatgaaacctaagagaggaagacaagatcatgctggcagcttaactgctactggtacatggtatacatacagacatgaagacgactatatatctttacttgcatatacacatggatttgtgtatatatatgtgtgctttgtgttagcttcttgtttatcgtgtgagtagtgggagggagagagaagaatgatatatatatggtatgaagaagcctagctaagagagtgatttgtgactgatcaaatcattatttgaaaattattataatacatagtagtacttttctttaaactgtagttgtgtttactagtcagtcttatgtgaattttaagctctttaattaacactttctgtgtttggatcctcagaaaattaaggcacaattattaagatacacgtgtctataatcttggttttcatctagaataaaattatgaattaaggaaaaagagaagcttaataggtcatgattctacatttacatatgttaggttgttaaccaatacaaatcaatttcattctactttttgtattagatgtttttccatttcattatggatatcttttcactttctcacccatggtaaaaaaagtaagtagaagtacttaacacagaccgttaaatgtagaatttctaactttctttatgatctatgaatatagaacttcagtttgaattttgaattgtaaacatcaaaagagtatttacattttgaaaaataattagtataaaccgtaggtatttagtatgttaaacaaagaaagcattttgggagttgaaaaagtgagaacatgaacttgtggtcccgtgttattaattacagataaaaagaaggatacaaattgaatattgccacgcctaaagacaacgcatgctgacacatacaacaccattctctagtatatacgattagaaggtgaaaattagacacagaaacatttattaattatcatctaaggttatattcatgcaccatgttgacacggatatcttaagttacaagtcacatgcaaacattatcgaaaaccaaacactgttatttaaatagcttcaagtcacatgtaacaagaggatcgtcatcgttttgcatggcttattctgtaatattttgctaatagctttcttttttataaagaatcttatgataatagttacgtcactaaaattgcgatttttttaataccaaaccggcacaattttactataagtctataacataacgaaacataacataattcaattccaaacgaaatatgtcttcaaatgccatacagaaaaaacaaaattaatcgaagtttcatcaatgcctaacatagctcgaattgtcaaccttcttgaagttctactaaagagagagagaaaaagaaggtgttgctctagggtttcttcgtagcgaaagttttatatctcacactccaaaagaaaattattaactttttttttaatagaaaatcattaatctttaaggaaggtgttagcatgtgaaccatgaactgtaagactgcaaaagtgtgatgatgcgaaggatattttattcaaattattttggttaacacagttaaattatttaatggtgagtgagtccataacacgcatacttagataccgtttcactttcggctaacataattaaaaatttaattatattccactttttggttattatataatgttgtcgtttgcttagccaaccaatcctcgattacccaatcacacatgtagatccaaagtattttttttttttttttttatctccaaaacatcatactttattaaactcgttcgaaaatgttggcttcatgagccaaccattccggaactaagtggcttacataggaaatgaaatgattaagtatgttaagtaatttgatttcttcgaaaaaaatgaaaatgattaactatcttattctcactagttttaagatcatggggttaaatcgaaacttttaattgcctcattatttttgctactaaaagccgattacaccttgatgttacgtaatcatattaacaaatactagatgaaagtcatttgcttttttcatgagaagataactggtaatttaatacgaatttagacggaaattatatttgtaaattatcataacgttaattcttaaaacatagtaaaaggcaaaaacatattaaaattaggatgagatcagatcttaaggcttagggactcactactcagtgtgtcacgaaccttcttggcctccttccatcctttgactttgtcaacatcttagtttttttgcgaaggaattgattccggtttaagctttgaccgataaagtaaaatgtcgtgttcagctgtaattaacggccgaccattggcaacagtatgacaaagaaaagaagactgttggaaacaccacacaacggcatcgaatgtgggggctactttcaagctcaattttataggtataaatgtataatattggatactgcgacattaaacactttacatgtcgattcaatgttgttctcttgagagctttcgtgagagatttcatgttggagattctattatgcataatattcataacattcagattttttttgcaatatcaatgaataatatgacttaaatagaagaccaatgttcaattcaatgaaagaatcaacgataaaataccgttatatggttgaaacttggaaataccggcaaaaatgcacctaatctcatggtcgcaattctcaagagacaagaagtaaagcaagctaatatggtcctaatcctctccaaatctcgaaaacaaaaaaatcaggtctacatctaaccgagttcgagctaaactaataagagagcttttactcccaaccagcagctggaacagaagcagcctcccatccagcagcaacggtaactgcaaaaaggaaacagcaaaaacattagaacatttggtgtttagattccgagagactatgatgaagaagaaactaaccgccaactgcaggtgcagcagaaattggctgttcgacttcaccagaccatgcagcatcagatatttgagcagtggtccactggtcaccaccaaccattccataatcggcctgtacttcagcttcttcatcaccctcttgctttgcttcttcgggctccctgtagaaaaacagatccacctacacaacagaaacaagtcaagatctttgtctggtgttggagaaacacaagtcctgatagtatttctagagtttaccatgacatcccatttctgagctgcgagaatggttccacgcatttggagaaccatacgagccaaaagccagaacaagcaaccaatgctgtgttttcccttgttgttagcaggaataccaatgtcgacaaatcccattggagaatccgtgtcacagaaggcaatagttggaatgtttcccaaagcaccttccttgattggctggcaaacacaaaccaaaaccgcattagcaaaaccaaaaacctacacagttaaatcacaactgatgaggtaaaacacattcaatatacctgatggtcggttcttgggtcggtgagaatcaacaacctaggctcactgaaagaagtctgcatttggttagtgaaagtaccaggagtgtgtcttccagcaatcgcattaacaccagtgtactgagcaaacttcaagacagctctttgtccataaggcctggctgattgaacaattatgtcttttgggttttcgattgctacaataaccctagcagccatctgaagcttgtcccatgtctttccaagattgattatgtaaatacctgaccaaataaaaaaaaatccaaacttcataaacaaaaaaaagatccaaaaacatcacaaaactctatgaaaccgagaattacagatgaatacccaacactatggaaactggagaaactatcaattcgtaagctacgtgtagatgaatgtggaaacgttgcttctatatagaattacatgtacaatgaaatttggatgaagatgagatagtttaccgtcgtcgcgtcttttgaagacataacgctccatctgatagttgcagtttttggtaccaaggtgaacatcggctgataacatcatctggatatcagcttctttctctgatacctgacgtcccgccgtcgctactccgttcgccgccattttcgttttttcgctctgtttctttctcttctttcgaaacccctaaagagtgtttcgcttaagaattaagatactccggaaaaccctaaatgggctttcaagcccaaaaccaaaaaatgatatagcccaaaaccaaaaattaattaattgttttcagacaaagaaagaaaataatcccaataaaaatgctcagtaagatttttaatcctaattccaaatttctaatagttattataaatcaagatttcatattggatctatgtttaattaagagtttaagactaataactatttgatgcctagttctatcattattcatattttacttgtgtaataactgcctcataaataaacgcccttttccccctcaagaatatgaacacacaaagataaaagttgagtcctgcccaaactgttaagaattgcaagatgattttcaaattgacttatccttcgtttcgaattcctgcgaataggcaatcacaagttctggtctattttaattcaaaaaaaagtaagtaaaaaacaaacgatgaaacgcaatagaacactagaaatcaaactgatatacgatcatatgattaaaacacttttgtatgctcagtgatcttcaatctttttcaatcccttcatatcagtcgtctccaccctgttatttgcacagaatggtgtaaagatcaataaatttgcaagttaaagatttcagaaatatgaaaagctaagaacaaaattctctttaggcagagtatctttgtaacagacttgtacagaaagatttcagagacttacgttgagccatagagagcaatcttctgaaccttggtgacctcagaacctgattggttggcttcgatgaagatcgtcaagcttgaattaaatagatatcgttagaacgagctgtgattgcgcttaatattataatatatatatacaaagacacagaacatggtaaatccttacctacgaacattctgaaactttacgtactttaggaccaccggttttccctgtaaatggatttgaacagaggtctcaatacagatagatagatcaccagaatatgtcacaaaatgaataaagtcagatttcagaaagatcataccttaaggttttcttcagttagttcagcggtgtcgcttggaggaaaatcattgacattgctgttttattcattagacacgatgtgagtcggcgcttttatcgagataaatcatattgttaggtagaaattagaaacgattcacattacctgaagcacatgtgctctttgtttgagaaaaactttacagttttaggacctgaagaaaagttagaatcaaacaaagttaaaatctcactggctaacaagtaacagcccccacatatcaaaatcccatctccagttcagtaaaaagaagtaattcttgtaggcaagactaaaataacaaacaactatatgcttatctttcaatatagaacatcaatttaccttcctcttcagggcctttgatagcaaaggaatgtagtttgataacttggttaaaaggaatatagatgagaagttgttcatcagcatcactctctaagtttaaaccttcatcttctctatatccctacacgaacaagtaaatccttctcaggtcataaaacaccaatagaaacaggtaatcataaattcaaaagcaggctggcacgcaatatcactccacgaaaacctaagtttgtactcaattatctatatcaaatctcataaactcacacataagttttttacagatagacaatcatagcaaacacaaacagtttcaagaactcaccaataacaaaaacttgtatacagacatacaactacataaagatatggaacataagagaataacaaacctgcttgagagcattgggcaaagagtgacttgagctttggttaagacattcaacaccagaccagtcaataaaatctagtagatcaacctgataatcaaacacaacaaccaaaacttagatagaatcgattaactatatagacacatcagaaaacttcaaatcaagattcgaacaacagataagaaccctagataatcttcccacccaagaattgaattcctcattgaagaaaaccatcgaaaccaacaaagtttcgttaactaacctgtcccttaggaatttggctagctgattcggcggacatcgcgagtttttttttttttcttcctttgaaagaaatctcaaagatcgagaaagtggaagaaaataattagactctccacgaaaccaaaccaaaaaaggtttttatataactctgttctcaaagaaacaaaaacgacatcgtatatttaacactctgattggtttagcaggttattatcttcaccaacccaaatacaacaaccttaaaactagtattccaatactaccctcaaaccaactacaaaactctataacttgccactaaaccttcctcttccactcaaaagtcaaaaaccaaacctttcgatttcattttatttcttctccaaccattctcaatcctctctctccaatggcttccttatccttcgtttcctcttctcaccttacgctacgcactccttctattgccctacgcagcactggctcttctcctcgaacctccgtttcattctccgtcaaggctcaatccgtcgcgctttcacaggacgatttgaagaagctcgcggcggagaaagctgtggaggcaattaaacctgggatggttctagggctcggaaccggatccaccgcagctttcgctgttgatcagatcgggaaactactctcttccggtgaactctacgatattgtcggtatcccaacgtcgaaacgaacggaggaacaagcacggtcgttagggattcctcttgttgggttagatacacatccgagaatcgatctcgctattgacggagcagacgaggtagatccgaatcttgatttagtcaaaggtcgtggaggtgctcttctccgtgagaaaatggtggaagctgtggctgacaagtttattgttgtggctgatgataccaaactcgttacaggactcggtggaagtggattagctatgccggtggaagttgttcaattctgctggaactttaatttgattagattgcaagacctcttcaaggaatttggatgtgaatcaaagcttagagttgatggtgatggcaagccttatgtgactgataacagtaattacattattgatttgtattttaagactcctttgaaggatggattcgctgcggctaaagagattgggaagtttcaaggagtggtggagcatggtctgtttctcggaatggctacttctgtcattatcgctggaaagaatggcgttgaagttatgaccaagtgaggttaaaagttcaatctttctcttcttctttgattgacaaatttttctcctttgtaaaattatcaattgagtttttatgtgagatcatttcaatttcgtgaattcgacaaaatcagcaaaaagttgagtcggattgagcaattagatcaataaaaatgtcaacttttatacagtggaaattgaattcataagccctaaatccagtaccaatgattcactatctaaaagcccctcctttaaactagttcttaaaccctaaccttgagagattgagaaactttcattagattggaacgaatcgcttgacgatgcgtcttccagcaactgcagccaaagccgcaactcctccgacagctccggcaaccacagcggatctaggtccagaagcagctctgtaaagcacaccagtggctaaaccagcgatcacagttgtcaacgaaccgtcgtctccgtctctcatatacgtaacaccgctctccatagcagcaaacatcaaccctacggatcctaagcaattcccgccgcgtcttgcaacgagtccaccggagttcaaaatccgattagttcggatctttagggattcgcctcgttcggcggctcgcatccccgcaattgtacccttgaaggctccgagaacagatccagtgcaataaccccaaccggtgaagaaggtgaggttctctccccatgttaagcgttttttcgtagcttcttcttcgaagagaaactcaggagaagttgggagttcgtagagcttacggtacggaagattgacttgttggtaaggattgtactgacggtacttctgctgttgttgatgcccggtgctatggttcatcggatccgccattatcagggcttctgcgtttctgctttaggcttagggtttaaggatgaatcgtgagggtttataactttcaagtcaagagcagcaaaaggaataacttcggggacaatccgaaattttttatcttttatttttaaaactgttgggctttaaattctaatcttgggctttttgggccctcttgttgtactagaacttttgttccgatcttttaatgaatcactgatcactccattaacaacaacacaatggaattttgttttgctaaaggttaaaagaattttttgtttctaaaacaaaaactatgtaggtcaattaattttcttttagcaaccggtagaactaaagaggtcaaagtcagaattttctcagataaagacctaacatgttagttacaaatagtctcattcctattgttggtaatgtaaacaagttatctttctttagttatagtacattttgggaaaatgaaagattaatcgatataaaaaacaaacaatgactacataagaaaaggagtgctattctatctatatctttagtttcaaaattctataatacgaccacggtgaaaagacaagacgaggatatagccacaagttgatgggattgaacaatgaacatccctgcaatatgattgcacatttctaaggtacaaagtagtggatttgaacatctctctataatttggtgaccttttataaaaagaaaaatagatttcacgttgacatggttactataatttaatatgctcacgcggtttgcctttgccctaaactactaaaggtctcataaattgtttcatggacaaggcgatggtataagtgggtgtgaagtaagacgaaaaaacttaacaaaacctataacgaaaataataaagatgaataaattataaataattaattagaaatattcgtctgtaacgattttatattggtcaatggtaatgaataatgtacataaacatgtattagtctattacatttgtaattaaacattattctcggccaatgagcttgagagacaaaatctttcgaaatgttgttgggtggccactatgttatatgttaatgtatcgagtatcgacaccagtaaagtttatatttttgtgcataaagttaatgataggtatgtctatttcagagtcatttagctgaactaaactgaattattaatagagaacgatctaaaaagagtagaaaactgagtttcgttggaattaaaatatttcgttttttttggatataaataataattcggttttcattttcaaaaaaatcgaataaaactgtaattgaaccaaatgtatactagtacaatttaaaaatctcggacaacgctatacacataactacatgcctgtaatactaatacatacctactaatctcaaagaaatgacacaacacatgagtggattagatggataagtattattctttcccataattatttaaatcgataagactttaaaccgtgagattgacactgccgaagaattatttgtccatgagaatgacagtttagaaaattcataacgatccataacaataaatatattaatcacaatgcttacctatgtttaatgtaaatgagtggatctaagcatcaaactattattccaaattttgttttcgcctatacaataatcaataatcattcaaaacgttgttcatagaagcaaccatttcttcctaaagcaagcaaacgttgttcatacaaattgcattattagtttaaagaagactttaggtcgtaattcataaacaaagatgctcgacgatgatgatggtactcttgcttctggacatcgtatttagtgagattgctagacaacatatatttcaagacaaacaaaacaatccaacgtattgtgatactcaaaagctaaaattagtctatatagcaaaagaattc

SEQ ID NO: 399 - DNA, 93234 bp, Arabidopsis thaliana
aagcttactgcttctcacaagcctctcatctccagtaccaaaatatctgaaagggtgattacactcattaagcacctattggcttctccagctcctcttcaggttttgtctcgagcacttgttttcctctgttgacttcctttgacaaacatgcactcttagatttctgctatatggaggcctctttgatgatccagttcttatttaaactcatggtaaaaacattctcagcatgtagcagtgatggacagccagcaattagcacttgactgtattgtggcaacgctttttgatggatcaaatgagtttgctggtggaagttctgaagttcattatgcattacgtggaatatttgagggtatattgcagcatttattcacattctcaagttttgtttactatgtctgggcttgtacaatactaatactcggtattgtgctgttgatggcccaggattgcttcagcagcttctctctttgaaatggaatgaaccagaacttatgaaagtgcatgtccactatctggatgcaatgggtccctttctcaagtattttccagatgcagttggaagtctcatcaataaattatttgagcttctcacctctcttccacacgttgtgaaggtttatttttattatttttgtatttattttacatacatgcgctcgtatatacaaataagacgttttcaactttttgacattgcacatgtcaaggtgtggatgagttatctaatagcttgtttctttggcaggatccagctactagtacatctagagctgcaagattgcagatttgcacatctttcataagaatagccaaagctgcagaaaaaagtgttctgcctcacatgaaggtagctttgatctctcacaaactacatttaggaactcatatcagtaaacgttggagaattgtttgaagaatttatgtttagttaagcttgtgcggtgtgatatatggatataccaccactcaattttatggctaccttctctctggaagatacctttatcatactctcgagtatcatgatttatgacattatatggctactttctctctggggaagatacctttatcattttggtggcagaattcttatttttcattttcttagtggcctctctggataatctatagcacaaaaaagtcatgtcaactgtcatactgtcataattttgtgcagggtattgctgatacaatggggtacttggcaaaagaaggaactttactccgtggggagcataacattctgggtgaagcatttcttgttatggcttcctcagcagggtaatgtttgattcaaaaatgaagtttactatattgcatatctcctgcttcagatttgtcatgttcttagatataatctaatcttggcgcagagctcaacagcagcaagaagttctggcttggttattggaaccattgagtcaacagtggatccaaccagagtggcagaacaattatctatcagacccgatgggtcttgttcgtttatgctccaacacatccttcatgtggtccatataccacactgttacattctttgagaaagcactcaagcgaagtggatacagaaaaagcaatttgaacacgacctctgcgacaactccagcttcacatcctatggctcatcatctttcttggatgttgccacccctcttaaaagtatggcctggaaatgtggacatgcttagtataattcataattaagttccttagtgccatattgggatgattttttcgttttcgtttttgcaagaataacatgacaacattcatttttttacatctacagctactccgtgttcttcattccctttggtctccctctgtatttcaaacattacccccagaaatgagggcggcaatgacaatgactgatgctgagcgatacagtctccttggtgaagcaaatcctaaattgtcaaaaggcgtatcggtttatgctgatgggtcattcgaaggaactaaggaaggacaagccgaggcaagtgaatctgatatacgaaattggttgaaaggtatccgagattgtgggtaagtttgttgtatcctcctttgagcaagccttgcattgatcatttgatttttctctcatttatctaaactcataagtgtttgtttacatgtttagatacaacgtgttgggcctatcaacaaccatcggagagacattctttaaatgcttagatgctaactatgttgcaatggcactcatggaaaatttgcagtcgatggaattcaggcacattcggctgtttattcatacctttataacttatatagtcaaatcttgtccggcggatatgtgggagtcatggctgggagtgcttctgcacccattgtttatacactgtcagcaagctctcagctccgcctggccaggtcttctacaagagggcagagcaaaggttccggacttgtttggcatacaaagtggatcagacatgaaacttgaagtgatggaggaaaaactgttaagagatctaactcgggagattgcgactctcttttcaacaatggcttctcctggactaaacacaggagttccagttttggaacattcaggacatgttggtcgtgtggacatgtccactctcacggatttgcatgcgttcagatccaactctatggtggggtaagtatactacatctatatttcagattaaaagttgtttggataaaatagataataatgggaaaaaacaaattggattgcagtttcctcttgaatcacaaaagcgtagctctaccagcactgcagatctgtttagaaacttttacctggacagatggagaagcgaccaccaaagtctgttacttttgtggtgttgttgttcttctagctaaactaacaaataacgtggagctccgagaatttgtttcaaaagatatgttctcggcagtcattcgtggcttgggcatggagtccaatgccattaacagccctgatttagttaatatatgccgtgaaatatttatctatctctctgacagagacccagctcctcgccaggtgagtttcaatcagaagcattcatggttgagtccttttacctgttgtaaatgaattttgccttggtttttttgatcttgttgatttgatgctagcaggttttgctttcgctcccgtgtctcactcccaacgacttgcatgcttttgaagaagctacagccaaaactagcagccccaaagaacaaaagcagcttatgaggagcttgttgttgctaggtactgggaacaacttaaaagcacttgctgctcaaaaaagtcagaatgttatcaccaatgtcacaggtaacaaagtttcacttcacgctcacgatatctctgtttttttttaacagaatctaaaacttggctactttttttttgcctccagcaagaacgcggctacccgcaagcgctccagaaacaattggagcgggtgttttgtgggatgaagagttcgtacaatgattaaagaatcgtacatagtataaacagaatttatttgagatgccatgtaatagtagagaagcagatttctgtttatgtccttacctttacttgttaaattcataggtagaaagaaagaacctctaaccaaagcttccatgtcataagcaaagtttttgtgattttcgattttgttctttatcagtatttaaacaatcggtcaattggtgatttcacaacaacaaaagtaggattgtattgccaaatattgactacttttgtctgctttctactgtaagtaaaaatgaaatgactgtttatcataaaaaagagattagtttctaaaatcagagaatctcatgggttactagtgccggcaatttacaagtgctaaagaacttttatatgaccgctctaattttgtaggcagcaattatgcattgcgaaagaaaatcagatatttcgagtctaccatagcatttttcttgtcactctattttaaaaattataagtgcacagcaaaataaaacgagaacatcttctttccagcatgattgcaagctttccaaaagactaacgctctgtctgagatgattggtaggatttgagacctttagctctatagtagagaagcaaagctcgctgctttagatgtatgtgttgaactttgttcacggtgacagatggagaaactgtaagtgtgctgcttcattcaatttccaaaactttgaacctttttttcttagtttctcgagtttgtattcttcagtttagcttctgttacttgcttatctcttaatcggctctgtttcattttctaatctgtctacttgtcattgtagattgtctacacatccgtctttgtctagctgatgttccaagttagccatcagattttcttcccctttaagcagcgattctcagctgtaagtcgaacaaggcaagtgtttttcaatcctttgctattttggagtctcttgatgtaagaagaccatatcattgcctaaatgatgatctgaattctgaatggaccttcttatggtacagtggtggatttttaagcgacaagggagaaccaaagatcacgaggaggtatgtactaatgatggttttggtttctacaatgaaactcagattttgtcctgggtatgcttcttctccgtggatatctttatgttcctagaggcccttttttttgtctgttttgcctctctttgttgctctttcttttgaataggtttacatcggttttgaaattgaaattgatttcggtttggtttactttggttttgaaattaaaattgaatttggttcggttaacaattggttttgagaaacaaaaaaacaaaaaagtcacgcgatggagaatttggatagaaatccgtcgatagaaaaaggcttgaattggaaaggggttttacccacagaattgctctcactcgcgcaacgcgctctttatgcgagtgggtacgaaatagagccttctgattggcttagaaactctaaaaaaagggaaatagtatacatgttgctagcttattatttagtttttcgtttcttctatcaatctgatcaaagttcagtttttttttaacatacaattgattctgataaaggttttgggttatttttgaatcatttgtatgtcaaaacacacaaaattttgtgaatttgtatgctggcaatgtttcatcattataaacgattgtgttttcatagcggtaaaaacagaggatcaaaaaacaattttttggaatcagcaccacagaggataaacgattctgttttcatagcatgtcagattctatacttgtttaccgttaaaacactttcatgagctcttcataaatctcaccttcagtggtgctgattgcagcctgcagctttaagtaatatggtgaaatctttctgcagcttctggccttctgctttggctatgtcatgcagcatgctagttcatccgaggaatatgtgctttcaaaagtatcttctgtggctgcacagctgatgaaaagaggctggtaagctgcggtgggcttcttctgcttctggtatctaaatttttaacacatgcacattagatgttggacgttagctttcacttctgatgctatgcatatgagaggattcatgaaaaggatgttgtcgttcacagacaattatgatcggtagcttctggaaaaatagacaaaattagttagctacttctgttttcttgcttgctttgttcctctaatggaacctctaatctgaacaaattactcttacaggcttgagtttactccagcccagaaggaagtcttttttttatcaggtatctacattgtttgtaatttttcggactttcatttttagtttctgtatcctatagtttgactagcattaggtgcatatatgtttctctctgatactggccatatgttctaagaaatttacctggtacttcaaaatctttttaactgtaccttaatatatggagaagaaaggatttagacgctaacctatatccttcatgtggtccagtccatataacacactgtttcattctttgacaaagcactcaagagaagtggctacagaaaaagcaatttcctctgtgaaaactccagcttcacatgctatggctcatcatctttacatacttatagccattacacaatccacatacggacgaggaatctctccccgcaaagctttcatgtcataggcagaagtttttgtgctatgtatgtcagtctttgaacaatcggtgaatccgtgattttacaacggaaaggttggagtctttattgtcaaataacgtactagaaagaaactcataaatatgtatgtagtaccttctactagtagtatgtaagtaatatctttctctttaacttcttcaacgtggatttttatatgatgattatatttaactaagaagaacgttgtacttgtatattattatactcaattagtcacgtagatcgaatcatcgtttcattttgaaaatgaaataagtactgtatattatattcacgtagctcgaatcatgagttcattttgaaataattgtttaccatgcataaaaaaggcaattggaatcccgtgggtaagtgacgacaataattttgacaaaataaataaacaagtgacgacaatatacatgtgcagtgtaaaagttttggtaaaaaagaaagttgtttctaattcactaatatagtagcacatagtatgaaacctgccaacaatacatgtttcatagaaattttgaggagtctcacatattcttttactcgtggaccgatattgaaaatcatcgaactcaaaagatcacacactagctatgttgtccaaaatgaaggaaacaaaaaaatcgagaaaaacaatgaaaccgccaagtacaaaaagaaaaagaaatcaagagaaatggtgacaacgcattgatattattaaagtaaagctgtaagtaaattcatgagatctccgttgaacacaagacccatgaacttttgtcaccttcttggcttcttctaggtgcatgtccccaaatcaaaaatcaattattattatttataacgattttttcttcttcttgttatttaattattatgattacttatgaatctgacgaaaaaataaagattgcttataaatcatatagtatatttttctttgataacacaaaatacatatatttgttcaaaatattagcatctagtcttaaaatagaaaagaaacaacacgatttatttactgtttttcaaataatgattttcgtaatattttttcatcaaataattaaaaaaattcttgttttgtcccaactgatagtcgttgatacttatcaactgctctggctatgtgctctggagatcatacaaaataaataagaaaaattgttagaaaaaaagaaaatctattgtccttgttattcaggagaatacttgtctacgacgaggtccacagtaactccgaagacatctagagtctagagtgatctagtgaatctataaagccgccaaatcgttaaatctttccttttaaacatttttgatttcttttacgtttgcgttacgaatcatcttctgcctctctctcaacgcaactcaatccaccctacacgtgttcctctcttttcccgtctaaatttctcagtctcgccgtgaattttgttcttctcttgttttccgggcgaatcaaaatccgtctcatttccaatcgcgtctccgttggtattttacatgaacgtttagcggaatctcgggtttagcttcggagctttgcatttgatcttcgtcgtctgtgttgtcctctctcggattttgttttttcgccgctgcaaatcagagaaatctattcctggaagtgataagatcgcttggaagcgtttcaggtttggaaatcggattcactgttttgtgtaatttttggttaaggacttaaggtggtgtttgattgttcggaaacacaattagtgacgattaagttcgacctaattttgtttagcatgctctgataagttaagaaaattggataaatttgccattctagattccgatttggttacaatgttagatgcttacgtggtttatagggaatcttttgctgattgtaacacagggagttgttggaatggagggtccggaaagatgagagattttgaatacgcagttattctttgatttcttaatagattttacacgtcattggtgaagaaaaagggaaaaagaaagatgacaatgttcgcctctttaacctctaaaatgctatcggtgtcaacttctgatcacgcatctgtcgtttcacttaatctctttgttgcccttctatgtgcttgtatcgtcattggccatcttttggaggagaatcgatggatgaacgaatccatcactgctttattgattgtaagtttccattattttgcgttgaatggtagctaaagaggagacggataagttttacatttttggatattatcatatcaatgtttcactttcatttttctttactgactttttaagcaattgggttgcaggggcttggcactggtgtcgtcatattgttgattagtagagggaaaaactcacatctcttggtctttagtgaagatctcttctttatatatcttttgccacccataatattcaatgcagggtaagtttctacatccggactgatcatttgatgatagatagttgcatatttttggtctttctctatttgatacatcttgtgttctagtaatatgtttggttgggttgtgtactacagaggggaaaaatcagtttattatcagagatcttactgggaaaatgttatactacattagtttttataacatatatgcattattgctgattctatgaatatgctttcaaatatcagcttggaagtacttgtgattgtgactgcagaataggacgtgggtataatgtgtatggtcaattttagtttgatttatctaaagtggtccttctatgtctttgtcgtaaatgcagacatggcccagctttctttgtttcacactatgttttctcagatctttctctgaaccataattattttgtttgtcgttgtatttaggtttcaagtaaaaaagaagcagtttttccgaaattttgtaactattatggcttttggcgccattgggaccgtagtttcttgcaccataatatctctaggtatcttactcccctctccctgtaattgattctgttgaaagcttactcctgattagtaattgtggatcattaatattcttgtgatgtttgaaacaggtgcaattcagttctttaagaaattagacattgggacctttgacttgggcgattttcttggtaatgtgttaaggagtttcttttatcgattttttgttctagaagacttgattttttttttgcttacttaatcagcaatcggcgccatatttgctgcaaccgactctgtatgcacactacaggtaatgtgattcgccaattagcagaagtacatacaggcccagaatcaaagtgtaattaacaaaaactcttgttcctttggtgatacaggttctcaatcaagatgagacacctttgctttacagtcttgtatttggagagggcgttgtgaatgatgccacatctgttgtgctcttcaatgctattcagagttttgacctcacccaccttaaccatgaagcagcttttcaatttcttgggaactttttttatctgtttctcttgagcaccggacttggtgtcgcagtaagtccattttcttctctctactgctctttcgtctggctactacttgcacgttcctctgttaactacaatttttttgttattcatcttgcagactggtctgataagtgcttatgtcatcaagaaactgtattttggaaggtagataattggctttagctcatatgtgactttatctctattagtcttctgttatgtagtctaattgggtatctttcttaggcactcgactgatcgagaagttgccctcatgatgcttatggcttatctttcatatatgcttgctgaggttagttttgtgaaattttataccactgtcataatttaggcatggagacaatcagttgtatcttaagaatcctttattgataatatattgtttgggttgcagctattcgccttgagtggtatcctaactgtatttttctgtgggattgtgatgtcccattacacttggcacaatgtcaccgagagctcaagaattactaccaagtaatatgacctccattttctcttgaaaacaaattcaaatgttttccatcttcaatacttacttactttctatgcatttacgatgagacaggcatgcctttgctactttgtcgtttctcgctgagacttttattttcctctacgttggaatggatgcattggacatagagaaatggagattcgtgagtgacaggtatggtcactcagtagaaacataaactctctttttgttcattggctatatacataatcttcttatgtttccattgtttggttttggacagcccggggacatcagttgcagtgagctcaattctaatgggtctagtcatgcttggaagagcagcttttgtctttcctctttccttcttatcaaacttagccaagaagcatcagagcgagaaaatcagcatcaagcagcaagtacgaacaatctactttgtctattgaattcaaatttgctgaggattgttgatacttactaatcttctctcactttgtctgtaggttgtgatctggtgggctggtctaatgagaggtgctgtatctatggctcttgcctacaataaggtaaattgaaagtttaatggatagtaaacagcgacatggtgattagtaaaaatctagcagataatttaacttctttatttctctgtgctctctaatgcagtttacaagatcagggcacacagaattgcgcgggaatgcaatcatgattaccagtacaataaccgtctgtctttttagcaccatggtaagatatctccctctcaggtttggactactaaatgtattttctctacagagatgttgtcaatgaggataaaccaatgctgagccgtgagacggatttgcattttctatatccggaaaactgttccctcctatttgatttgttattccaatgttttctggatcgctaacactgaaccctgataccggacatttaacatatgtttttttttttccacggctttcaggtgtttggtatgctaaccaaaccactgattagatacctaatgccacaccaaaaagcgaccaccagtaccacgagtatgttatcggacgatagcactccgaaatcaatccacattccgctcctcgatggtgaacagctagattcatttgagttacctgggagccaccaggacgtgccacgaccaaacagccttcgaggtttcctcatgcgccccacacggactgtccactattactggagacagtttgatgatgccttcatgcgtcctgtgtttggtggtcgcggattcgttccctttgtccctggttctccgactgagagaagcagccatgatcttagtaaaccttgaggagaaagatatatagaaacttaaccaaaaaacttcttcttgctcttccctcttatggtgactagtattggtgatgtaaatgtatttttcgttcttcaaatttacatattcttctgtaaatttgttattattcgatgatgaagaagcttcttacgtttttgagagacgtgtgggggttcatgtgtgttactattagtctttgttttgtttaacaaaaaaactaccaagtttttgactatgcatcatggggtttgttgttgttggtcagaacttagaacttgactaactctgcttcggttaggatctgattggtacggtttggttcgattttcgtcaatagaataaaaaactgtatgaatagaataatccggttaaattggcacgtgaaatgcgaaatgggctgagtcattcattatggaaagcccatgtgattggtagggaacgacgtcgggtgaagggaggggaagagcttataaatgaaagcagcaagcagagcagttcacgctctttgtacactccgccctctctccccatctctttcgacagatctcttctctctctcgtgtttcacgaaacaatggcgactcaattcagcgcttctgtctcattgcaaacttcttgtctggtaatcaaatcttcttctttcattttaacaattgccttagagatcgctttgatcttacgattcatgatcatttcccgttgtttccatgcctgctcttgttatcgtatataaactcctgacgcatgtttattatgtgtaacatagaagatcttcgctttagtaatgatcagttttatgtttttgttccaatgattttatttctagtttcaaattctgtgatcggcaacacatggaattaaaatccgtggttttgtgttctggttgtaatctagatctacagtcaattgaatttatgattgtggaagtgaatgcttacttttggctgtgaataattgtgcatggacattcattggctaagaatttggcttgagttatgaaaattcagaacaaagttcttatgaatgcaatgctttttttttttgtgtgtgtttgatgaaacaaataggcaacaacaaggattagtttccaaaagccagctttgatttccaaccatggaaagactaatctatccttcaacctccgccgttcaatcccatctcgccgcctctctgtttcttgcgcggtatgagcattttttttcaagtttgttaatctatatatatagggctcaaagttttaaaagacattatatttggtttataggcaaaacaagagacgatagagaaagtgtctgctatagttaagaagcaactatcacttacaccggataaaaaagtcgttgcagaaaccaaatttgctgaccttggagcagattctctcgacacggtatccattcactcaagtggcaattaacacaaattcttaattttcttgatactgatcaactgagtgtttttcttcaggttgagatagtaatgggtttagaggaagagtttaacatccaaatggccgaagagaaagcacagaagattgccacagttgagcaagctgctgaactcattgaagagctcatcaacgagaagaagtaattttagttttcttttataaaatgcccttaaataaactaaaaaagaaaacgacaaaaaaaaacagggcgttgagtttgttttcattatgtttgatttctctgtcattttctttaatgtgtctagcgagtctgcctttgtcccaatggtttagtatctgcatgtatccacggatctctatttgtcgacgaatgttatttacaataagtgtttcttattttctttccaagatcgaaatgccaaatgtatacgagagacacaagtatgttacatcataatatacaaggtgtctccatagttttggtattagcacacaagtcaagagtatgccctacaaggaaaagattttttagatatcctattcaccttgtatctacagactgacaagacactaggactcctgttattcccaatcagcgtcgaagaatccagcatctttcatttctgaatagtagacattctccaaattcagatcttcctcctgaagcaaacacaagtgaattttagcaccaaatcatgtggtgatgaagatggtactatggtaatggtgatggtactatggtaatagtgatggcgatggtgatggtactatagttataaagaaggtgatggtgatgctgctatagtgatgaaggtggtgatttattgcatgtttgtgggtacatagatattatgtatagagactagagagagagagagagggagagacaaatgttaatttgagggatttacctggaaaaagtctgcaagaaaagtaacatacaaaagaggaagatagaaggcgtggtaacaaacacttgtgatcccatacaacctgcaagaattttcaatttgtatttcctaatgttagaagcaagaatctgacttagacgatgttactcttttgattgtaaggcttttatctaaagggcttaccataatccaaaatgagcaccgtttgccgtaagagcacatgcaaatagggagagcccatttaaggcgagcatgacagttatatacttgtagaatgcaggtcttgctgtcaaaccggaaaataaaaacatatgggatgagtaatagaagccagtgaacagctattggcttatgcaaccataaggaggatatgagtggtcgatgtattcacctggtaatctctctctccatttggagttgtacatgaagaatatcatcccataaatgccagctagtaagagcttgtggatgacccataagccccatttgaacttatgtatatgttcattgttgtcgataaacaatggtactccaaagccaaacagataaattgcctgaaaggaagaatgaaaaccgtgaagaaattaaactgactgtagttgagtaaccagacaatacaagtttgcatatatcaactgtagtggacacatgatctaatgcagaactaagatcatgtcaatatacctcaaggaagtatatctatctatatatcagaaagtgtatctaacagttatgaacacaaatctaccttgagaagcaaatcgagaccaatgacaagccccgagatgaggaaagttcgtgttaatgcttcagcaccgcttgcatagtttccttggaagagaaaggctaccaagcttacttccagaaacaacattccagatgttgtgaacaaagttaacaaattccaaataacttctttccccggagtgcattcccatgcctaaactcatgaaaagtaaattcaaaacgaaatctggagtaagactaaatcaggtaaaacatttcctgttaagcagcatctaaccaagaaatcaacactaatagcttacacaaaatacaaaagctttctaatcaccagtgtagaataaaaacaatgttgataagatcgcaaagtttctacatttacagagcctaaaacactctaaaaagcattcttcttcaatctaagttctgatctctttacacgcaacataggtatgagttacttgtgaaatgaatcgaagtaaagaagagaactttaacaaacctgaaggcaacaccaagcaagattgagcaagctaacaagccaaagaaaaccataataggcaatcataatgtaagatctccgattagacaacttggacaagctcttcttcgcctcgtacgctaagtaagcgacgaatagaatagatgctaaaaccaaaaccgtgttatgaagaaacccatgacacttcccgacccatccgccgataaaccctccggtggccgtcgaatcagggcttagccgagaaatcacgaacggtgactccgcaatctcgctgagcactcgcatttcatcaaattgtacgaatcagaaaccaagtagacttagcgcaaggagcggaaagcaatccctagttccagaaaaggagctcaatttcgagatttgatgtttttgcgatacagaattcgtatgaatcgtatatttcttcttctctctggcgaccaaatccatacacttgacgcaaacatgagtaattacacaaaagttaaagggtattataggtaattatcatcgcttctcccacttccactctaaaacaaaaaaaaaaaactatcatttttctcatcctttttatttttaactgattttacatgtgatgtttaaagagttaattattggacatgtgatgtttaaagaatttaaatattattcttttcaattctgtatcttaaatttgaaagacttattacaagctgatctaatttcaaaatcaatcttatgaaatgtaaatttttgaagtgctatttaataatcaataatgtgttattctttttaattaaattagaaaacgtgggagacaattgtctctcttttgcccaccaaaaagatattaaaaaagtcctattcaataatcatgatttatttatttatatttatatctcatattatacaagtaaaattgatttttaaccataaatgatcagcattcagcacaccaaaagtaatttccattcacttgaaataattgtataaatcgggtatttgaaggaaaattgaaccaagacgatccggtttaaatgtcagagattaaggttatcatgactctttaaaaaatgaagtcacagatcagaaataatagaaaactattaaggacttaaatgtaaatactctacaagttaatagatcggagcttcgttgcataagccccaaaccggtggagagaagacggaaagagtctgagagagagagaagaaatggggagagaagtggcggagagctgtgtagacactatgttaatggagatggtggcgatgtacagtggccgattctatgctaacaagccggaactcgccgctcggaggatcgaggccattggttatcaggtcggccaccagctctccgagaggtttgttttacacttgatcatcgtcttctttcgatctggttgatcattgtatctctaggttgctagtattagttgtagatctgaagatgatggcgaatgtatatcgttagcaatgattctctttgatattggatttatcgtttctcgtgtgtaattggctgagaatgtgatagatgggaagatatatggcgctgattcgagtttttttctcattgctctagtggctaatttttgtatttaatcgtgcaatgttttggttaggaaattttcttgttgtctcagaagaatgattctcttagtccctgattagttatagtgtgtgtgtacgaagaatgattttagtctgttgaggcatgttttgttgcttctgaaggtgtttgcctacataaaaactgttttacagtgttgtatgatggcagatatttagcattttacttgattgtgcataacttcagccttttttatgtcgttaggtacactatggaaagaccaaggttcagtgaccatctagaggcaatcaagtttatctgcaaagacttctggtctgaggtcttcaagaagcagattgataatttaaagacaaatcaccgggtaagataactgggattttacctgaacaaagaccaaaactcttcttgtgtgtgttattcacagatggaatgtttctcttcagggtacttttgtattacaagacaacaagttccggtggttgtctcgtgtctcaattgacccttcatctgagaatgaaacccaagatccttctactccaggggaaagcaaagctgcacaagcggtgagcatgtacctctatttcccgtgtggaatcattagaggtgtcctctccaacttggggataccttgtgctgtctctgcagatatatcaagccttcccacatgtgagttcacagcttgctttgcttgttttcgaaattcttatattctttcactttcttctatattctcaaaatcacacattggagggaagaaagatagaaaattatttcaaatattgcttattacctgtcattataagttgcttcagttcggtaactatccttgtcatgtcctcacaggctctttcgtgattcgggtcaaggcttgattctgcatttagctcgagtacttggctttatactttcaaggaagatagatccttcgggtctgatcaatctaaaacccattgcaggcttctgtttgctgttcttttgacacactttagccttgtggtgcttgttttaaacagtgagggcttggtttcatgtttgaaatgacttttatttttctgttgtaaatttttgttgatatcttatatacagtaattcctgatgcatctccatttcatatcatttttaaaaaaggcgtacatttgggaaaacttgaaaaactctttttgaaaaaatttatactacaaaaaaaaactaactcgatatccaaattccaaatcgtttggtttagtggagctttcttctcggccttggttagccaactttccaaactcagaagaagtcactgatttgggaattaggtctggaatccacactcttctaaggttctagaagacaacgattgttatgttttaatttgtctcctattcgttccatgtaatttttagttttttttttgttcttgtgaatctgactcctgtgtaaggtggtttgacttcttattctagggtttcaatttctcacatctttatgtcgattcttcatttgttggtagtgttccggcatctgtctttggagacgtggttcgtaatcatctgattgttttgtaaattatttttggttgagtgctcatagagtctagtttaaaaatctaatgttggtgttttgcttactcttgagtcttagtgtgacggtttagaactaggaacttctaggttaatcaatcacaattatgaaagtaagtagtctgacatgatccgaatcaaaacagagttggattactatgagcgacgctctgaacagatacggaagaaaatcaatgacgaactccttgcactcaacgaggcgaacaagtcgatcgtccatatttttacacaattctgattcctccaaggagatatatattatggtttttaaaatttagttattgtttcgtttttcctctctctctccctgctttacattgcgtgatttacaaacaaccatgtttagttttattttattttgaaaacaaaatagcttatgaccacagattcgttacacacatactcttcttagacagtaaccctagagatcaaaaagagcactacatgagttgtaagaaaacaaactgagatgaggccggccgatatgaagagactcacctaatactttggtatcattttttcaaatcttattctctacactctacaattatgcaaaattaaaatttcacttctcttgtccatcttgctgctttattttaacgtgattagattgttacttgttattctttagtgtttgggttagattcagaaattgattcaaccggattacaattacagtaaaatctctataaattaataatattaggaccaagaaaattgattaatttagagaggtattaatttatcgataaaataataaaattatacaaattttgttaattcttacaaaaaatctatataaaatgtagtttttctttataatcaatagtaattacaagtagaaagcaattattaagtttaaaaaaaaaaattgatgttgtaaaattctagaattgaagactacaaataattaataaaaattgaagaaaaaaattactacagtcatattttacatatgatatttataatatatattagtaaatttatacaattattaatttatactatagatgagaacatatatttataaaaaattgtcaaaaatattattattttattaatttatcgatttgtatcacttttcacattggtctcaatttgaaaccggaaaaattgattaatttataaagattattaatttatcgaatattaatttataaaagttttacggtataatagagatgcaatttatattatttatttactttttagaaatttgaataatcataacaagtgaggcccaacaaggcaacaaacagcccatctagccatgctccctactccctaatcgcaacggctacaagcctacaacttcagttaggaaaacaaacgtcagcttaatccaacggctgttatttcattcatctaacgatcattaaaattttgacaatacgttagaaaacgaaaacaaaaaacaacattaataatttgctttactctctgagtctccctccatttatcttttggcatcttcttcttcttcctcctccagcagaagaaaactcacactctgttagcacaaagagatctcctcttaggttttacactttatttctcttaaacacctacgcattctctcttcaaactctcattttctcaccgtttctctctacttttctttagaattttttgttgtcactttgattcaaaggccaaagttagggtttttattgttcttctgaggtgacttgcttttagttcttacttcagtttgaggttgttttttatgttatttataagcaaggattgtcgttgcttaggctagggtttttcacctttgccttgattttcctctgttcgtcctctcacaactaaaaaaagaaaagctttcattgttttcaatctgtgtggttgattttgtaacaatgtgctcatttatggtgactttttttttgcttagaactgagattttcgtttcctttatgatttgatttcatgggttttgtgttcctgctataaatctcaagtcttttgttgtttttgaatcaggtttgcagttttttaacagtaaaagttcagaaagtcttcatctttgagtggaggagagacagaatcaatggagaaactcaaagctgatgctgccgaaataatgatctgcgccggtcaactgaaaggtttactcaaccatttgcgcatgggtgaagccaacattgagaagagctctcgagagctagatttaaaggagaaggagctgcaaattttgagctcagaccttgagcaaaagagtcatgcttttgaagcagagaaatctgaagttggtgatttgaagaaattggtggaagagtgtactgaagaactgaggtcaaagaggaatctactgactgtgaagctggattcgttgataagggttcagagagagcttgagttaaaggataaccaattggtacaggttatggctgagcttaagaggcgttacagtgaggctcgtcatgttcaaaagcgtaagagagaaatggaagatgaaacagctacaaaaaagaaagagttgtctatgactgttgaccagattcaagaatctggcaaacagcttgagaagaagtctcgggaggtagagttgaaggataaagagattgaagagaaaggaaaagaacttgatttggttaagagtcaagtcaaagcatgggaaaggaaactcattcagctgagtaaattggttgatgatgattgtactacagaactaagtccgaggaaagatcaagtggattcatcgaacaacacttatgtgaaagagttgggatagacgaaaaccgtgcttgtgaaacatagtggtgtagaagaggagaatcatggcaagctctcttctcttttctcttcttcatcgtgataaaaaatttacatttaaatgtaatgcatattattggaggcaatgatattgataggtcctaactcctaatgttattattgtctttagggccaactagtagaagaaactaagttaatagagagtgtgtgtgtgactctttaggttgttttctctgccttgaacctttgattgattcaccatataaccactttgtttttggtaaacgtaaacctttatactacataatgaccacttttttatcacaaaaaaagagcttgcttctatgttatatagatcgggtaattcatgttggttattaaaagatattttaaatgtcgtggaaaacgcatataaagtattattgataaccgaccattactgataaatatgcatatatttgacaaaagtacacatcaagcttatgtggataaaaacaaatttatctcctaattaaattttcaaattacaatgtagaaactaagaaacataagatatacagtaattaatataaacggaaaaaagaagagaaatttaagatcattaagaagagaaattattcaccatttgaaactaatggcgttgagttttatataaaccatttataaaatcataaccacaaaatttattattttcaaagaatattttagatataagaaaatgtgatttagttaatcttatgcttaaaactggttaatggataattgaataattaacgatgtaaataaggaatgtttgtcgttttctaatagtcatttaggtaaaccttctcgttggtaaagcattacagttaccaaagcgtcacccagaaaataattaaaataaaaataaaaaagggtattttccctccttagtaatatttcacttccctctccgttttttctgattacagctctcagactccattttcaaaatttagggttcttaattttcttcttcgatccttcaagttcttcaactccgatttcgtttcgtctcttcctgcacttcgatattgacggattctgggattctctccgtcattctcaggtttagtttctccctcttcgcatcgttttttgttttcccgttgcttgcctcgttttgatcggaacttgtacatgcagtcacatttttaatctgtgattgcgaatttcgaaatatatatttagtatctccggtgatttagtgtctggatcgtaagagtttgatttcctccgtgactccattgaaattgtgtttcccggaagacgaatcgtccgtacaatttcgtttctcttagtgaattagttctaagctattctattaattgcattcccattatcgtctaaaaatgttaatcttaggtttgatttcgattattgtgctttcactaatgcttggtttatgaatcttattttatttgcagccttataaattgagcacgcctctcagtccagactctttaatcctattggatttatttatgtgatgaaggatgtgtgcattgctcacagatctcaccattcctgtctctgaactggtaagcactaactagagttttgcttacactgagttttagagtgacggattagtattaggaactgacaggtttataacaatttgtgtgactgctttttttgtgtattgcagggactatgagttattggttccctgactttgctgctgcttcatagacttagctgacttgggtggtttgatttgtgaggcttatcgttgcaatggaatgcaataaagaagatgctattagggcgagtaaaatagctgaggaaaagatggaggctggtgattttgttggagctcataaattcgttaccaaggcgcaaagactcttccccaatctcgaaaacatagtgcagatgatgaccatatgtgatgtgcattcttctgcaattaagaaaatcaaagggcttgacgattggtatggtgtccttcaggttcagccatatgctgatgctgacacaatcaagaagcaatacagaaagcttgcgctgcttctccatccagacaaaaacaagtttgctggagcagaggctgctttcaagttggttggggaagcaaacagattgctttctgatcagatcaaacgttctcagtatgataacagatacagatcccattcaatgtttgctaacaggcatgtgaatgtatactcgggtcgccactgtgcagctacaaacaatgctgcggagaatattgctggtgttttcacattctggacacgttgcaggcactgtggccagtgttataaatacttgagagaatatatgaacacttctatgcactgttccagttgccagaaatcttttgtcgcctgcaaaatgaggtgtgatggagtgccacctagtagttcaaccgctggtagaaaagaattccaagatcaagtgatgtctaatacatctcggcaaaatgcttctacagcagcagaatcaggcagctcagcagctgatatgggtaagaatgggaaagtcggagggaaagtcaacaagaagaatcaagaaaaacagaaaaatggtgctgttaacaggggaactaagaaagaagaaggttgtacagagaatgacgctgaaggaagaaaaccccagactagtgagacaggtacgaatatttctgctgaaatgcctaaagctgatgtattgaagccgcaacatcaagtaaaagaagaaccagatactagtgcagaaaagtcaatacctgatttatcagctccacagaagaatcgggcacccaaaaagaagaggaaagttgttgaagaatcctctaagagttttgaggttgatagctctgatactgctggggctaaaacagatacaaatgaacataataagaggaagtcatcaaggaaaaagccacaggtttcttacgcaaaggagggaagcgatggtgattttgtcagccctccaaataaaaagacaaaatcaggttttgaatttgagtctgagcctaataagaagcaaacggctgaggataataagtcacctaaactggctgtttctggtgtttcttctgcttcttcacattcttataaaggaaaggccaagaaaaatgcgcattctggaaatgaagacaacttgtcagccaaaaacaaagttagtgaaggctgtgatggtaatggagaagatgcagccttgttgagcaagattggtagagttgaaaaaggatacaaagctaatgaaaattctaatccgcttgatatacctgatttagagttcagtgtgtttaaagttgaacggaaaacagaagattttgctgtcaatcaagtgtggtctactacaactgattgtagagatggtatgcctaggaaatatgctcgggtaaagaaagtactgaatggcgagttcaagctgcggatcacctaccttgatcctgtactggataagactgatgaaagtattccagttgcttgtggaaagttcaaaaatgggaaaacaatggaagttaaagacagctcaatcttttcaggtcaaatgcatcacttgcgttgcaacaatattgtttccatctacccaaggaaaggggaaatatgggctatattcagagagtgggaggaggaatggaacactagtctaaaaaagcataaatttccatataagtatgactttgtggaaattgtcagtgattttcatgatcttaacggggttggagtggcctatctgggaaaacttaaagggtctgttcagctatttcactgggagccgcagcatggaatttgccagattcaatgtagtccgaaagatatgcttagattttctcacaaagtaccagcagtcaaaatgactggaaaagagaaagaatctgttccacctaactcatatgaattggatcctgctgccttaccaaaagatatatttcaggttgatgcggttgatatggagatggatagtgagatcctgaaaggtaaagctgacggcccttataaggttggagcgaaggccaaggcagttcaagagaccgcatcatctccaaggaaacgtcagaaatctgatgatgataatgatgatggtgtatgcagtaatcttggggaagtcataggcggaagcaacagaagtcatattttttcttcttgtgaagttgatgataagaacacatcaaccaaatccagaaaggatggtgagtccacagatgttttcagacttcgaaaatctcctcgtcttcaaacaattccaaaccaccaaggagatgagaagaaaagtgctaaacaaggcaacaagatgaataccccaaagaaaatggataagggtcttgtgacagattctttgggtgttgatgaaaagaaaacatcaaagtccagaaagaatggtgaggccacagatgtattcaaacttcgaaaatctcctcgtcttcaaacaattccaagccaacaaggagatgagatgaaaagtactaaacaaggcaataaaatgaataccccgaagaaaactgataaaggtcttgagacagattctttgggagtcagaaaatctcccaatggcattcaccaaccagcagagagtcaggaaggagagagctcaaagaaacaaggatgcaatggtgaaataccgtctctgtccaagcagaatgatttgccaactcagttgggtggttctacgtataagtcccctcgtacaactcatgtgtcaccacattgcaaaacacctcgaagaaatgcctttgacttccagaacctgagatctgaagacaaattcgaagttaatcagatatgggctatctatagcaatgacaatggaatgcccttagagtatgtgaagatcaagaaaattgaaaccaagcctaagtttgtgctacgtggaaccccgacagagctgtatccgccatctacagaacctgtgacccgcacagtgtcttgtggggaattcaagttgctcaaaggaagacccaaaatcattcctcatgcgagcttctcacatctggtcaaaccctttgacagtagtaagaggttcagattcaaagtatacccaaggaaaggtgagatatgggccctgtataagaactgtgatagcactgaagaacctgacattgtagaagtggtggaagataactgtgatggggagatcgtaaaggtggtggctttgactgctatgggctctagttttcagaggaaacaagggtcggatgtgggtttaattgacatttcaaaggcagaaatgagtagattttctcatcagattccggctatcagacacccaaagaagacaacaaggctagttaaaggaggatactactgggaacttgaccctatagcaattcctagtcgcactattgtcatagactaaacacagttccacgaactgactcgtaagtatgcatcagatttctttcttcagagatcatgtgtagtagatatgcataattagtagaatgtaatggtagcttaagttgtgagtgaagaaaacattattcgccgatgctgtttctgttctactagtattactcagcttttgaatttccagtattttccacaatcacaatagtcttttaccatataaatctcagatcatgtacagtataaggtgtcatgtaaaagtctaaattgcattgaggaccaaatcacaaaaaacagtcactaaagctaccaaaagctataaagtagtaaaagtacatataagaaaaagactaactattccgattttcgttttgatttgttggaagaagatggtcttgatgataaagggaaaacaatctcagaaacgttttgaaaacttcctctatcatacaaattccgtttcgctatagcgtcggctttgacttcttcttcacgggcagaggatcttccacaaagcccgaagcatttgctttcagctgatggcttctttagttcacatgacatcccggccttgagagcagcagcgctcgccttagcttcactgagcttcttatttaagcttatatactctctccacttaaacgtctatcagaaagtaaacaaacccaaaaaatcatctgttattaagatggagagacatagttaatttccagagacggaaaagttaaaacctcattagttgttgtgttggttaagcagagatttgcatggtaagcgaagaagccagcgaggaggagagaaacaatggcgagaaacaccattaggagaatttgggtgttgtatgtaccaactagccactgtttcaaagacattggaacactttgacatgttacaagatttacacacatgaggaaactgtgagatcgagaatttgttagttaggtttactcgcctgtataactcgaggagctaaacttcggaaagatttatctacaccgtaatagactgcagcaaagagaaagaaagaccagatcaggaatcaaaagggataacaacatcggaaccaatttagaaagatatgattgttaacacaacgaaggcaagtttgatgcgtaccagttaaaatatgtacaacacggagttcttttactcgcccagcaagaataaatccgatggcaactgttccgtacaagcaaagaaggaaatgcctacaaagcactaaagaaccatttaacataaaaccaaataaaatgatgaggacacaacacggtaatggaatcttccaagtaaatgccaagagttttaaaatgaaagcttaccacaagaggaaagccatgaaatatttggtgttcctttctcctatacagttattctgaaaccggtagagaaatattcacgtcaaacaatatgttgttatgaaatgttgagaagataagaaaaacgagacagagatcaggggcaaagtacataccatccacccacaatgatgatcaaaccgagccacacagcggttgcagatgctgcaatgcttggatctagcaggcctgaatgaggaagatacatgtatagttttaacataaagcacataggttcttaaaataagttcaccacaggattttcaatgcactcactttgggattttacacgtagaacattctttcttggagtaaatgatatcatcataggggtaagcagaaatgtaccgtgaaacattctcagcgttcacagtacctggatcagaaaagcatgttaataagaaaagtatgacaccaacaataacagctagaaagcttgtgtacctacaaaatcaaatacgatgttaaagtgggggactatatatataatttcaggagttgaaatttgaaacaggaaataaaagaagcaggccttacttgtgaacatcgccaagataatatccaggtatatagatgaaagaagattttgcagtcaaaaagtaggttgatcccataatggctatatatatgacctacataacccagtagataattgattttagaacaacttactcttcttgaccacaatgcctaaaaagaagattctagagcaatggattcttctgttccttaaatagatcaaacaaaacgaagatcgaactcacttgcagaatcggattaggacgatcgcagcagaaatactccacagaaagaatcacgtccgtacccttggaaccaaacacaaatccgacaaatctcctgcaacacacaccacagagaacgatcgatcagtggaactctaattcagctaagaacaaaggaagaatcaatcagatgagaagaagtagtacaggaagtaatcgtaggcgccgaaagtgaggaagtagtgaatccattgaaaaggtgtgcctttgaagattggccattgaccacagaggaaggagatgaccaccgtcaacgtcatcatcccgtgacacaccaaaagccactgtaccgccatttttcgtatctgaaaaatcttccgatcgtcgaaagttttctccttttctcaaaacccaattaatacaataggctttctctgcttcttgagaaaatcttttctcgcgtttacagtttcggaattagggggttgatttgcaaattgtggaaaatatttaaacaaaattgtaaatactaaaagtactctctgttgaggttttacaaatgcagttgcattcctttctctttttcacattcatatcatttgataatgtaactgcagtttagatcaagctacttcaaaatatgatattaccacaactaccatgatgaaatcgtaaacacagtcatgaattaaagaggatttctacctgataaagaaatttattaagagacacatgcaggttccaaggaatacagattcggttccatgcatcttctaaatacattttatagataaagaatagtgaacacatcagacttgcacttaactcaaaccaagactatgggctccatcttttcttctttgaccttagcatctttaagataaactcgaggaacagcagcagggtctagctcaaaagagccagctgggactccttctttctcatctccagtcattttgaaagatggaactctatgagaaaacctaagcatttcatcacatgatatcatgatttcgacaagaccattttgcgcagcacgttcatacactgatgtgaatccttccactctccctagataagccactccaatgcctcgatcactgtcaaattcagtcacgacttccacaaagtcgtaactgtaaggagtcttttgttgctcactgtgactcttccaagtcttggtccaatctccgaaaagtgcccacgtctcgccttttctcgggtttatagtgacatattggcctcgtatggtgtgatacatctcatgagaaaacatcaagtggctactggtctctgattttccatgttcgaatctcccacaagcaggaattggttcctctgtggtctgtaatgattcgagccatgtcacccgtaaactcagctgaggttgcaatactttcctgatctcagcatagtatctaggcatatcatctacaggatcatatagagcccatacttgacctacagcgaaagagctcattgtgttgttaaaatcgtgaaagtctggatcaggacagttgaatggctcatcttcatcaatgtagataatttcatgagcctctcttttctgcacttgcttttttccagggcgaatcagagtctcagcatatctacccttctctgccgacaatggagactcatattcaagcctagatctcttacgagtctctgctcttattgctggtttttctttttttctctgtttcaactccaaatgttgctccctttcttcaagtttcttttcctttaactcaagaaacttgttcttcacttcagtctctctggctgctgcttcatgtttcagttgaaagttgacttctttcttctccagctccatcgatttcccttggatggtctcattaagcaacctaagctcattctccctggcttcaagttgcttaagagatgtttccatcagctcagtctcttttctcattctctcagactctgttgtttgcttaagatcaaagtctttgactttcatgtctaaatcacaagtcttggcatcgatcgtcttagaaatcaaagcaacctcatttttccttgcttcaagctctgtcattagctcttcatgcttcttcatcatcgaatcatggagcgaaccaagaaagttctcttgggcgttgagctgagcaaccaccacttgttcaaactgcatttgaagaaccaatctcatcacattcgcttccattaacagtatcagatcagattcatttcctttctcctgcaatgtactgaaggatgcctcaatcttcctctctctttcttcaacaagcctcagtcgctcttccttcttctccagctccagaatctgattccggacagagacctccttctccatggctcgttgctttagaaaaccaaacctgtcgtcgatttcttcccacttaagtgagaactgaagaattaatgaagctttatcctgaatatcatcaaaaatgttacgcatctcttcctttctttgatctaatccctctaaatcactgtctactaccataaggtcataagcagaaaccctaagtcttcaaaaaacaaaaagaaatgaacaaatccgtcatgaaaagtacaaattaaatgatctatttgaagacaaataaacacccaacaagcaaacggaagcttccagagtaagaagaagaagagaaaaacataaaccttccttgagactgatcttcactctgcgccagcgcgggatcctgctccgacgtgtctcgtggcaatggtgaagaagttgcaggttccatggatctgaacttagttctctctgtactcagcatggtgaaagaggcacaaagaagagctagaagaagataaaggagagattttttagagaaagctttactttttatttttgtttctgtttttgtagaaagaaaagaagagagaaagagacaatttttaccagaaatgggagggagaaagaacctcactgagcattcttatttcgtgacgtatgacttcgatttttagccttagatcaattcaagagatctcaaccgttggatttgaatttagactgctctcaagtttgaccatcaactattcactattgtacgttctgttttgtagccgttggattgggtttctttcaacgaaatgatatacttagcaaacatgtgactttaacttaggttatgaactatttttcaaaaataaagtattcagatgaactgattatgggataaccttaaaaaaatacaaatactacaatcttaaatagtaaatgaagccaagaaaagagtcaaacaaaagaaagctcgtatctttagatgctttggatcaacttctgtgttcttcaatcctttccgcaacatcttcaaggaagaagagagtgcaaatatatcaacacaacgataaatggaaaagcaacaaaatgatgaatttacatagaagtgcaactttgattaacagtcttatgtatttgccgggaaaaaggaaagctcttcaaagtttttaccttttatatctctttttggaaccacagggacaaagtgcattgcggctgatctgcccacttttggctaagtttgatctcgccagatccattggtgttgaccccatcattttttgcagcttcaatagaccaatataacaatttagtgtcatcataactactagctaaatggatgcaggacaaagggaaacagtaaaccaacaagtaacaaactgcctaaatgtaaactaaaatcttaagaataccaacatagtgcaagatgactcctgtttctaaccaatgaacatcaaatctaaccaaaaacaccaagttacaaacgagctcttgttataagggaaccctgttcttgagccgggaattagttaggtgtagaaacttaaagtttttttagaggatgatcaaaacgaagaagagcgtgttattgcaaaatctcattagacactattctaagtctaagaaatgagaaacgtgaccacacagtcatacataggagcttatggagctaaaaaagcatatgagtatacaaagtgagaagaatacctctcccatattctttggtaacggtttgcctccttctttcaactctgtcatcttcttgtgagcttgcctggcccaagtaaatttggacagcgtattctccacatcagttatagtgcatttgcaatgtttagccgcatcttgcttttgactcgcttggagattctacacatcaagaaacctagtgccacagtcagacattgactaacgtaccaaaaaaaaattcttgttttcaaggattctgcaaattgttagcaagtcatgtgtgtgtgatagaaacgacagatacatagctggactctagtatgctaagaaagaaaccaacctctcctgtagcatcaagagctccaagatatctaataacagcttcttgtttctcaaatgcatcagcaaaagtggcctcgctgcttcgtcccacaatgtactgcttgaatttccctaaccgtctagcattcttcaattcatcagcaaatcctaaattcaattttcaatccaaagagaatagctttgatgagtatatcgatctatccaccattacagtcaatcacacgtatccatgtaagacttacggagaagagtgaaagcttcaacgggtagatttgattcttctaaaggagtatccttgttcccggtaaaaacacctttgatcgaatccatccatccattaagcggcgccgtggaggtaatcgatcgttgctgctgcgacggaattggagaacctccggtgatgcgagagagcgaatacgcagaagacgatgaggaagaaattggttcaggtcttagcctgaaaatatacttgagagttctcgaagaccacattttccgcccaaaattaactgctttggaaactaattactgaagaattagggtttcagggtttctcaggtgtagcagaggaagaagatagcaggaatggatcccattgttcttcaccgtgtcggaatccaaaaccctgaaccttaaacgcagcgtttcaaagatcggaaacaataatttatttttatttttaaaatggaataatgttctttttttttaccaaaaaatatttgaccaaaaaaaaatattaaaatcctgagaaacttgttggttgaaacttgaaagtaagaagtgagtaacaacagtacaaatagaaaatctaaatatcataaaaatgattagatttctttctataagagaaaatataaataccaaatagagaatctacttatcctactatattatttgggaaagtacattttaaatataaccttattttttgtaagtaattacatatgtatgtcattagaaataaaattttaaaaagtaaattaattcatttctttaaaaattaaaaagtcaaatattaatttaattaattaaatttaactcaaaaacaaaatacattattaatttccaaaaaagtaaccaattaaaatcaacaaattagatttgatatctaaattatcatattaatttttaaaatgtaaccttattttttgtaagtaattacataggtataccattagaaataaaattttaaagagtaaattaattcatttctttaaaaattaaaaagtcaaatactaatttaattaattaaatttaactcaaaaacgaaatacatttttaatttccaaaaaagtaaccaattaaaatcaacaaattagatttgatatctaaattatcatattaattttttattaattattatagttcacctctcatctttatatgattctatttttgcgaaaaaaataatatcatcgttataaaaaaataattagagttttttcgcatatgccacaatttgaattttttaaaacgaatataaactgttcaatacatgaaaaaatactataacgggtcaaaagtagatttaaaaaaaaaaattactgagtactgtgtcataatttgaatatttatattcaatttcatacatattattttaaaatttataatcttatatactacaataattaataacatattagattttttaatgtgtatgatgtgatttaatttttaatacaagctgaaaaatcctacaattgacgggtttaaatcaatattaatacaagatggtatactatatgtgaaactctaaaattaacaatcaaaatacaagtatataattttaaacactaaacaatataaataatatcaacaaaacatatacaactcgcagtttactatacatttaaaatcatatatttataatcaactttacaataaaagtttttagtttaactaaaatataagcctacctgctatataatgcaagttaaaattataaataagccgattatcatcacgatggatgtaccttctcacatacatacctatcaaaaacttaaaacctttcaaaacctcttggtatattcaaattaggattcttcattcatggaatcattattccaagggttttgggatgtcttatgaaatgattttggcagaagaggatgtaaatttttatgaataaagtagtcaccaaaacatatgttttattgggattttttagataattaaatcagagaatagggctggacatatgagtaacccattcgagttcgggtttgggattaatgggtatatgatttactacctaatagaataattctaaatattcggttcaggtcgcgtccagttgggtttaggccagtttggataaaaagtttcaggccctaaaaatattcaaaaaatagaaacgggtattttgaatgtagatagtgcgtctccaaacaaaaaaaacttttaaatttattaagttttaataaatttaattatatttgaatatattttactaaagtttgacaaatataacaaataattttgacaagcatagcaaacataacaaagtatacaatttaatttatacaaaatattaatgtccatgcttatctagtcataatttatttatagagaatctacttatataaataacaaatagacgaaaaacaaaacaaaaaaaaattatgtcgttttgtttttcttcaacggagttaaaatatttgcctatatatataatgatatctgaaaattgtaaacatcagaaacttagaagtcttcgtttcaatcttcccaaacccacaaagaatgaagaactcttccattctcttcgtactaattattgttgtttttctcatttcttcttcaggtaaattgctattttattttgttttaattgtctgatatattaattttatatctgacatatctttgtatttttcttgttaaaagttaaaacttaaaactggtaaaatttagaccctccaaaaaaagaaactgagaagaagatgaaatatgtaaaacaaatatttaatatttatgttttgatgaataaaggaaacaagaagatggtaggagaagcaaagaaatgcgaccagacgtggacttgtgaaggagaagacaaatgcagagaaaagtgtctgactttgcacaatggagttggagtctgtgatttgtacactgctcctttggttcctaagcaatgtttttgccactatgattgctaattaagctaattacaacccttaatccgtgtgattaaaagaataaactaatcctctctcttttccggaatacaagaatttaaaaatgatatctataaaagagtgacaaaatccaaaaaaaaaaaaaaaaagcaattaactgtcaatataaagtagaaatagaaatctaaagcgttttaatgctgataatatgttaaaaataaaatctaaggttttaaattttttcagtttttttgctttaaatgctaaactaaagtagaaattagatatacaattatatatataaagaaaaaaaacagagcgataaaatccaaatataataaatataaaggttcaaaaagtacaaaattaaatattttcttataaatatagtcgaatatcttagaagaaacaaatttagttgaagcctactctcaacattcacaaatccaaaagataatgaaaaactcttctcttcttttcatacttattgtcgttttcgttatttcttcttcaggtaacattttttctttaaacattgtttgatatactaattctgatcactttatctaccatatctagtaggatgacaaaattaatattttgttgtgtccttggttggaactcggaactgagaaaaaagataacaaaatggttccacttcttttatattgataaacttgtgtttgtgttattatatagaaaacgggatcatgataggagaagcaaaaaagtgtagtaattcatggatttgtgaaggagacgagaaatgcaaagagaagtgcatggctgactacaaaggcaatggaacatgttattacccatctcctccttcaaaacaacatcctgagttcttttatcctacatgctggtgtgggtttgattgttaagctcgatctctatctccaaaagaccaaaactattgttatctttaatccattgaatctattaatgatcaagacataattaactaaatcatttcccttctttttcttttatcatttactattttttatacatataagattttattataggagttaagacgatgaagaaggaatattagagatggaatcacaaattctttggttgctaagcaatgttttttctaagcaacttataagtctagttaaggtgcagtatcacaagtgttcaatgacttgcctcatgttttgaggcttcaggcttttgttcaaactcaaaactaagtgtcccaaagagttgttgagaagcttgggtttcaaagagagggtttgctcaggaagtagacttgtctcaaaggtgaaacctatgatgtgtttgtttatagtctcttgtcctctgatctttttcctcttccacaatcctctagccaaattgtctactactagtaacatgggttgaaatcctacatggccattatatagttctagattcattgtcaacaaaagttttacagacttacacatatattagctagaaaaaaaccaccaatagaatgtcaaaggacagtccaccttagaggctagagattagagatcatacatcatctgaaatcttaaagttcatgaaactatgacagtgtaaatgtcgaaccgaaatcttggtactttttcaccaaaacgaaccaagtcaggtcgtgtaaaagcctcattgaattggcaaattctctgcttcatgtctgactgattcgaacaatgaggtcgataggtaacgttccccaccgctagggaaaatcacctaaacaaaacagacagtaaccgattcattttctttaaaacctcagtgaaatggcaaattatctgctacacgttatgattctgtttttttacttacaactatgagtttgccggcgttttctggccgctttgccacctttatcgcagcggctgcagcagctccagaagatattcccacctgccagacatagaaatgttggttttatggcttaaacgaacataaaaatgttaaaaccaattaaaccagtgattctaccagtaatccttctttcagggcaagaagtttggctgtttcaattgcttccacacttgtcacctgaaaaaagaattggagattaccaacatctcagtacgatttctctgacatctcatcgcgtttacaaagacaacaccgataaaacctcagctacattacttggatgacttcatcaagaacgttgaaatccaaattgtctgggatgagtccagccccaataccttggatcaaatgtgtacctacaaacaggaaaccagtatccgttatgtgatcaagaaagtgatttagcagcaagaaactcctcgaatgatgtttacttatgttagactcaagaacaagatttgaactcacccggtttgcctccacttattaccgcactttctgtaggttccacaccataaacctgttgataagagaagtgcttgaaaagccaaatctataactactatggttggacttcaataaaagtttctctaccttaaagtctttattcttctccttgaggaatcttcctgatccggaaagcgttccaccagttccaacaccggcaaccaatatgtctacttcccctgcagagtctctccatatctctggacccgtggttcgataatgagtctgcagaataatcaatttagattgataaatatagatagagagagaagaagagcaaatgtaatgtgaaaggagagtccatacttgcgggtttgaaggatttttgaactgttctagcatgatactatctggatttttgctacatatctcttcagctttgtcgattattccttgaacgcctttactaggatctgtgaggtgaacctccgcacctaatgctaaaagaatgatttttctctcaaggctcattgatgagggcattgtgaggaccactttgtaacctttagctgcaccgatgaaggctaaaccaatcccggtgttaccagaggtagcctcaatcagtgtgctctgagtaaaaccaccaggatccaagtatcagtttgatttttaatggcgaaaacgaaaaaacacgaatgtatgatataatctgatctaccttcccaggagtaatcaatcccttgtcttctgcatctttaatcataccataagcaattctagcaagcgaaggatcaatcaaaagaaacaagatatttctcagaaacacacacaaaagaacaaacattgcttggagcagacaaaagagatagagagagggttatttgtatatataccgctccttgacactagagcaaggctccatcatttcaagcttagctgcaatacgagctacacaaccatccacaatgttgttcagatataccattggggtgttacctatcaactgacacagtatgcaaggaactaagtacattttacttgagcaaaggaactagaactttattccagtgaagcagttgattaaaaaagacaactgaaagattatgattacttgagttgcatcatccttgatcgaacaccggtcctcctccatgtcaaaattcttcccaatttgagttctgaagatcacaagaaaatcaaaaagatttaagacacagtctgcaagcaatgtccctaataatataaaacattcatataaatcgaagagtgttttgaaactgcatgagatccaaaattgtaaagtgaaaccaaaaccatgatttaagttcaaactcgaatataaatcagagaaaaaaaaaaatcgaacagcagaaaacatgagtatcaaactaaatataagatttaacaatgaaacaagtgagtgaagcattcgtgttcttgagctgaaatcgaacttgaggaggcgaaattatgaaagtttgaaatttttggagagagaaacaaaagaacagttcgaaagatacaaaaccagagacttatagaagagcttaccagttccagatccaatcgaagaagaagaagaagaagaagactgtcgacaaaaagagagaactgttctagtgttctgtcaaattagcgataagcttttataaagtgaattatttgcatatacacacacaccatcatccaccaccaaatatatccactcgtttatacatttataaaaaataatcatgtatcttccataggtattttgttaaaatcattgtataaactataaagtcaataacaaacctacctaacattctttgcctcgtcacgtggacaagtttctgccttcttgaatctttaaattgttttgattatgcctttttttttttacttaatcaggaaaggaatcttctgatgcgtactagcaagaaacacaacattggttctttttttcaaacacaaaagtttttaagtaactacattaatcaacatgataaagaaagaggtcaaagtttaatacacttcaataacagtatccgatctagaaataaacatgttattacagattttattagacaaagaaagagtagcacacaatttagaattattatttttcttctttttgaaagaaaaacagctagaaagtctgtttgttattgaacaaatgattctacgaaaaaagaactataatctaatacaaaaggttatacacaaacccccctcctatgattcatccctattgacaaataatttaaagataagaagaagaaaaaaaaatcaaaatgatgaaaaaacctagagaaagatcacaataccttaccaatttataacttaaaaagatccaaatctcttactatactcactcacacaccagaaggttaactcaaagatatcaaatatcaacctaaatggttccttgttgtcttattcttctcgcccttcatcatataccactcggcatcgtctttaactcgttcaatgtcgttctaatctgctcttgaaccaactctaatctccttgaatacacttccaattccagaatctgttgtttcctccaccgctcatctgcaaccgccttgtttcctcctccctctacaccaaaaccgaaattgaacggccgtgtaaacatggggcttagcgagccaaaaccatgaccaccaccaccaccaccaccaccaccaagacccggaaaccctcctcccattgcagccatcatcatacttgttgtcccattcatcatctctttgatcacaggagagacacagtttttcacagtctcttcgatcaaacccccgagatttcctccaataccaacagctgcagcttcgttgaggttgacattgctagctattggcccatcagagggagtgatgacaggtttgttgtcttcctcaatcttcccaattcttgatcgtgatcgttttctcgacacgctactgctactcattgtcaatttcttctcgattccattttcggagtcgagctccagagtaggattagaactagggctgttaaaggttgagtagttaccattggtggtgttatgatggttattggtttcttcgaaatccattacgttgttatcttcaaagcctatgattttcccagtttggttccagatttttctagaaatctcgaaagtagactgatcatgagggctcttgaagaatacctctttaccagagctgatcttgctcatcacattcctgtacttcttcttcaatctccgaagcttctccaccagctggttcttgttgaaatccagctgaagtttcgactttatctgctcataaaacggcgccgtatccggcggatgcgagctgcttccgcggtgcatcgtcatgtaatcgagaaaaccacgaagaagctcgatctcgtcttcgtctgtccacagcctctggaaaaggcgtctagaatcatcgatcggtggtctctgatggacgatctccgtcatacggtgccacttcggatcggaatcaacgggaatcacggagacagggacggcggatccagccggaagtgcaacggtcacggcgcctgtagaggaagtcgccgtcggggtcccggaaacaacagcagtcgctgagatcgtagaaaccatggggagtgatgatgtagacggagaattgagatcttcctcttcgggatcgtcgtcttcagcttcagcttcgttcgttcccggcataacaacatcatcgttgtcgcgcaaatcctcgtcggtatcagattctcctccgtctgctacacctccttcgtccggatcaggcgattccagttccagagagaaaagagcgtcgcggtgatccgatgtcatctccaccgtaacaaatgaacggagaacaattcgagatcagctccgatgagatggagaagagaccaagaagaagaggaaccagatccagattggagagaaggtggtgtgttcgttcacgaggattgtgattgggttgggtggtaggggcgtgagaatcttcgaccaaaccaggggtagttttggtatttccagacttaacgtttaagactaggcaaagtggtcacccactacttacacacacgcgcttccttatttgcggattggttggagccgtgacgtcctcactcggtcccaaccacactcggtaactaatagcgttttctaaacgcggttatttggtagagcgttttcattaacgtgattagctaggacaaaacaaacaaacaagccaacctaaaccgtatgtaactaataagacagtacccaaaaccaaaataagcatatgttgtgcggtatagaaaattataattactgttcaaattcagtgattgacatgtaattatcacagtttttccattaaaatagtaaggagcaaaagtgatataataaattagaaactttgcgagatttcataattatgatctaagtaaattttcattatatgtgggtaaataacatcgataatagccagagagactcacgtttacaatcaaacacagccgcacgagtaaccgatcaagaattaaatcacctaaggaacaagaaaatgcttatatctgctgcgcatgggaatggtggaaagagacgagagagagattaaatagttgtattgaacaaaaaccttggatcatatgtttctctaaactcaaaacataaactgaccaaaacaaaaataaacgaaaatctcagatttcagtaaacatgtctagttggagaaacgatctaacagcggacaaataacataaaaggtgattgattatggagaacaagaacccacaagataaagattctctcttcaggatctcacttcttcttggcatcaccagcctttgtctgcaaacattgatcaaaacagattcttaaagctacagtcacaatcaaaaacagaagatagcaagagggaaaaccagtatacataccttcttaacaccacggattttcttcgccctgttcttcctttccttaatttgtttccttgacttctcaatcttagtgtcaagtccattctgccaaccacatagacaaagcatgtttaagtataaagatgcagagaacaccaagtgcaatacgatataaagtccgaaacttatcacatagcttataattttcagacaaacagtaatgagcaagagtaatgatttaagacgggtcaatgtgagtagcaatatataacaatggaaacaagagtggaaaaagcatttaccctgataagtctgtatttgggttcaaacttcttagcgctctcaacagtatcatagatcaaaccaaacccggatgatttaccacctccaaagtgggttctgaatttgaatacgaagattgcatttggatccttgacctcgtacatccttgctagcttctccttcagctcagccttgcaaaaataaaaccaactctcccgttagaacctctcatagtctatcagaactcgaaatagatgaagtaacaaagtgagtaaagaacaaacctttgaaacattggctcttccagggtgaagaacatcaataacctatattttcaacaatccaccataacttagaatttcattccaaaatctcaaacggaactaaattgcgccagatcaatactatatgatctaaacactatctatgctttaacattaggtcgtaaatctgaaagcctgacctaaaacatcaaaccccaattataaaaatttgacgagacaacgaatgcattctctcgagattgggttcatatcaaattataactagattcccattaaaacaaaacccagaagaacaaaaatgatatgcagatagagaagagaaaaaaaataatggaactcacgaactgcttcctggagagaagtctgttggtcatgaatttcctggttcggatggtgaccgccttttcagccatttttgctacttctcaaggattaaagtgaaagatctctgcaagcttgagtgttttcgtccgctcaggtgaaggaaagagacgccgaatcgaagtcggagcttttatatagttacaagttccttagggtttcttttgtgttctctttgtatgggcctcaacttttaatttgggcttacttaatcctagccgtttggttttctaggtttgattaataaacatttacatgggaaaataaaacgaagcccactgggcctaaaatatttatagcctagtgtcacaaacaattgtcattggacattggttaaagtctttgtttcccccacgccacgagtcaatattttctgtacataacacaaaactggggttcattaatgctacgaattcagcaattttgagttagaattaaccaatgtcaaacacttaagactaaatgacagtttaatgtgtatatgtatagttgtgttcagctgattagaactaattaacttgtactttgacacttaatataaacttttgggaaaagaaaaacacaaacggctaagaaacttttattttattttattcgttgtgctttggtgttttacacttacaatgtagggaataatcattttttgtcttgtcaacgtgttacttttactatttaacaaataagaattgtttgccggagttattgcaaagaaatattatgaaacttttgggaaagaagagtaattattaaagctcaaaagaaactattataaaacagaatataatgttttgatcttgttaagccacgagtgtgttaaaatgagttggcttccaccgcaaaagatcatttgaaggttgtactgatcagatttcgaccattcgctggaacatgtataaattttaagatcgccaaatatatatatgaggacaaaatttaataacaccatctattcgttgattattagttgctggtagtgatgagaccctcttgcattatattcataataatggatagacacaaaataatatatttataaagtaacaaggaaaatcttgagggaaagattataaggaccgacaagaaaatgaatggagggaagatatgagaagaatggttggcactgaacaagtgtgtgttggagttgggtacgaatagaagtacgttgatctgtacattcaatacccacatgcatgtcatcaattaacgaccattttaccattttgctttcttagcctattatctactattaagatcaattattgttatcttcttttaatgggtcaacctaattcaattcttcgtatgtccctactgccatttttcattatcttttttattcgttttagttccattgaattttcttgacgcgtataacataaattttcaagtttgaatttgtacagggtatatattatatatattagatattaaaaatttgttttaaaagtattatagctattggtttttaaatatactaaattacatatattagatattaaaaatatatcattttactttattaattaaataatgctaatatatatatataatttacatatatatatatatatatatttcacaaatttcaaccataaatattaaataaactgcaaacaaaaattgtatttttactaatttactagtttacacaaaatatataattgaagtgtagttactaattttacaatatagaaacatatcttaaaagtttatcaaaagttaaattggaatacgaaagattaattaaagaaaaaaagcaaagttttacagttacttagaaaaattaagaagaaaagtaaaacaaaaaaaatgcaactatttaaaagaaacaacaaaatgtaagaaacaactaaacaaaaagatgtatcggatgtagcaacaaacaaaaaaaaaaaattaaagaaaaaagcaaaacaaaaaactacagaagggaatcgatctcaacattttaatattgtatggggcactaaatgaattcttattaccaaatgaattatggtaactaaatgtataatgatcaattatgttttttcaaaatttagcatggggcacgtgcccaccctcctctgatagtagatccgcccctggacaataacttataacttgtaatataatatatagggcttacagcatcaaatcacacgtgattgtaaaaaaattagatgcgtgtgatatttttattttccattttgtcataaagcttgagataatattttctgtctctatttgaagaatcgttttctagtatatggaagaaaaaaaaaggtcatattgaaaatgtccaaccatttcctataataatcacatagtaacgacaaaccaaccatgttatatttaatacaatatatatctcatatttttgatgaaaaataaatacaaaggcatgtggatgaacccaaatttctagttgattggtcggcaatggaacatggcgttgtgctgatgtggggttactcttataattgactatttttgtcacttttttccttttttatttttctcattcgatttctctttgcattatccaaagtgttttaagaacatagtagacactaattcatttgttttttttggtttttctttattaaagttattaatgtacttttgagtaattttattgtccgaagttttattccgaaactgattgctgacttcacatcgctcaataatttgctatcattattgcttgtcatcaattattatcatttgctatagtatgtcaatgctgaaaagattttaaaacaacttgctagaaacgaaaattttcaagtaatcagtaataaaaaaaattataatcgtattgcattttgaagttattagattgaagggtattattgtacaaataaccccaaaagaatttgaagaggatctcttaagtatacttgtgtgttgttcttgttacactgtaaaagtctttataataggaaacaatatgtatgtatacatgaagaaacagaatgtaatcaagaatcaatggcatcaacaggaagtgaagttgttcttttcagacactttggtaccaatctttctccaaacatctctttcaccgtatcttcttctcttcctaacccggaaaccgaacccaagaacccgtctttcggagaaatttccacctcttctccggattccggccaccgggtttttagttgttcatcctgaatatctctaagctcaatttggcatttggctttaagccatctcaactcttgttggacctgattttcggttttttcggatggctcatcgcagtatttagatggcataaacgagaacgatccagaacccgatatatggtttatctcgttacctgcctcgcaagaaaacatgttttcggggtcttcgtatagcacctcttcttcctcctcttcttcggaatggttatggcctgaatctatcgagcttagctcgcggctttcttgctgttgctgcagcttccatagctctctaagacgaacctcggtttctctgatcgtgatctcttcaaaccgaccatgagtctcaccgcacccgtttctgcaacattgtatcacatttgccccaggattggttctcaggaaatccatcaccgagcccattgaggtgcggtttgatacgcagttgttgcaaatgctcgcagcatttgccgccgccgcagccgcaagacattcttcgaattcaggtcccggtctccaactaggtacaagagaagatatctcaccgtcaatcatgttggctatttttgtgactccatgatcgtccatatccagttccgctaccatctctgttgcaacgctcaatgcggtgtccgtctcaatgtcaaatgggaagtaaatgtttcggacacgtcctgcaacaaaccagtccatgaatcaaatgaaagaaactgcattttttccactcttcttcataggttatgaaacaaggaaaagataaagagaatattgttaccttctttgtcagcgatcctaagacgcaagaacaagccaccatcatctctcctcttccctttgatggttatgtcaacattaccagatttcttttcttcttcttgatcatcattgtttcgagattcaaagagctcgatgccgtgagtctcctctgtctcagctggattatacgcccatccattctgatactcgtgatgactattataaccatttgagtactgacgattcaatgagctactattcgacgggtagttgccatttgagtactgacgattcaaagagctactattcgacgggtaattgtagtagtcaggaagatggtgcggctgcctatagagtggcccgaccgaatcttccatatcaactgatcttaaatcaaactcaccatcgtctatacggagaaaagggtcatctagtaactcacgagcagagactctaagcgatacggtggccaagcatttctcaatgaaacatttaacctcggggtctttcaccttgtacaatgcatccggtttcttgccctgaaaccgaacttttagccttttgaaacagaaagagatgaagcttttttatcttagtgttttagtaatcggagagtctcaccgacataactttcttgtagatctgagcaggatgagtacactcactgtacgggtaatcaaacgtaaccatctccaaaatacacataccgaacgagtatatatcaaccaattcgttatatgcttcttcgtaaacttcaggtgccatgaactcaggagtccctaacaaaagatcaaaactttacacaatcagaaacaaagaaactcagctaaaaagcagaaaggatatgatttggatttgcatatagtaccgacgcagtgagcagcatgggactttcttaaaatagcagcaaggccaagatctccaatcttgacctctccttgattcccgttaacgaaaatgttgtcacatttgagatccctgtggatcacaggaggatcatggctgtgaagataatgtaagcctctcaagatttgtctgcaccaatgcttcatagctcttatgttcactctcttatgtctgagtctatatctgtatccataaatgaagttatcgttaaagataaactaaaaccaacgacagaaaagtatgtttacaagagaatcttactgtcttaaggtgccagaagtgaacaattcagtgacgaaattgatatttcgattggcggtatcgacccaagaagtgtagaatttcatgatgttcttatgttttagagtcttgagaagatgaatctcacagtaaagcctctcaagatcctcagggctttgtaggaaatcatatagcttaacttggttccatgctacttctatgccttcatattcatcaaatgctctataactacaaaatcaaaagaaagaaagaagattaatgtatgtatgagcaaagaagtttttttgtttgcagaatctgaatttggtataagtcaaagcaataaagagatccaaaaaaagcaaagttgttggaaatttctcttgtggggaattaatgaccaaactagaagtgattcaatgaagcaaaaaaaaacaaaagctcaacttttttatttcctcttttaaaggatttgattcaatcatgaatccaaaacacacaaaaatcgtaaggacaaatttgttggatcacaaatgggttttgactgggaaaacaaaaagttacaaactttatgaagaaagaacaacagattaggcttaaatcatcaccagatccagaagaaaaaaaagctgcaaactttgagagaaacatgaagcagaaaaagaagagaagaagggagagattctcacacagtctttgaagctcctttaccaagaacttcattgtactgcaacaacaagaacaatgaagtcaacaaaagatcaaacaaaataattgagattgattgattgataggaggaaacattactcttccatatcttccagtaggatcaacttcaacaaactcagagtaatctggttcaagataactcagattgttcatctctctttcaatctcacaattacgaaccaaataaaaaaatcccaaaaggaaaaataagaatagatctaccaatacaaacgtctctcttttaataaatgggagagagtttaggtttcttcttatagcaatttctgcataatcatattattgtttttgttcttctctgacaaaaggagttgaacagggcaatgaaactcatgtagtagataagaacagtatctgtatagactctctcattattacattctaataaatactcaaactctatagagagagagagaaaaggaggatttgagcttagaagacagagaagccaagcttttctctcttcaatagttcaatggaagttttttttttttggttgatgacagagaaatacaagcacctcgtgagagaagacaaagacggtgtgcgtttctttagggaacggtggtccaaaaatgggatataaactaaacaaatatctatccttcattttttttcttcttcttcttatggaaccttttttttgttccttaaacctttttacatacttctaaataattgcaacggattttattttatacggtatatataattagtgtcctctatcgacaattatttattggaaattattctgtggtagtattaacaattgttcggtggaaaagtaacttgaatacttgaaaattatgattgattcattttagtgattattctatacaaattcacaagctagagaaaacaaaaatgttactattactttacctttcttttgttttgattttagttttgttttgttatacacaaagatgatgcttgcaaatagtaataattccattagccgacggagtattgttgtgaaataaatgttgaacctaccaaaataatgaatctcatcgagataacgtgccgaaaaaaaattctccctaccggctaaactgtgtgatatgattaacaaattactacatttagaaccatattctgataaaggtttagtttatgtcattaaaaacttcgactggttttcatttcaattagaacaatcaacattcaaaacaaattatatatgaatattgggttgcctcgtgtggatgtgatcgtgtcaggtctcagctatcttagaaaaggaaatagaaaggtgctctctcgtacgtatcttttgagtgatgggaatgatagactgttccatacgtttattccattgtgcggattgcatttgtattagcgtatatgccatcatcatttcaactatataattgatattctagtattttgaaatgatcatcgttcgtttgaataaatcaaaggatatgatcattgttctatgattacgttcattggtggggaatggtatcatcccctaatgcactacgaatttgaccatattttaggtaaagttacttttttttttagaaagattttagatataaagttttgaatattgtttgctgacatgctttttgtgttgattttacatactaaaatattagctacaacatttttaatctgaattatagtatccgtcttatattttggtttcatatacgctattggaaaattaatttttagaaaaaggtaaaaaaaaactggaaccaaaattttgattagacgacattcatctaaaaagaaaatcattataacgaatcattgcaatcgctataacatatacaactacatcgtaacgactagtctacttcttctaccatcaaacaacaatgctatataactaactcatgttttcgtttttgttacaaataactaactaaatgttaccaatagaagcttggaaataaaaacacaaaatttaagaattctgaaatggattggagacagcgagaccatacattagcatgtcgactagatgttccaaaggaggcaacaaaggttagtttggccacgtgttaagttaaagttgctcgtgttatctatcttgagtcttgaccatacatcatttcatttacacgacaatccatcaacataatttacatatcgtacagtgaacaggaatcatgtgcaatatgactaactataatcaagtctgatttaattcagggtataaatatttgatttatcataatatttggaaataaacagattgatgggggccaatcttatattagagaaagaacacacatgtgcatgtgggtgaatacaaagacatgcacgatcagcatagccttttaaacgaaaaaaaaagaagcaaataaagacttggttggttgtgaataatgaatcagaccaaccacaaatcttatccatttggccttttcctctcacaccattttactttaccataaagtttttttgtttgatagatgttaattttctattcttatttaatgttaatgcaagtaactgtgaatatcatttgtattttacactaatttttttttaatactaaactaggtagaacgaggtatcaaaccgaatttgataaactatcatctagaaagagatatacgtagagaacaaccaccccaaaaaatatgaaaaacaatattggtaatgcactaatgctaacaataacgaatagaaataacgtgattgccaaaagaactaattagagactaattaatgattaaatcggaccttgtttgactacttggctggtgatccgtggttgcccgtactgaaataatcagtgtaagctaatcccaaaagcaatcacctaacctcaattagttactactagtaaaacaactttagtttttactaagaaactgacaatatttgcctcgttgtcacttaacgaatagttaattatgcatatggatccaactatctgtctcaaattaaataatactaaagattagctgacaaaataaataatggtgattattattgatatgatctgcttggacataattagtaggtaacgatataattatcgatgatataaaaaaacacatcaaatcgatatttattagacgtagaattgattaagaatcataaaaattacgactgtattttttttttttggatttctttgttctaccaatctaattaaaatatgtaaaacttcaaatataaaaaaattgtaaatgttaaatataatagtcaagtctcaagtgtagaaaatatccaatacatctagaagactggactcaattcaaactttctatttttattgtcatttaataatcttgtaaattaatgaataatgataattgagaaagtaatacactcaatggtcaagaaaagaaccttggaacaaaaaaaaaacaagtcaaagaagtataaataattgcattgttaaactaaagccatgtctcatgccataggagtgattgtcaaaatcttgtaagatttataagaaagatcatagttgatttaccttacttctaagaaaacaacatctctctttttagtagctaaaaattcttatattagcaactggtaagaacaaacacatgattattacagatgggattaaactgtaaattaagctgtacaatcgaatcagtcgggcttacaataaattaattaaaacccaaacgtgaatgatttacgttatgtagaaatgaaaccaattaatttggtttgttcggtttggcttcagacgacggttatggaaaacagttacgtttaccggatctgatttcattcggccaggaatattgggccttaagcccattaaaagtttgagcccgaataacatacaccttgtaactaacaggctctttgtgattgaaaaaaatattattcattttttctcatttgggtttgtaaagcctatcattccaatcacacaaatattactaagaaattattcagaaaatgatttcctcttctcttttcgtgtgaaagtatatacacaaatatataatctagggtaattttccataatgttacttaatctttatagcaagagaaatatattatactgtattaaagcatgcttttctctttgactttcagaaatttagtaggtacaattaattaaaagctataaacaaatataaagcgtagtaaaaaaaaaagagaaaaaaagcgtagttgcgcaaagaaagagatttggattaaaaaaacaaaacttgtagtatttcatattagtttcttttctcttaaaaatgtagaagaagaatcaaaaaaattgtggatgctgaaagaaattagggacactgatgcatacagtaacaatcctttaagcttgggatagatgtgcacatgccagtagccatcaaccagccatgcgtattttccgcaatacatcgtttaacgcgatcatcgtttatgcatggtttcatcggcaccgaatatccgcaccattttcctgtgggttctggtacttcatgtattttgaatccatttcctattttcatctctgcagcttttatcgaaaccaatatagcgaatcgcaacgactataggttagataagaacaactaaatcaactttcttaagtaaataagttgagccaaaaaccattttgttactctcttgccatcatgcaacttactagatgaaattatttcttgcatactaataatacatgtaaaaatgtcaatttgatagttgaaaaacgaaatgatttacttaccaacacagaagaagacgagcacaataagaaacgctaccaaaaaactcttcattttttttttgtatgtagtttatttttcgtatatgattatctctattttataacactataatattgatgttgattgagatacaagggatgactttatatattacacatgatcgaatctatggtcgtttgattcgacaacagcaatagaaggttgaacttggattaccctataaaataatatttatttgctattaattatgaattatttccaaattgacttgacaaattaaatcctaattcctaagtatttaaatgagaagatattacgatttgattcgtctcacaatataccaagtcaatcggagccattaacattggaaattcaggaaaatatattttcttccataactgtatcgaaatgacacaaaactcttgacaaaatattaaggttttgaatataatcaacacccggatttaaactctagatagagacattcttgagataattaaagagtgttcttcgaaaatataaaatcatttggttttctggttacgtttcaaaagcggtagtagctaggcaattgcagtagcatccgtgataaagatcgactatatggttgcttctacgtattgaaagcaataatggaggatttggattttccgatttgcatattgaaaatgaatctccagtgttgtgaagacttcccttcacgggtcaagaagcttttgcgccaagtaaaaggagtttacgccataaccatagacccggtgaagggtctgattttggtctgtggcacagcagaaccttcggtgcttatcaaagccgtcgcaaaattggggcaaagtccccaactttacgcctacgagaaggatccagctacagcaaagacccgattccgcaccttgcttaaacgttatgccaccaacaagacacaagataaaccatccccgcctgcaccacctgtcacggcaaccacccccgtggaaacttgtccagcaggaggtgaaacatttagaggttttgggtatcctggaccaacgacgatgatgcagatgcccgccttttcgttgcccccaccgagaggactgccgggatggttagcaccaccgacaaacccgaggttgaagtacgaggagccaaaggtgacgccgaggaagccgcctgcgccttatcctttcgattactacgaaaacttggggtttccaccatccgactctcttttcaactatttcagcgatgataaccctcaaccttgctccatcatgtgactagggcttcttcctcaatttgactctgtttttcttagtttcgtgtgaggaggatgccttttttgttccaatcctcgtatcgtacgatccaacttttttcctcatggaaacttcacactatctcaatgaagtcttacagttgattttggtgaattttcatattaacaactatacttggtagacattatattgtttgggccatggccaaatgtataaattttagtgcttaagactcttagtcacggaagggaaaagacttgacggtgaatatctgcccgattgcttctagcgcagagacattccagctctcgacatgcctcacaatcttgtacaaaaaccagtgcctggatcagtcttatggttttaacacacgaaaataatcttatgaccgaaagagtggaaggtttcagtctttttcttactttgaagtctttatccagatcataaaccgtattcccgttgatcgatatcaatggtctccatggcagcttcaggtaagttctgaacattgatcaagaaacaaacattaagaagatgcaaaagtcgctacactttctcaagaagtttataagtttcatcagaataccttagcttccacgtcgctagtatatagtttctttgggacgactcactctgcaattgcgtttcaaaatggattacaagaacattgagaccataaatcatctgggactaggatctcacaaaggttatataccttctccatattttgcagttcaatggatgcatcttcgaggaacggaaccagtaacttcaagttgcgttcatacagctctgtacctgcagaattgaagacacaaaggagactacttatactcacatcaacattcaggatcttatagctgatgatctgatcaatctacaagcttgacaaacaaaaaccagcgagcatgaagattacattgtcctagattcagatagacctatagaataagaaactgagaaagaggattctgtaactccttaccctggaagctgatagtcggatcctcgaagatgcaatcatccgagtaaattgcagaagtcaagactcctggtttcagttagtgtatgtgaaatggaaaagattcatgagtttagctatgttgaactgaatcaatgcagacgaacagcgagagtcatataccagtgacgaagtagaaatttcgataatctgatctcaaaatccccatcacatcatcgacatctccagcagtaacctcattctttgatctgcagccagtattcaaatcgatctccaccaccagactaacgacgaacagaggagaataagaaaccttaattcaaagcttttcgagattaccgatccttatttgtagcgatggaggttgaagacggagcaccggagatcaaccggagaaattcagtaactccactaaccgcccacttcaaaacagctggtgttttcttctccggcgaaccagagaagcaccgtggccattgattaaccctctgcaagatcaaaaatccagaactaaaacataacgattcagcgaaggaaaagctaatcgccatagagactcaccctaaaggtcgaagatgagctgatagatatctggcaagccactcccgccattcttacttagccgagtgacttacaatagtcgtcggcggcaattttattttaaaggccgccacgactccgccgcatgtttatattaaaaatgtttatgttgttcccttttttttttttttttgtcggcatgttgttcccttataattttgtttccaccctaaaacttttatttattaatttatagtaccttatttcatttaaaattggagggtccttttgtgttaaaataacttaatagggtgaaatgtggaagagtagtgtaacttatgtctttctcttttttccgaaaatttccaatttaagattcttctggtcacagcttaaggtttcaaagctctgaaaagatggccggagctgtttctgccgtcgatcaaccgttgaaaatcatcaccggagctgatgactttggagcgagcctcaaggacgcgatggtaacacacctccgctctctcggcatagacgtggaggataccggagtgtcctcttactactctgctggatctgaagtcggtcgccgcgtctccgcttcatcgtcttccgaagttcgcggcttagtctgctgcggcaccggcgtcggagttgcgatgttcgccaacaagttcccgggcgtctacgcagccacttgtctctccgtcgaagacgccgtcaacgctcgatcaataagcaattgcaatgtcctcgcattctccggcatcaaaacatccccggaaaccgccttggaaatcttcgacgcttggatcaaaactcctttcaaatctccttgtcctgcgtccggatccgaaccatggagctcagttatctcttccttcctcgacaattctctctccgagatgtctcagattggaaagtcaaccgccggcgattcaacaaccaagaagatcgatgaaacaaccgcgtcttgcgtaatttgctgcttggcgaagaacagagagttcactccagtggacatcatgccgggaggctcgatgaagatcgttagagagacgccgacgtcggcgattgtaagattcaaagcgggaagtgtggaaccggcgcatcaccacacattcggccatgaccttgtagtcataaagggaaagaaaagtgtgtggaatctgagcaagaaggagagagctgatctcgttgacggcgattacctattcactcccgccggtgatgttcaccgagtcaaatatcacgaagacactgagttcttcatcacttgggatggccattgggacatattccttgacgaagacctcgaaactgcaaagaaagccatcgaagaagaagcttgaaggtgtaaactttgtgtagtactctcttcttttgaatgttgtaagttctgagagtaaactttcttaaattgatgtactttgtaagaatctttgatttcaaaagatggtgtaatattacaaatactttctcttatgaacactatataaagggtttctacatatgcttcttcttcatgtacccatagtgtctcaaatcttcatcaattagccattggtaactactttcaaacatttttcatcattagaccagacttagctcatcaggaactgcagttgcagaagaagaaagcttcttgtttagctctgctagttcttcaccagcatcacagatgtatgacgaagcttgtctccctgataatgttgctccttccatactatctatgtaatcctgtaacaagtccagaaacaaaattctcactgatctttcggatttctcagacacaatttggaggctgttcttgcttgcatttgtagctatcggggatctggctgaaagatagtaagtgaaaaatgttacctgctttgtgtatgaaccggcgaggaagaaattctttatgggcgtcttctgatcgggtctgaatggatcttttccgggtgcttcacggtacagagactgagcgatttttacaaccgacgaccaagtgacttctaggcctcgtgacgatggaaacaactcagtgacctgaacaagatttgagaatcaacaacaaaccagctagacaaaagttttctcaagagttgaatttagccatgttctttacctgcatcgctactttctctatgatcttatcatttggcattcgcatatacggatctcctggtgttagaacgcacctgtgaaaacagaattcagtttcaagacactgagagacctgcatgcgattttgtaaacaaagaaaaacgttattctttcttactgaagtaaagtgccttgtccttcgatgtaataatctgcaggcgaagctagtgcaagatccgcaaagcacgagaaatcagcatcaggagtgtagagaagattatctaagccaaccgctcgtttcaactgcctacgattttccaaaacacaaaaacaaagacttaaaaccaaaacagaatagatccatcacgatcatcccaaaacataggattctagattaccaacctagcaagttcaatgtcttgtaactccgtgacccaaccattgtatctgagctgtactgtaaccacaggtactccctcgagttcatatatatcgttgaaaaaccgagattccctccattcttttggaagtaaccttttgattcccggcacatcacatgctgcaacatatacatcagctttcacaatcttcttgttcgtagcctgaaagcaaaccaaaaaacaaaaaaagtcctttactttcatatcaaagttttgtgctttttctctacccagaagctgcaaccttcagaatgtatgtatacattttcgcagtccactaaaatcctacgtctgaagctaaatttcaccttagaaattgctagtccagtgacataagtttctccatctgctgatttatcataaagtatctccctgcaaccccaccttagatggattctgtttgaagacaatattataaatacccgataagccaatgacataataaatgcgagaatcagttcttgtagttatagcagatacacacctgccacctctatctgtgatatattgtttgataggaccactcaagtaaacatcaggagagcccttgagcatacgcaacagagaagcttctgttttggtagcgaataatgagaatattgtaagcatgcatcgcgcactcatgttatcgcagtctatgaaacctagagcataagcaacaggatcccacattctctggatacttgcccgtgtcccaccttttgacaggaaccaatccgagaaacttatctgcaaaaagtatttcagaaaatttagagaacacaaatagtagtacagatgagaagaagaacaggttatcattctttacgctgtcaaggttgcgaatgtctctcattgctccatcggggtcgacaagagctttaacaacagggcttaatgcaagagccagtgaattccttagtttgtcatagggctgttcggtcaaaacaagaataagcagttagcaagctcgatattggtacataaagcaagaaattactaatcttttgctatgaacatttgagaaaactgttgccgattttccacggcggaaaagtgcattgatatgaatccaaagatttaaaagataaatcaatttaaaagtttgatttataccttgagttgatttgtgaccaaaaatgcgcgaataccatggattggagctccaacaggaaaccgaaaatcaagctctacaaataatatgcacatctcagtacgataaaatcacaatagcaagagaataatgaactgagccatacctccaattgtgccgtctttgtttataaatgtatgagtatggtctttgactagaaggtttttctcagcacccacctacatcaccacaaaaaaaaccatacatgagtatgagtttcaatcatcaagtaaatttgagcagaagctttgagaaacaaaaacctttttcatcaaacggaagagattgttgtagcatccgaagaaaacatgtaatcccatttcaatatggttcccacgtctatctacaaaagaacccactttgccaccaatgaatgtcctcgaatcatatatatccacctgaaacaatcacgatgattacacatgtatgtaaccaaatcaaatatataaacaactaacagaagaggagtaaacacctcgtgaccctgatccagaagctctacagcagtcgacatgcctgcaagtccagctcctataatggctactttcagcttaggtcccttgtatggtacaggctctggaggaaataacccctttggagctgtattcataaccagaccatttaaacagtaagagatgatcaagaatcacgatgctccagaaaattattagaagaagaaagcttctcataacatgaaaccttaaatctaaatttgattccttaacagctactacttcccatggataaactaaactgattatataaacaaaagagaatcttggatcgaccgtaaaatctcgaccaaactctccatttccattactatgccattagtagagagaagccacaagagtttcatctttttatctaaaccatgagagttcagaattcatctatatgccaggaaataaatagattgagttcatcaatatgccatgagaattgaaacatcatcctcttcaaaagtgggattgttcgtggcataaagctaagccttttaatcctagtacatgtcaatttctcaaattttccactaaaaagacaaaatttaccgattttctaaagaatccaattgaaatacccagaatccgaaacatccaaaggaatcaacctgacgcagaggagacagtaaagaattcaatttttgtttggttaattaccgttaacactcatgtcggaaacatcggagtcgagtgaagaattaacatagaatctccgagacttcaatggaggaacggagagagacccagttgccgcgaagacgactgaagaagccatggccaatcaactgagataagagcaatcgctctgttattcaagaaaaaaaagatgatgtttttttctttctcttcttataataaaagaggaagaaggaagaagtaaagtactaatgactaacaatgagcgatgaagaaacttgtttgtgatgatgtatgatgctttctctcctcataaaactctgtggtgctaacaactgtcttcagtgcgcttaaccaattttttttcttttttatatgatcaaaacctattcgaaatgaaattaggtgaagaattgagcctaaacccattttagatggtacttagataagaaaaagattgaaacgattttttactaaacttttagttcacattaccaaaaattaataatctgattcgagctttcctaaccttttagtttatgttcgaaagaaagagttttaacttttcacttgagttgagagacatagaaattgattctctggttagccgcctaaaacgtttaggctataatctcggttattcgttgttaagtctcaagaaatgataatccgaatcaaatatgggctggtgtatttaaaaaggctgagacccaaaacaatatttttgtttggcaacatctatatatatatatttttgcaacacttttatgaaataaatccataaatcctgaaattgaggtttatttacaatccaatgctattggcatttaatattttaataaatttattcttaaatctaaatataaatcaattttgttactaaaatttagaaaacaaaaagaaaaatagtcacagaaatcatttaaatcttttcaaatctaaactaaaatatactacacactaacttaaaattaacttaaaatcatttaaatctttccaaatttaaacttctaaaataattaaaatattttgcccaaaaaacaaataataataaaaatatcatgagacaagttatatagtgaagcggatttggattgatataacacgggttaaatatttatttattattttatcatcactaattttttatttacaatattaatataaaattatataactttaatattaaattaaaaccataaaatttaatattattatatatataaataaaatatttgtcccgtggtgtaccacgggttaaatcctagtatcacttatttctgttttgttttaacgtttttaagattttatagcttcttgaaagaaacgactcatcctacaaattacaatctttgtcaatgtttaggattttttatttgcatttttatcttctgttttgagaagatgtccgtcgctcacaagtagatagggagacatattattaattttaaatcaatactagtataaaataacaaacgacaccaacaacacgataatattaataacgaaaatgagactacgataaaataaaaaaataaaaaatcagatcccaagaaaataatgttaaactactgggacctgctttattacaggttggtccaaatttcaatcggaaacatacataatgataattaattattccaagacttttgcggtagcattgccaaacaaaaggaaacagtttaacctatttggtatgataactttgttcgttttgataattaaacatatgctcttcacccacctatttggttgacaatggaatgaagagtcaagacatatgattgattatcgtatgaaaaattcaatcgctaaactacctctaaaaacggtatatgactaattaatccattagcgaaagcccaagagagcagtgagagtgggctcaatcgtgggtattaactacatgcctactacaagtcatgagataccaatggttatcataccacacgtggcaaccattccttccagcctttcatatacttttttaatttttatcctacttttttttttaagaatatacataaaaaattcactataatgagacaaagttaaaaccctttattatttaacttaaagcacagaagaaaatgtgagtatttgtgtcaaaaataacaaagttcgaaccaaagtttgtaaattttttgattaaaatctaagatgatgtaaaaaagaaaagaatgtaaataatgtttttgtccgaaatttattgttacagtcgttttccgctgaattaaattcgaatttggtactttgccaagaaaatcgggtaattattttaacgtttttagaaaaaatgactcagacagtgaaaacaaagtttcctttttgtctgtttctgtcttttatttttgactacagtagtaggcacacacacattctcttctattttggcgaatttcgccttttgtgcattctctctctctctctcccggagtctcaggctttctcttaacttctcattctctccttggttgatgaaactggatcgatttgatagaacccagatcaaatctgttgacatttttccagatttcgatgcttttttgagattgggtttctctttcttttgatgaaacttatcactttcaggtaaatcctatagtctaaacacttgcttttacgaaatttcgttactaaactgaagttaaattcgccgcctttgaatttctcagcgttgcccagttttggccacaaggtgtttgttgaaattccggagagagagagaagctcgaaattgggaattctgtaaggaaaaaaaaatgagagattttccttcttgctctggtgaaaatggtgttcagattgcggactcttcgtcttcctcgagcgctggaagaaatgctcagaatttggtaatatgcatctaccgttgccgcatccgaggtaggacttgcttgatcacagtcacatggactaagaatctgatgggtcagtgtgttaccgtgggggttgatgattcttgcaaccgaagtctgtgtaaagtcgagattaagccgtggctcttcactaaacgaaaagggtccaagactctagaggcgtatgcctgtaatatcgatgttttctgggatctctcgtctgctaaatttggatccagccctgaacctttaggagggttctatgttggagttgttgttgacaaagagatggttcttcttcttggtgatatgaagaaagaagcttttaaaaagacgaatgctgcaccttcttcatctttaggtgctgtgttcattgctaagaaagagcatgtctttggcaagagaacgtttgcaactaaagctcagttttcaggtgatggcaaaactcatgatcttgtgatcgagtgtgacactagtctcagtgatccttgtctcattgttcgtgtcgatggaaagatcttgatgcaagtgcagcggcttcattggaagttccgtggcaacgataccataattgtcaatagaatctctgtggaagttctctgggatgtccacagttggttctttgggttgccatcatcaccaggaaatgcagtgtttatgttcaggacttgtcaatctgttgaaaagacctggtctttcacacaggtccccacgagctcaaaatctcaaagttttgggttttcattgattctgtatgcttggaagaacgagtagagaagaagagttttgagagttcttttgtttctcttgagtgctaactaaaggttaaaaaggaactgttgattcttgtcaatttattttatcatatgatcaattggtttcaattatagttttctcgtaaaatgttcgaaccggatcattgaagtatatatcagtttcatatgtcaaaagtttttacttgagacttgtaaagacttttgttcaaagccgattactttagccctgtatcaagaaaccaactgtctagatactctgttttgttctccatgtgcataatgttcctcaatacacttgatagttctaactacattaagggtttctttggtgtatggtctttcttctattggctgttcaattgtggacaaatcagattataacgatctgagctaaagctagtagttacaagaagattatcaaacatgtgctttgcatccatctagatattcttgctgaatcattttatcaagtatatgtatcttccttttagagatatatcatgtatttggttttgtttagcgccataccttttgagacattgtatatagcactttgttattatccagctctttgcagtttctgcaggtttaaagagtattttatcaaggattctagagagacgtgggtttgtacttgaagattcttaaattgtgaatcagtaagtcatgtttcaagttttcacatttcaattatttccttgctgcggtctcttctctagccctcctagactgctaaaaaaattaaagattataatagcatgatagatactcttgctgaatcatatggtttaggtagggttttcaacttgcttcaaacaaacctctctatagttgttcctgttccttagaaaaactgtctgaataatgttttgagttttgactgttgggtttgtccaaataatgttttgaaaacttttccttgaagctgttcttgtagcatgaacccgtgacatgagagagtttgcaaagtttattatgattcgatatccaccgaaaagtgtacaacatagcactcttgcttgaaagaacatcaaagttctcttggattgtcaagtcagagaaagatgttttagagcaagccaagttactttatacgtcaattcaaacttttagatttggatatctcaatgggtggggggacctgaacacaaactgcatacagttttgcaaagaatctctgaaacagcttgccgtttgtttgatctcctgctttctttttggctcttattgtattgagggaatcttgaaaaggttaatgagaaaaggagagacatatagatgggtcctttagaatgcttcctatggctacaacaaaatttcttttgggtctatgtggaatcatcacatgtttgcctttctgtctggttctgtaataataatgccatgaaaaatacagtagcatcacactcctagaccatgccagaccatgccacccggaccccaccccaacgtaccataccggaaaccggttaagaccaatttttatgggaagaaagaatggcagaatcttcaagtgccgacgagacaagaagagaagaagcaaatagttttggtttcataagaaaataaagcccattgaaagaataggaaattgagatgacaatttcctttttttcttttgaacctttttgtattaaaataagtaaacataaccgactccaacggctctattgtgtgttccatcgattgggattagacctaattaacacttttgcttatagatacgctctctcgctttttctaattctttcttccttgagagaaataaaatcaaaactctctaattcgatgatgatgatcatcatctctgcaacatgatccgacaatccgtaagagttagattgatcagagcgcatcgtttcatccattgatcggcgtggaaagcatcgttttattgattgaatgatgatctccgtacgtcaaccctctctcgttcaccggataatgatgatctagccaccgtaaagctttaaccggagactacgaggaaaaagaggatagcgaagagaggttcgtgataatctgtcggtaatcttgtaatctgaagaccgatcgtcacgtttcttacatttatcgccattctatcttttgcaattcagtatcctgtgactacttctacagtcagaccctaatttcacatgatctccaccactacactttcaccggtggattatgtagacggcggctaatgtttcgatggctggactgttgaagttgaaatccttcattgaacctgcacaaagaaaattgaaatcaataagaacaagaagaggaagaagaagaagagagtcaacgaccgagagaagaaggaaagtcaataagaagaaaagaagttgggcttgaagcagctgattcaggagggctagagagagcaatgcaagtgttgggacgtttggttaagtgtgggcgtcttcaaatggtttttttatgggccttctttgctaccacatctaacaagttacattattcgttttcattcttatctttgtttttatttctataaaaatgattttaagtaaaactaaaactaattaatttaaaactttcactaaaacatttaaataattttttcactaattaataatttttaactaaaaccaatgttaatttcattattactttttaagaattagtttaaatgttcaattttaaaaacgtcgaaactaatcgcgcttagacatcatgtcctaagttgttggtccgtaagctggtgttcaaagctcggcatagttttcacgttatatagatttaaacttaaactcattttaaaaaactttctctaaaataatcattttcactaaaaatttatttgaaaataaattcatgttttactaaatctaaaacttaaaagacaaataaatttaaatgtaaaattttaatacgttgaaagtaaaacgaacttatgcattattatgttcttaagatttcgttttgtctcttaggttggtgtcgtaaatataacatgtttaaatatattttgtcgtaaacacaaaataatgttttgttctggtaacggcggagatggagatcccccatattgaagaagggtgaatataatgttctttaagaattcctggaaagatccctaataattattgcaagaaaaatagccaaatttgttagtcattgtgcaccgtttgcttgaattaatccgacaaaaaaaaaaatctagtttgcctatacgatttaaaagccttaaattcaaacccaatgggcccaattactttcacactttcactaataaaaatcgattctactttttttttttttaatgtgtgggcccaattatagagagaggaaagcaagcacacggcttttcacattactgtttcccgctttcccgctcctcctccattgaaatctccaccttcttcttcttcagtaaccgatccactctcttcgtcttcttcttcttcttcttttagtgcttcgtttttgttttccgggaggcgaagttggagtagaacgacccagttagtataaacctcgccggaaatggatacaccagataagaaccgcatctccgccgtttccttctgcaacttcgaggttcctctctcactccttaattatgataatctgctcctactttagtttttcttcctttatatttgtttttatttggagaaccgactcagtgaatttgcatctagatgtttcctaaattcgctcgtcttcatcggatctgctactctttgggtccataattcatataactcttactgttataaaattaggttttggggcttatgatcgtcttcgttgccttaattttcagcaatttgactcgatttgagtttttctccttttgctactagattagtatttttccaattatgcttgaatttagggtcactaattatgtatctcttcacgtttctttgttgttgaattgagttctaatgagttagattctcactgtaatccgcaggattctccagtttttcaatatattaatgatctctctccaatagagccagtgaagccaggacgcccagagaatatcttgcactcactggtttttacatctccatcatcatcatcatctctattttgttccccgcagttaaactcttaccgagattccagatttttcatcaaaaggttacttgattactccttttacttgtcttattgatagtaagaaagatttgttgttggttgctgacaatggtattgttgtgtggttatgttccttgtttaggcatcgttctctagatctatcgagtccagtagtcctcatcggtgagactctaaaaaactcaccagatgctttatgggaggagaagctaaagtgtaggcctgagaagttggaaaatgtttctgaacccaagccatttaaggagcagataagcttagcaattgagttggcgaattcattgaaacacggaagagatggatgtgatattcagatggtttcttgtgatgaagtacctatggatgctgatgatgaaataggaagcggtggtggatccagagagctgtctgatgagttatgtagacagtcttttgatccacttgactttgatgctgattcagatggagtacttcacactgatgaaatggaagctgagagtgggtttggtaaagaagtaataatgtttgatgttgctgatatccagaactatgagcaacagattccaaggaccacagatcctagattttattctcttgcttctgagcctcaacagttttctatctactgtaataactcaaattatgtcgaagagcgggaaggttcgtgcagtgtacaagttgcagctggagctccagacattaatctcagttgttcctccaaggtagcagctattgattcaactgccgaagctgaagacaaggaagataaagaccttcagcccagtggcaaggtaacatttcagtattttgttttgctgttgcttttatgtcttctcagacctcatgattactcattagtcatgtgtacatttcttttcattctttaccttttagcgctattgttctccaaaagtcaatcgaaataatgatgtgtttttggagacttagacttaaacttcaggtggttgtttttcagttagatcatttgcttttatattgcaagtagaaataattttcatctgctagttaatgatttgatttaaactgtggaacttagctaatacctataaattgactcttacagcaacgaagtgtacgcaggcgctgcttaacttttgacatgggagggtctcacaaaaggatacctttgcgtgattctacaaatgatcttcctcttgattctacctctatcaataaagctcccagtccacaaaattgtttagacaccagtaaacaagacactgatgagattctacccattccacgaacgattggcctgcacttgaatggtttcgtgaacccctcagtctcaagtggccgaaaaaaaaaaaaaatcaaagatggtcaggcttttccttctacaacatttcattataatattgaagatgaattctcaactcctgtctccacaaaaagagatttggtggtattcagtgatgtcaaaatcatggagcctcctgagagatcagtggaaggagaatgttttgaccaactcatggcaatggaaaataggttggaaaatatttcgatgttcctaatcttgtaccagccatcaactattagctatgaatacaaaacttatacttgaaatactgattaatgcaggcaattgtctcaaggacttgacgaacttggcagctgtaagcgctgtaaatgtaggaaatcacaatgcttgaagctgtaagctctttccttacaatcattccctggacacaattttcagatgccaaaaacgtctgtttttctttaaatgatatggttaggtttttattcccacttttctaaaagctattgagtcactttcattggatactactttcaagtgaactagatgatgtgtgaagtctgttgcagatgttgttctgtctcgctgaaagtgcagcattgtcagcttctatgttccagaacttttttatccaaaagtttatacctttttcttgtccaaaaagctcataccttttctgcaactcagcttaagttgttaaatacactgaattttaggttgtgtagaacatagacaccaacccgtcgttaactacatattcatatctttgctgtacaggtattgtgaatgtttttccgctggtctattctgtggtgaaccttgttcatgtcaaaattgtttcaataagcccattcatgaagacctagttatgaaaagtcgtgaagtgattaaagcccgcaacccattagcttttgctccaaaagtggtctcaacttctgatactgttatagatttatgggtaagacatatcatgagatcaatagtgagatcaactacataatacagaaaaaaatagacttgtcctgattcgctgattaaagtatgactgcaactagatagtactgaggattttttttttgtctcatgtttatattacatctgtaggtcgagaacagcaagactcctgcttcagcaagacacaaaagaggatgcaactgcaggaaatcaggctgctcaaagaaatattgtgaatgctttatggtaactttggtttcacttatccttcttcgttcgcacttaaattttgaataatgtcattcttctgaaccattggatgttactatgactttatcaagatgggcgttggatgctcctctaactgcagatgcatgggatgcaagaatacttttggtcacacaaatggtaagctttcaattatctattgccctttcattcttgtacagaagcagatatctctaagatagtttgcattgttctcagagcaatgtgcgggagattctgatgtggtaacaatcaatgatgaagctaaacactatggtgatcatggcgatgcttcaaggtataattagtaatctacgttgcaatgtccaaagctcaaggtaacagtgaatagtggtctctaaacactaactttcccgggttatctttctcaggcaaaacgaagaaatcttaaccagtgagagaaaccgcttgttgctccctggttctgtagcattccgttccttaacatcactgtcaaacctgtctgaactttgagactgactactcagaagcaccatctgaagaaccaggagactcctgttatgttatcaatcacgcacgactcaatcaatcaaaaccaccgtatgaaagctctgtgtctgctgttgctcgaatgggttttgtttgatctaccttaatctcactttcatcttgttatttccaagtctagttttggtgggtatatattacaaatatatgtattggaagatttttgcttagggtgtgaatgtgtgttacctgttttgctctgctagtttataatgttttagtgtttgtttttcactgaagaaagttttgtagtggtgttgtttgtctccttcctctgctccgattttgttctctcttggttgctaactcattctttcaaacaaactccacaaatcagattcttgatattacggaaaggagtattattaacaaaatcattagaaaaagttatgtattattcaattgaaactacaatgaataaagtctgatacatttttccaagattgaataaaacttagttttgaacgaagtttatcgtttaaactgtgttaactggggcttgtaaattcacaaaatgtttataaagatggcttaagtgtttataacgcaacacaattaaataaactaaagtttagtgtacataaaaagactttttgtggcctatgaaatttgtttttcttaatgaggaactgaatcaaatttagagaaaaggtgttccataaattatcaaaaactcgcaagtttacactgagaaaagtcatcaatacagcaaaattaaaccgggaacaaaagagtgtgtgaaacgacagagcatcaaaaagctaaagtttagaagaaaaagacatctctcgatttcttaagctccgatgatttcagtaggttcctcaacagccatctcatcagccggcctgtctaccttaacaccaacatcttctgctgagtaatctccgtgaacctacaccaattaaacacaagcattcagtttatatataacatggatattgaaccataataaatgtagtgttcattttcttcactcacatccatgagcttgccaaggtcgaatttaggggccttgaggatcttgactttacggatgaaaacattctgaagagggtagatgccctgagttgccttctcaatctccctgccaatagcttcaggaatgaacttagcaacaagatccttaaggtcacatgaggaagcttccctaaccatgatgtccctcatcttcctgcggatctgaggaattcacaacaaagacatgtgaatttttaagacttacaatttgagagaaatcaaacaaggaagattaagaatcattgacaaaaggaaccatctgagctcaacagaaataacagatcaaagattgcaaaagtaggattcagtaataagagaaagagatcaagttctgtagtcaggcctaactacaagtattgcaggggaatgtgtgcgtacctgacggatttggctggattgagcgtagcaagtcctcttgacctggttagcacgtctcttggtgaaggcgatacagaatagcctgagagtgtaactgtcggtggttttaacatcaacatgagcctcaatcaaagtctgccacttcttaaccaatgacctaagtttatcggtggtgaagtccatgccctaaagatgattaaaaaaaacagtcaagctccacaaccataatctgggttttttaaccaatgaccagaattactgatgtaaatcaatgtttacaacaaactatccttacccagaattggcacagaacgttcctgccctggacatcttcagctctgagacggatcttcctgtaagcgttatcctcatcaccttgaagatcagcaagagaaacctcaaaaactctgtgtttcaagccttctgaggcaatctggaagagtaagaacagacatcatcatcagtctcaaagtccgtacatggcaccaatacaacattttacactcaacatgtataagaaaatgaatagtaacattataacacaagatacacaactgtaacaatcaatcaagaaccataagaatcagacaaatcagcttaatcctacgaagagtataagcagcgaagtaatttgaggatgtattgtaataaagagagagacagaaacattactttggtaccctgagttctggaaacaagtgtctttccaacattcctgtgagtgaagattgaaggagccttaacatcataccaatctttcttggagaaaggatcaacactgcaacattcaattttcaaaaacaaccaatcaatcacaaatgataagattcatattctcatacttcaacatggccactaattcatacacattgttaaggaaaacaagagaaataagattcagaaaaacttacgccttcttctttcctcccttcctacccttagagattctcttgtttttcctacagtaaacaaactcatagatcagtgacaaatactttaatgatacgaatcagagatagtagaaatgagaggacaataatctgagagaaaagtacccgacggccatggctgaggaaaataggtcgacgacgaatagagaagaatcaacaataagttttaacctaaaatgctgctacggcgcttcttcaatttaaagtcttcttctagggtttgagtttcacacccaggataaacaaagttttgggccttcaaatttaccagtaatggactaagcctaaagttgtatttacttgcatctaatggcccactaaggtgtccaatatttcttttttccacttgagtctgaaatcgattataaaaccatactatatatatgtgaaaagaaattaaaaaacaaataccatacatgattttaggatatgagaagttgtattttatgaattagtgaaaaatatagatatttatttaattgttagataaattgcatgatttgctaaaacttcacaaatttattattaacgtttaacgtttagattgaattagtttaatttattatttgattaaacacaccttagtaaaccgtatcagtgattcaacaatatagccaagtgaataagaaaaaaattataagggtaaaagaaaaggaatgaacaaaagtctgactgtaaaaaagtttaaacaataccaaaataccaaaaaattgtttgggctctagtgctttgaactaagcgattttcaagtttctcaaggcagaagtgaggaggttgagcttagcgggagctttttgcttgtactctcgctccaatgcagttgcagccaaagactgaagctctggtgcagccatgtccttgtcctctttgttcctgccttttgagatctgtgcgattgctgatccacactgatttcaaaaacagaacatgtatcggtcattttgtcacttgcataaccaaagtggattaaactggtgtgaggaagaaagggttcataccaagcatattccgagaagtgctcttgtgcttttaccacctgtcaagtctatagttgctgcatagtactttcttgctgcgatgaggttttctagtccacctattgtgtagagaacctgattttggcgattgcaacgcaaaatgaaaattacgttaattacacaatcatacatgatcaatgctgtagtttagagtttcgaactatataaaaaaaaaactgccaaacttttagaattctcagttttgagtttgatatgtgcagtgcaaataatgcaaagttccagaaaatagctcgctcttctattgctactacattaatagacatatgaatgacaatgaacttccagtgtaagatataaggaacaacaaaattgattataggatgcatactagatacattgtcttaaacaaactaagacattttgatgctccttggtgatggccaaaatttgacttttttctttaacaaagccagagaacaatttttacttttttttaacaaataaataaaagatgggacttacatcggcatatgctaagtggtacaatggaagagtaggctgagttagtatgagctcctcgtagcagaaagctgcttgcttgtacctgttacagattataaatttaaaggggttataaagagagcaccctcaaaatgaaaaacatttgttaatcgttgagtagttaattgtttgtcaaatagaatctgaggacagaggatagagagacgcacatttgcaaggaaacataaatttctgcaagttctctccaggcatcatgatcagccatgaatctatataagaaagaagagcatataaaagttatcagctgtttgatatatttcttctaaagtactttctatcagtccagcttggggttagtaagtactcacacttcaagatacttgttcagatgttcaatggctaaggaagatttgccttgtgccttggccatagccacctttcttttgtgaattacctagacatcgagtttgacttacaacagttaacatttggaagtagcttgtgggtagtttcatgacgaaaaaatgcggaagcttacttgatcaagtggattatcctccaaaaggcttgtatatgctttttcagcctcttcccacattccctttgcttctagcagcagagcctccagcttgcctgaatatattaccaagatgcagctcagattggtatcaaggtaactaagaaactaggtgcctgtagagcccaactttcagtatagctagaaaacctctgagcacagatatgaacacccagaagacccaaaaatggcaaaataaacaaaaacttgtgagtacggacatgtgaagacacaaaacttacacatgtacaccacgtgaattcagcctgacgtagctggtatactttaaacttgataatatgttcttacttataacttgataatttgttcttactttagagaagcatatgcgagaataagtataaagaaaatggaaaggatgtggagtttatgtttcttgttcctaagttatcaaatcgtatgtggtttatccaaggaggctagagaaaggatacgagtaaaatttgatgtccaacaaagagtgaagaattgctcagtgtgtcaagggttgatattgacttaccaacacgtttgctctccggaaatttcttctttagaaccttgatgcaattctgcaaaaaagaaattgtcataacaaaagaattttcagaaaacaactcacatcacaatgcatccatgatacatagaatatatcaaaaatgcaagaaaactctagaaaagaggctcaaaccgaagaaatagcatacacctacagccctagataactgatgctttcaacaaaacgtgatcttaaaataggatcatgtagttttcaagttaccaattgaaattgtaagggaaattcacctgtgcaacaccgagagattgacagtccatagctgcaattgctacctgctcatacagggtccattctgcacaaataaaggaatacgctttgtattttagttttataaaacaaacataatgtgcaagcagctcttttagctaagacaacaaaaacaaatcgaactagattgagatactacaggtgcaaaaagtctttgcttaattatgactcttcatcagctaaaactatgtttaatttcccaactaggaatgaaacagtgaacatataaatccaagaataccagatttagcattgagcagatataacgtagatcaagtatcagtaagcactggaagtagaacaatatcaaactgaatttcaagtaatttcatttaaatgaaactcatgaattgaagcaattgagtggagcacgatttaggaaatcaacaaacaaagacactctcaatgagaaacacatcgaaatcaaggaactgaaaatcaacataccatctggaccaagagcggatcgctttcccgaatcgttcaagatcgagagaccatgcttgagcacaatctctgatcggcgaaccttgagcttacgaacgaggcacagatactcccaaacacctcctcctccattctcaacttgattctcgagttggtttaactgtatctcctccgttttcgtcaccatctctctctctccgatttgctctgaaccttatgaaatttgtggatctgttagtagtggaaggtcgatcaggaaagtctctttctacaaagaagacattgacatgaaccggttcggtttaatattcgcaccgatctggtttaaacttagagcatattgacgaacgaaacgctgcgttttaacaaaacatctgattcattggtatatcaatttggttgagaatatatttatcggtttgttgggattgaaatatcaataaccgggtcaggtcaatggggaacgaacggtgcgttttactgagtattcgatttcaatgtcgtcgccgttccggtgaagaaggcaatgaaattaagtagaactgtcttgtcttgtttgccgtctctgctaaaaccctactcgagcttgagctggacaacgaaaatagcgacgatagctacaaactttgaaggtatgaaaacagtagatgaagctgacgtgggcatctcctgttttatctcccagctccctggcttccgtggaatcctcaaacaaaggtcgtgagatcagtttacgtttttatgcttcttcttatacacaaacgttcttgttccatataggagaaaaattgaaactttttttctgtatttatgtttcgtagatacgcagactttattgttaatgaagtagatatggatggtaatgtggttcatttgacatccttggacttgcctcctgagatggtttgtctctctcctcatttcaataagctatgttttgtttcgattgtatcttttagttttgtttgtgccaatgcgttgttgtgtgttgttcaggctgtgaaggaggaggataaagcgaaaagttgtgataatgtaccccaaaattatacttctgcagttgagtctttcaaatctatttccagtgttactgatgcagagcgtttggaaatattgatcaatcaagtcacctcaggaactgatggtgaagtcttaccagttgttcttgatccaagttctgacaaatccaagagaacggtataggttttgattgcagagttacatatactgttgtcgacattagcttttgacttcttactagattttctttttcgtatactactatccaggctatccacaactttgttaaagagaatttcaagttcctagtgactgacactgtcgacggtcctgattctacttcaaaatgcatccgtgtgcgagtgaattcaggagccaataacaacagaggtaatagatcaaaaaaacgaaaggaaagaggcgataagccttttgatagcagaggttcagagcattggccagagcatgttggcaagtttctcaggtaatatctttaaatcaacatttatttgacattaaagttactatatattggacctagtacattagtctatcctgaaaaatggatacctgaactggatttcccactttagagatgtagattagcgtcttaaaattactgatacaataaaacgaaagggtgtattttatacatcataatctctgtagtgcttttattttattaatgcatttggacgttcaacctatgtgtcatttgatttatgagtcgtttaagttaataggttccatctttacaaggagaacaaagatacacaagaggccttgggattgattggaaagatgctaggcgttcaggtgtttcccatcttcttctatccatctataaaggggctgttttatctctagccattgtactttccttgataagctgtgtattgaaatggtttttgaatttacagccaaagtcattcggattctctggaacaaaagataagcggtctgtttctactcagcgtgtaagttatctgtacgtgttttctttgtaagatgagtttaatggttacaatacataataagagaattgggctttttaggtaactgtgttcaaacagcaagctagcaaattggctgcgcttaacaagagattgtttgggatcaaagttggtgacttctggtaagccaacatattcttgaatgttttcatttggacatatttatgtggtcttagtgttaatgatgattgctgccgttttccagcaatgtcaaagagggccttctccttgggcagctcatgggaaacagatttactatcacattaaggtaagaatataactggacatttataaaagaatctcttatgatcctctgtcaacttccagattctcttctttaagaaacattttgatcaaatttagctgagaaatgatgcaaagatctttattttcgtgaaatatcattatacgtataaattcttatattctcagaggagtggttgcggattctgaagaaactataaaacaatctgcagaatccttggggaaagatggcttcatcaactactttggcttgcaggtactattctcttgtcgagttgtaatgatatatatgttattttctctttttagtttttagtagctaattcaacttacacttttgcattgtggtatcgagtagtacttgaatattatcaaatagaaatattttcttatgaattttgtaattgtgtgacagcgttttggaagtggttcagtaccaacccaccatgtaggagctgcactattgaaaggagagtggaaagatgctgtagacatgattcttgatccaagagaaactgatatccttttacatgacctagtctcagctttaattgctaatccctcttaataccatatttggctctacgaaaataaaggacgcagcattgcatagtttttcttgactttaagattctttttacaaaggcatgtagtaaatgatgcccgggaatattacaaagaaactggtgacattgacgggactctaaggcaactaccgcgatacctcgttgctgaaagagccatagtaagttttaaactactcatgtattggtttctacaattgatgagtttccatgatgatcagttttaatcgggcgttttgaaacagctgcagtgtctgaagaaatgccctggtaactacctgcaggctcttaaaggcattcccagaactttgagaatgatgtaagcgctcgattctttaatatatctttagtaccttccggaacagtgttccttttgcgactggttatgacatgccaagccacagggcacaggcgcagatcaagttttttagcttactgtatatctgatccttatcatgcaggtatgtacatagttatcaaagctacttatggaacaatgcagcaagtctgcgcgtcaaaaattatggtacatcttggttgtttctttattaatcttgtgtcattctgtaatcttgtcgatggaggttttaactttcacccttttgttttgttgtctggcaggaaccagccaagttgtgttgggggacttggtaagtacaaaggtagatgctgcaaaaagaatggtcgacagtcttacctctgagcacaacgaaagcagcgaagaggcattggattgtgaccaggtagatgatactgctgttgtagatcttccagctgaaaggagtgaccttgttaaggttagtttttattgcgaacttcttctttttaggccgttcttagttgaaaacttttgctaccatcatctggtgtgaaattaccttcagattatgatgagctaatagaactttgggcttgaaattaatgatatttctttgttgtcttttttccgtattcgtatatgctttagcgcatttacattctcattgttatttgttaatactagcactattcatgtgtgatgttttcttttgtgttcttcaggttgtaagtatagaggatttggaagctggaacttactcgaccagtgacatcgtcctccctctacctgggtaagttgctggcagaattttccgacacaagtagatttcatattttacttcttgaaaccttaagacttttctttgtgcttcaacagttcaagagtcatctacccgtctaatgacattgcagaaatttatcatgatttggcaaagaaggtttgttaaagccaaattcaagtttgttctagacaaattaaactcccttattctcagtgtattctttctaaaatttacatctccgctgatgaatctttaaatttctgcttacattgttcaggacggtatcagcctaactgagagcattcacggtgtaaagtaaattccgataagcttttttcttgtagattcttatgcttgtatcactctgcatcaccagagcatctactttattctactaataacaagtattgtttcagggaattctcaataactagcatgactggtggttatagacgtgttttccagaaaccaatagactttgaatggtacgctatatgtatagttagagattcctccagttttgagatcaaacattatatggaagtagagactaatgttgtctgtaaattgctgcagggaattactgacttacactgacagcaataaaccattggcagagacggatctggacaggatacccatgaacaagccggtggagaaagttggatctactgaggaaattgaagatgaatcaatgaaatctgatactaacccacatgattctggtgaaaccaatttgaaagaccagacagatagcaatgaggctgaaaaagacactggaaatccagattctgagcagacacagatggcgcttaaaatggcactcactcttccatcttcttgttatgccacaatggcaatcagagaactattaaagacgtcaacttctgtaagtactcaaactgctgaatctcagaaattcctgaattcacttgaatttggtacttctaagtttacaaattaaagtcaaaaagaaatctcaacatctgaatactgctttcttctttaattgcaggttgcatatcacaagacacttaactagtgattaacatccgctcctcctggctagcacacactgcgtataaagccatttgctggttatattactctgtttcagacacttaactagtgattctatcttgtctattttaaacatgtgtacattcatgtatttgtgcggaagttcaggaaattttgtctgaaataagcaccaaaatagaattttggtaaccggccaagttttttctagaatttcaatgtatcagacaaagagggtccgctactcattaaagaagacaacctaggtagttaaactttgatacaattttcttgataaactgttaaaggtggaaaattttcaagtcacaacaggttagaattagaaatccgtctctcaatctcccagcttagtagtagtggtttccttgaagctcttggacaaccaaatcgctgtttctctgggtgaaactttgcctggaccaaatggtcttaataagacattgagctcatcgtacctctcatcttgaagcaaccttgcactgaattcaagcaatccctccaatgcctcggctcgttgctgataagagctaggatcaaatctttgtctccttacacccgacgaagccctgcttgatgctccagctgtcgcattttgatcagatgattcactcctgtcttccagatatgcatcttcttcatacaccgccttcataatcgctccttctctgttttggcctggttcaagagtaaatttgtcttttgtgattgagcagtctagtggtggctctggaggtggactgtaggaacctctagacgatgctttctttttcttcccacgcacaaccgggacaaaaggctcttcctcgtatgacgctaacggaaactcaatcttgtcaattcttggtgcgttcattgacacatcaggagaatttatctggtggagaaaactggttttcgaaatgtacagagagtctttgatttcttttgcaggttttcttgagctaggcatggaggctctacgtatcaaagcagctggttttcggtttttaagttgtgatgaaacaggaagctgcaacatataggaaccaccattcttttattctaatcaaagaatcggtaaaaccagtaaagaagagcattttaaatggatcacttacttgaccaaggtcactcctaggctgtctaggtctcacaggtgaggccgaagctctcactggtacatacctagaactcttagaagcctctgaagttctacgaacaaccgttccatcaccgcttgcatctgtagacaagtccacttgcctttcacgattcagatatgcgggcacagttttttttatggaagaaacagaatcttctaggttacccctaaacctgcttggaccaaagctatggcttttgccagcaggacgccttctctgttctggaaaactgtttctcctggcggattcagattctggccattgcgcaggtaacacattacttcctggatcattcactttcaaatgaatcttctggatatacggttgaagcagcggttgtctaagaagctcagcagcctacgcagaagaagagagatgaagttttactggtcaagtttgttcagtatcaggttgtgaccaaatacttaaggacataatcatatgacgtacacttggtctgagttctggatttttccggagcatactcttaacgagacctcggctgaagaaagcaagcacacaaactcagtaaactctaatagatctcacatttatacaaacaagatcctatagacttacaaggcagcagaatattgcgccggaagtggaggaacgattgatctgttaatcctgttgattagtccttgcatgtcctgcaaccatttgagacgccaagaaccattataaacatctgatcaacagtacctagaggaacgtaaatataggtttaagagcttacaaaagctttgaaagcaggtttcatagccgtcatctcatacatacaacatcctgaagaaaagaagataaagattcagatgaatatattcttttgttatctacagctaaaggttaagaatcttatccattgatgagaaacttgcctagcgaccaaatatcagacttggacccatagggtatatcagctagtagctcgggacacatgtagcttggtgttccaaccacctggtttttcaagaagggtaaagatcaaacctgagttcggaaaaaaatcatatgtaaagtattgaaggaaactataattactgaagacgcgaggtcatctgatgttaagactttagcgagtccaaaatcgcctgcggagatcatagagccgattttgttacatttagtcggtgttagtctgactaggaaaatgatatagtgtgacaaatttctttatcgtctcaccaaggcgtatatcttgatcctttgtcaaaaatatgttcgaacactggaaggataaaaataggttagttttgtatcagtatggcgatttttcaataaattgtgttggtctccggagatcataacgaaccttgacatctcgatggagaatgtgattggcatgcaagtattcaagagccaataagatctgaacaagccatttgcagagtttctgataacacaaaatgtattttttggagagagtcagaatttggagtatcaatgaccagaatttatcaaacatggctagcacaaacctcttcagtgaagtgtacgccgttggttttctttattgcttccgccctgtaatgcagaagaaacggaagaaacagaaaaaatcagtaagtgtatcagagagccttttctctagtcaaacaggtgaaaactgctgagaaggaataaacttacatgtctcctcctttgcaatagcctatgataatgcacacatagcatccctgatagcacacatccataaagacaatagagctggttatatcttcaatacttatgttcaggaaacgaaaagatatgtatagatgataccttttcaacccaagaatctttatattccacaatgaatggattatgtatctttgaaatcaactccatctacaaagagataacaggctatttgatctaactaatccaaatttgcaaatgaattggcttaacgaaagcgtaatgtgaatgttacaggacacagaagaaattagaagcaacctcttgatgagcagatcttcttgtcctaccagtctgccgagcaagccggattttcttcaaaacatacctttagaaagcaaatacagacgagagtcaaacattacagcgaattcaaattctcagaaaacatcattcttcacgcaatcctgtttaagggtaagtacgtacagtttcttctcatgtttatgtctcacaagaagagctgacccaaaggaaccttttccaatttgctcaagaacctcgtaattctccattgacaaactctgaaattcacctccttcttaatttcgtctataaaatctgaagccaaatgatgatacaagacacattgtaagatcaatatatccttaataaacattgttcttgtaagcaatacaaaaccgtacctttctggagattataactaaaatatcaaatagaatgagcaaaagtagtcaataaaacggaaaaggttaaactttctttcttcgattcttctaaaagttttgggactaaaacgacccaccaaccttaatgataattagccacgaacactaattattcttatgatgaaaaaacttggaaaaaaaaaagagagtaagataacccagtcgtaaaaatcgaatctttcctcataaaacatgcaagatttaagctttattggtgtccagtgttgtcaaaattaaacattttcggagaaaatctggaaaaatttacagattattttcctcgcattcacagagaaattaacagcccatcaaaattgagccagtcgataacacaacattattagctaaataaacaagaaaccgttacttggattattcaaaacttaaaataaggaaagggataagaaacctaaaacggcgtcgttgcgagattcaaatcggcagatttaggagaagaaaaacgaaggagaagaagaagaagaagtttgtagagaaaccagtttctgcatttcctgaaagaaactacagaacggcatcgtttccagagaaacagcaacggtagtgaagaagaggcattggaagaaaacgaatgagaagaggaagaaactggttcgccattagacctgctctcagaggaaaacgacagattttgctctcgatggaaaaataagactttgtattttcctctattatataaaaagaaattaagacaacaatatactttattatttatttaatgttatgcaatttaatatctgattcatccttttgtctgaaatgatgtgactttactttatttttattttattttatgaagtttttaacagaaaaaagcataaaatgacaagttcgtcttgggataatatatattattttttgtagttcgtgcattatgaattattaatactatttgaacaataattgattaggtttgcgttacccaaatttttatttaaatgttattgaattcttttgctatatagactaattttagcttttgagtatcacaatacgttggattgttttgtttgtcttgaaatatatgttgtctagcaatctcactaaatacgatgtccagaagcaagagtaccatcatcatcgtcgagcatctttgtttatgaattacgacctaaagtcttctttaaactaataatgcaatttgtatgaacaacgtttgcttgctttaggaagaaatggttgcttctatgaacaacgttttgaatgattattgattattgtataggcgaaaacaaaatttggaataatagtttgatgcttagatccactcatttacattaaacataggtaagcattgtgattaatatatttattgttatggatcgttatgaattttctaaactgtcattctcatggacaaataattcttcggcagtgtcaatctcacggtttaaagtcttatcgatttaaataattatgggaaagaataatacttatccatctaatccactcatgtgttgtgtcatttctttgagattagtaggtatgtattagtattacaggcatgtagttatgtgtatagcgttgtccgagatttttaaattgtactagtatacatttggttcaattacagttttattcgatttttttgaaaatgaaaaccgaattattatttatatccaaaaaaaacgaaatattttaattccaacgaaactcagttttctactctttttagatcgttctctattaataattcagtttagttcagctaaatgactctgaaatagacatacctatcattaactttatgcacaaaaatataaactttactggtgtcgatactcgatacattaacatataacatagtggccacccaacaacatttcgaaagattttgtctctcaagctcattggccgagaataatgtttaattacaaatgtaatagactaatacatgtttatgtacattattcattaccattgaccaatataaaatcgttacagacgaatatttctaattaattatttataatttattcatctttattattttcgttataggttttgttaagttttttcgtcttacttcacacccacttataccatcgccttgtccatgaaacaatttatgagacctttagtagtttagggcaaaggcaaaccgcgtgagcatattaaattatagtaaccatgtcaacgtgaaatctatttttctttttataaaaggtcaccaaattatagagagatgttcaaatccactactttgtaccttagaaatgtgcaatcatattgcagggatgttcattgttcaatcccatcaacttgtggctatatcctcgtcttgtcttttcaccgtggtcgtattatagaattttgaaactaaagatatagatagaatagcactccttttcttatgtagtcattgtttgttttttatatcgattaatctttcattttcccaaaatgtactataactaaagaaagataacttgtttacattaccaacaataggaatgagactatttgtaactaacatgttaggtctttatctgagaaaattctgactttgacctctttagttctaccggttgctaaaagaaaattaattgacctacatagtttttgttttagaaacaaaaaattcttttaacctttagcaaaacaaaattccattgtgttgttgttaatggagtgatcagtgattcattaaaagatcggaacaaaagttctagtacaacaagagggcccaaaaagcccaagattagaatttaaagcccaacagttttaaaaataaaagataaaaaatttcggattgtccccgaagttattccttttgctgctcttgacttgaaagttataaaccctcacgattcatccttaaaccctaagcctaaagcagaaacgcagaagccctgataatggcggatccgatgaaccatagcaccgggcatcaacaacagcagaagtaccgtcagtacaatccttaccaacaagtcaatcttccgtaccgtaagctctacgaactcccaacttctcctgagtttctcttcgaagaagaagctacgaaaaaacgcttaacatggggagagaacctcaccttcttcaccggttggggttattgcactggatctgttctcggagccttcaagggtacaattgcggggatgcgagccgccgaacgaggcgaatccctaaagatccgaactaatcggattttgaactccggtggactcgttgcaagacgcggcgggaattgcttaggatccgtagggttgatgtttgctgctatggagagcggtgttacgtatatgagagacggagacgacggttcgttgacaactgtgatcgctggtttagccactggtgtgctttacagagctgcttctggacctagatccgctgtggttgccggagctgtcggaggagttgcggctttggctgcagttgctggaagacgcatcgtcaagcgattcgttccaatctaatgaaagtttctcaatctctcaaggttagggtttaagaactagtttaaaggaggggcttttagatagtgaatcattggtactggatttagggcttatgaattcaatttccactgtataaaagttgacatttttattgatctaattgctcaatccgactcaactttttgctgattttgtcgaattcacgaaattgaaatgatctcacataaaaactcaattgataattttacaaaggagaaaaatttgtcaatcaaagaagaagagaaagattgaacttttaacctcacttggtcataacttcaacgccattctttccagcgataatgacagaagtagccattccgagaaacagaccatgctccaccactccttgaaacttcccaatctctttagccgcagcgaatccatccttcaaaggagtcttaaaatacaaatcaataatgtaattactgttatcagtcacataaggcttgccatcaccatcaactctaagctttgattcacatccaaattccttgaagaggtcttgcaatctaatcaaattaaagttccagcagaattgaacaacttccaccggcatagctaatccacttccaccgagtcctgtaacgagtttggtatcatcagccacaacaataaacttgtcagccacagcttccaccattttctcacggagaagagcacctccacgacctttgactaaatcaagattcggatctacctcgtctgctccgtcaatagcgagatcgattctcggatgtgtatctaacccaacaagaggaatccctaacgaccgtgcttgttcctccgttcgtttcgacgttgggataccgacaatatcgtagagttcaccggaagagagtagtttcccgatctgatcaacagcgaaagctgcggtggatccggttccgagccctagaaccatcccaggtttaattgcctccacagctttctccgccgcgagcttcttcaaatcgtcctgtgaaagcgcgacggattgagccttgacggagaatgaaacggaggttcgaggagaagagccagtgctgcgtagggcaatagaaggagtgcgtagcgtaaggtgagaagaggaaacgaaggataaggaagccattggagagagaggattgagaatggttggagaagaaataaaatgaaatcgaaaggtttggtttttgacttttgagtggaagaggaaggtttagtggcaagttatagagttttgtagttggtttgagggtagtattggaatactagttttaaggttgttgtatttgggttggtgaagataataacctgctaaaccaatcagagtgttaaatatacgatgtcgtttttgtttctttgagaacagagttatataaaaaccttttttggtttggtttcgtggagagtctaattattttcttccactttctcgatctttgagatttctttcaaaggaagaaaaaaaaaaaaactcgcgatgtccgccgaatcagctagccaaattcctaagggacaggttagttaacgaaactttgttggtttcgatggttttcttcaatgaggaattcaattcttgggtgggaagattatctagggttcttatctgttgttcgaatcttgatttgaagttttctgatgtgtctatatagttaatcgattctatctaagttttggttgttgtgtttgattatcaggttgatctactagattttattgactggtctggtgttgaatgtcttaaccaaagctcaagtcactctttgcccaatgctctcaagcaggtttgttattctcttatgttccatatctttatgtagttgtatgtctgtatacaagtttttgttattggtgagttcttgaaactgtttgtgtttgctatgattgtctatctgtaaaaaacttatgtgtgagtttatgagatttgatatagataattgagtacaaacttaggttttcgtggagtgatattgcgtgccagcctgcttttgaatttatgattacctgtttctattggtgttttatgacctgagaaggatttacttgttcgtgtagggatatagagaagatgaaggtttaaacttagagagtgatgctgatgaacaacttctcatctatattccttttaaccaagttatcaaactacattcctttgctatcaaaggccctgaagaggaaggtaaattgatgttctatattgaaagataagcatatagttgtttgttattttagtcttgcctacaagaattacttctttttactgaactggagatgggattttgatatgtgggggctgttacttgttagccagtgagattttaactttgtttgattctaacttttcttcaggtcctaaaactgtaaagtttttctcaaacaaagagcacatgtgcttcaggtaatgtgaatcgtttctaatttctacctaacaatatgatttatctcgataaaagcgccgactcacatcgtgtctaatgaataaaacagcaatgtcaatgattttcctccaagcgacaccgctgaactaactgaagaaaaccttaaggtatgatctttctgaaatctgactttattcattttgtgacatattctggtgatctatctatctgtattgagacctctgttcaaatccatttacagggaaaaccggtggtcctaaagtacgtaaagtttcagaatgttcgtaggtaaggatttaccatgttctgtgtctttgtatatatatattataatattaagcgcaatcacagctcgttctaacgatatctatttaattcaagctt

SEQ ID NO: 400 - DNA, 90112 bp, Arabidopsis thaliana
gaattcaccaaaatccaacagttcagatggagatctcagctcatttagtaatacttccggattgtgaggatagaggggacacaactgttattacattggaaaccctaagtcaagttttgagagcaaaaaacagtttgagaaattaaatacaactcgaaaccaaccttgtgactaccagcaagaaccacgaatgggactgcgtgcttttgtgctgcaagagcagccatgttgacaccaactggccctataactccaccattagccatcactgcatgagctccaattataacctgtgcattttcacatcattgcaaattatttagaagacaaggacaagaaaacataaagttgggtaggaatgaattgtaccatattcactcgagatatcatagcaaacactgcagagtcggtgatcacagttgtctgcaaacctctagctaccaattcttttgctaatagatggccctgatatctaatataatagaatagaaatggaagaaaatttgatacagctgagttagatggacaaatcagagagaatataaaaatgttgagagaaaacactaacaatggtaatgatgaaacatatagtaaagggagaaaccaaaccttggagcaccttcggcaacaaatacacgaaaagatctttttttctcctttgcagcacacagaaactcaagcactgttcttgagctacccagggttaggatcacctcactgaaaaaatagaatttaggcaatacaaaagtgatcatcacgaaaagacactgagaaacgaccattttagttctccatgtataacatgttaaagataaataatgctatagaaaagaaaagtacttttgatgtatatgctctatagcttgttcagcgatctgctcatgacaaccagcaatctcttgaataagttgattcactccttcgataacatcatgcttcagcttccgagttaacgaacttttatcggcagctaaacaaaagggtatattagaccattaatatcaaccaaaaacagtaaaatattcttgctgccatataaaattttgatctatggttcatttatgatataatcccaataaagtgagacgaaccacctaaaaaagtagactgataagaacatatatgattctcatttatctctataactcagcaacacaacacaaactcacaggtaattccagcaacaaaactacaggaaccagtaaaatagggtttgcttaaactctcccaagcctaaatgccctaaagcaaaaccaaaaccactgagacctaaatctgtctacgatagctaaaaagaaaaccttatatatcagcttgtaaaagagaatatgagccaacattattaaattccagcgataacacttatcttcaatggtttatcaaagacatcagtaaaacagacggcataaggacctactgaaaaaaaaacagtatgtgcaaaggagagccaaaggcatgaaaaaggtacatttacttttgctttcggaatcagcaccagatgaagatgtgtatggaacagttgcagattcaggagtgccctcgagaagcgtttgcaaagatggagggcgtaatgtactcctagctgcagctgcaacaactgctgcagacattgcaggaaacccaattcctttgcaattgtctacatcatcatcatcacttgcatccaacaagtccaaaccacccatagctgctgtagttagagaaagatcttcctcccttataatatgcaaaacccgtctaactacatttcccaccgcaagctctacaaaaatcatatccgtatatatcaattcctttcacagactaagagagaagaagcaaaaagagagtttaagaagacataccaacaggattagcagcgatcaattgctcaccaacagctttcacagcatcgataagagcggcagcttggttagcgtgaggcacccgctgatgcgaaattactgacctaagtagctctacggtgtatttggctgtagcctgtgagccctcaatcttactgtatgagataatgatccaatcagcaactatattcacaaagggttttacgaaattaagccagaaagaaagaatttaccgctttctgagcttgttaacaaattccaccaccgttgattgaacgtctggcatcttctttaaccgaaattaacgagaaacttgagaaaatgcgaaacctgaggcgttagatttcataaaccctaatcacgcgcgattcgcggcgggaggaagaagaaaatgggagaagcctaatgtggaagatgaggaagcaaaatggatatgcttaccagtgaatatgtgacggtggtggggcgataaggagatgaagtagcaaaaatcttccggcgagagagaaacggaattgataataggagaccagatttttacattcattcgctctagtgacaattgaaggttttttggtaggtctaacttttgggccgaaataaggtgctatttgggcctaaaataagcccaaaaatacaagcattatcaaagtatctccttccctttgcatagcttctttgggacccaaattttagttttgtttttgaggttttgagtcttttgacaaaaggagaaagatcaaattgaacaaggaaacttaacacataacataaaattgaacccaactacagtatctcttattccttataaccacaccacattcttattcagaaatcaaaatatttctaagcaagatctatacattgaactgaacaactgcctgagagattcggcagaaacatttctctatatatacactaccagaagatcatgaagcttttcttctaaccagacttgttcatcatatgcttttctttccttcttgttcttctgcattcccattctccttcagcttatatgcaccatctacatacaattccgtgtcccacaggaatgtcccaaacgccacagcctcgagaaccaaccgcttcagactcgaaaacgatgtcactatggtctcatcactctcttccgtgccaaaaagagccaaactttgcttctctatcagattccttgcctcctctgtccttggttttgcgcatctctgcaatgtctcgggatcaaagtctgagatgtaatgtctcagctgctgcttgttggagatctgtgcagtgcccgttgtgaatgagcatccaaagatgggacttttcagatatccgcttccatgaatatctgataaggaacactcaagctggtgccttagggaagctgatttcaagaagtaaccgtacaagatcgaggcagcatatactttcctgagatgcagtttctgtatctgcgttgttgcccaattgtcagtcacacatgagttgacccgtaatccgatgactgcgctaacgtgttctttgatgatctcaagggtatcgcagctgtaaattgactctaactcccagtcttttgaaggccagatctcgagtcttccattatagatgcatctggatagctttggaacaagagggactcttatctcggagtatttgtaaaagattaacatgtacattatgtcttggactgcagttttacagtagcgttccttgagttcagctatccttctgccaaccatggaatcagagtgttagtgttcgtaaaagagcagaagatagttgagaaaatgttcacaaacagagcataaaatggcctgagcaagtcagagagtttaacacaggcaagaaactaaaatatacggaaactatttaacgaactaagcaacaatgaaatgtaaaaaagcaaaaccagcccttatcaaacactaaaacaaaacttgcttcacaaggcagagtatgagaaagcacctgaagatcataactacagaattctcttgtttcaattcaaccatatcattagtgtgattctcaaatcatcataaactgataaacaccatcaaacaacttataatcaaactttacaagcttatgtgataaatactaataaaatactgatttgtggtcgattaaataagagtatgtaagtaatgatttacacatatttctttgtatgtttataattctacagctgtttacggatctttgaattgtgagagattagataaggaaaggtttcacggacctgtggagagaagcctcatcggaaccagagctgagagacatacgagctaaagcagcttccctatcatcagccagttgctttagctcatcagcggcggcgtaatgaaatagctgccgtttgtttagcaacacgcttctcagaaacctcccctgcgccgatcgtggctcaagcggcgcgtttagactgcttccaggctcacaccgactctgtcccgccgccgcaaccacaaccatcgaactatactggatcttcctcttcgccggaataacaaaaccaccgcctccatcgccgctctgtctcctggaacgcgacgggagaaactgaagcgccgtttgattagagagacaactatccattgatcagatttgagcaataaaaaaaacctagaaacagtggaaaaaccctaaaaggatctgtgatttgagagaatttcgggaattgtgaatgagagagagatgaagaagaatgatttagcggattagtgggagaagtggcgaagaatggataaggttgaagagagtatctttttgttactatattattccgtttctatttttacataaaaatatatttgcttctgttttttccaatgggctcctcaattcggtgtgtggttattgtttaactccaacttgacaagtgcatatatgtcattggctattatgtaaatcttattttcgttgaaatcatttctcattcacattttctttagctttgagccacctggaaatttcaaaaatcctagattcaaacggactcggctaaagtctaattttacaggattagtaaaacataaaacttggaagtttagtaaaccacaattaatagtataagagaatttgatgaataattgtttcaaagtagtatagtttacgtaaattagtttagtcgtatgattttcatattcattatagttaggtggttgatgttcacagatatttgtatattttatacacatgggttatagtttatgtatggtacacacagtctagctagattgatgaatcatgataccttatctcaattattggcaattttataaacaaatataagatgacccatcgtgttctctgcctcaggctctgagtgttaaaggattggaccgattggtggtcctctaaagccatcttagcttatttgtaaaaaacacccctacttttcgtcaatcatgcatcggctaacaatttgattatttatttccttcccttgacaaaagagttgcaaatttgaacccttattactcctgaacaagggttcattgtgtgttgattggtatatttattaggtttagtgtaacactagtctatcaaactacaatgatacttgaaatgtagttgtcatcgcttggatctaaattagaagttcaaatttgtattttagacagaagttgatactaattacaaatttcatcggcagtattttggattgatgtgtggtaaaaaaaaaagttagaatgaaaaagcagattcaagatttaactactttggttataatcaacttctggccgtaacaaatacatatatagtttccggctatcaaataatttatgtttgttttgttattttacaattgctttaaaaaatgttttcctgcttttgaaacatatacaaagtacaaccgcggagcgggtaagccatgagcccatgactcgtgcgaggttttgactttggatgacttctgaatcgtggtattgaatactttaattattaggataagtggaagctcctatcatagcggcgtgtacattgtttgctatcacttgggtggtccacagcctaatctagagttttaacccatcgttctaaaagatttcaaatgtgaatagatgagacaatggcatagatgtaagtctaagtgtatgttcgatatagttgttaaatatagttgttaaactaaactctttttttaaaaatatatatatattttgataaatctccatggtgatataacaatggtacaaacacaagttaaaccactaatttacgtgtcatagtctagttattactatgtttttttcataaatgtgtttttacttttttagtagatgtaattaaagctaattagcagaagaaaaaaagggaagcaaaagcgaacatatatatgagggcactatggagcacaacacatgtcgccatatatatataccagatattgaatgaaatgatacaatagagagtagaaggtgtacgaacgcatggttaaaatgaaaatttcgacatttgaaaacatggtcaaaacgatcaaataaataacaatctcatcactaattacatccaaagttgtacttggtaacaagaaagaagagcaatcaatcaaccaagagagaattgtgtaacaagtttttaccgcttatgaagttgaaatggagttgtgaatgtattgaccacatacgaatcctttatacatgcagaagagtaaagtagagacaacttcatggtttgtactttttagctgcaaaaggtcaaacattttctttgcaaagtgagaaagaaagctatgacgacatcctattctcacgagtcacgatgcagagaagagaatcatggcatccgattctcaatagttacatgtgctttttcaaaagtaagatcaattttgcaaacgtttctttttgttaacaaaagaagatcatatatttttgttcctctaataattttagcaataaaaacaaggaaacagtctgaaacttgcaaactttttcccattagaacattagtaattttattgttttgttcagcttaacacacataagagaccgattggcgattgcattacccgaaaacgaattaattatttcatgagttttcattattcgcgggaaaagaaaaataaaataaataaacagcaagttaaacactaatcacgtgccgtttctaaataatcaagctacgtaacatcgtacagagagtcacgtgctgtttccattaatgaaagccgtaacatcgtgcggttttccctcgtgcgtctcttctcgaccatgcattttcgtaactcgtaagtcttcacaatgtcacgctcggaaactcacatcgtccgtaacctggtttcaagcgacaacagagtacaaaaatttagcaaacccaaaatccaccaccggttttaacatcctgatatcactgaaccggaactaatttacgaatcggtttaattatgatttggattttggaatttaacttacttggatctttgatggtttgtgtagctaagccgttgaaggagcaagttcccccgatcttacgaaattgggcccaataagagctaaaggcgtaactggcgtgcaaaacggtcaaatcaggtttctgacatgggcctccgcgttgaatcgggtcacaggtattattcccctgtgagcaagcgtacgatagagcatcacctagctgagtccaattcgctcctttagccaccacgcaccaaatcttccctttgtacaggtcgttattctccggcgccggcaatgattccttgtactccgtcttccccgacaaatcaatcccgtaaacctgagtcccattcggatgtaaaagtccgaaatgccgctccgtacccggacccgttttctgattttcgttgtaaagtgcgaatacaaacgccggtagaacctttccgggtcgggcgggcgtacctacgggcgggtcagcggcgagtttcttgacaacattgcgattgtaagtagcggcgttgtaaatattcgctccaatttggtcgtagtcaccgttattgggccaacccgtttccgcgacccagatccgaatatccggatacccgactcgtttcatggcgaagacgaaagcgtcaatcatctgatcgaataggttgtggtatgtcagattcgaaaccggatccgtgacggtgacgttggtagattcgaaaatcgcgtaatcgagatccacatgggtcggatcttgtgcccacgcgaaatacgggtaaacatcaacgaataggaaagatttggtccggtttaagaattggagcatcggtttcataattaaaccggagatatcctcccgaaactcgccgctagacggaggaaacgaagattggagaacgtcggtggcgagtgtagtaccgactttgacttttttaacgccgagagactttaaggagcgttggatcttgcgcattgcgggaacgagtgaagatttgagctcagagtctggtaaagagaggatctcgttgccgacgaggaggtaacggatcttggtggttgggtaaaacgggaggatgttggatcggatccagtcgtcggagagtgatgcggatttggagatgttgacgaggagctcgtttgggaccatgacggagacggtaatgtcggtgccgtttaacgcggcgaggatttttgggttagcgtcgtagagtttgacgcgtttcgcgtttagggacttgatgaggttgactgagtcggacggtgacgggaggttgtttccgagctggccatagttgattcctggccggccggagaactttgctcctgtggaaaaaaaaacacagagaggattaacattttgaaggaaatagtaagccgccattaatgtaggtgattcgagcttacctgaaacagagatgagcagagacagagcaaagagatgtagaagaagactcatgttgataactcttctaggtctctctgaagcaagaaaagagagaagctttggtttgttgtttggagaaggagaagaagagagggagatggattgagtaatttggtaagaagaaagaagagtggagatatttaatggctagtgttacgtgttcctgtacaaaagcctgtttttgagtattaaatcaacaaaagatacaatgtattactaacttttgtatttactagttatattcaattttttaagtgtacgattactacgacgtcttctcttttttttttttttggttagtctgaatggttatattaattgaaaaactctgtttctagccaattcttaaaggttgttttaaaataaattatgttttagtgaaaaatattctttctgtttttggtgttaaatataattttaaatcttaaatgatataaactattgctaaaaacatttctcacattttgtctacaaaggttaataattaaagaaattttcatggtctaataattaacatgtcgttgagattatttatggacccttatgcttcgtgggaaatgaagtaggtggataaatgaagaattgttctctatggatttttttagttcaactctcgttgttaatgaacggaacaaaatattgacagattctcaggaaactctcgttgactgttcattgtagtactataaacgttgattcttagaaaaagtattaaaagtgtgattgtcggggctctaaacgagttggcacgaagagatttatgtgatgaaaaggttatgtaagttaagtagtacaagactgtttattggtgtcttaattctgaacaaatctcaacggtcgtcttgtaataaagaaactaaaaaagctttaatgagcgttgagaaaaacgaaaaagtaacgttctcatgctttaatgatgtgacgtgacattatgctctagatcccatttttcttataataatgattaaaaaatcataaatttctggtccggtaaaccgaccaacctatattcaaccggaataatctaaaatttataggtatgatagtttcgatttctgcgggtatagatacgtgtaccatgtacgagtcggatagagatatgaatatctgagagaagatttccataattattcggaaacaaaaaaaacgccattattagtccttctcggacaagctctctctttcttcttccttttatccttttatccttttttctttgtctctgagatttccactttgttagatattttctctgctggagtacattaatattaggtctgggtttatatctgtcaggaaatatttaatttagcatatcgtcttcaatgtaaattgtttgataagttgttttcaacagtgttttttatcaacgattttctttcaagcctgcaatgatttatctgggtttacgccctccgaggcaggaatacatgcaatagacttgttaggtcgaaacatatgtcatatgtttgtacattatacattttgcagtcggacaatttttaacatctgtgttttgactttttatggaaaaaaagttcctcgtataaattcaatcacaaaactcgaatcatttgtgcttgatctaagagagctgagggaaattgggccttaaatcatacaagagattgtcaaacagattctggtccttataacttaagatagaagaggcccaaaattagcataacaaatactaaaagatgaagacaacagatttaaaaaagaaatggtacatttcaattcagaagtgtgtatataaataaatgaacccttaggagagaaacaacaacaacaaagaatttgagagtggcattagagcaaagcttaaaatatgtttctgccacatcatccgaaacaaaaaaccaacaacctaacaacaatttttgcacaacaaaaaaaccaaggtttggcttaataccacaacaaagacaggtaggcaagtctttggaatcctctccgacggttgtttctgccattctctaatactatccgtaaaaaaaggaagaatctaaaccaacccaagtagagtataaaatcatgttcccaagacagaaactttaaatgaattgtttttatgtatctatctgtaacgaaaagacctgcgagtgagttggttcgttccttcctgacttgatctttgggtcttgttcgttcttctggtggtatggttcaatgtagttttaaactgagaaaaagggttatataaactaactgacctgttccccgatcaaatctagaccgacaataacgaacgtgattccttggaacaagaggaagtagaaatggatcccttgcgcagacaacaagcttctcaccgaggctgccaagaggataaacgcgagtgcgatttccgttctgtacagacggtttcttttggttttgccagctttctttgctgctcctagtttgctaagctcggtcagacctgaatcagaggatgatcgttggatggttgtggactcaaccaaagagccggactctgcgtatgcaaccagatccgcctcagaggatctccctagctttttggtgactacccactcgtaagaactatcaaacttgaacaaaccagagatcatggctccaaatttggtaactgacatggtgttttcgaaaaggagatacggaactatgaaagggaaggatcttggggctgggatgatgtttaagatggacatgatcccagggatatagcaaacaacccaagatggtaagttagcctctgggaagaacatcgttaatggaagaatgacgcagaagagcgtgaatgagtagaatggcaagataagcttccgtagcaagaagaagagaaatatcatatttgctttcttggcagcactcacctgtagtagagaaaaaaaaatgccagattaagatcagaccgagctatcaatatgaaaacttcataaacataaaatattctcaaggaagagcaagaggaaaacagtctcaatataattctcaatttcacctttgaccgaagaatgtcaaagaagcacaaacggaacagttgcattggacccgaatgccagcggtattgctgttttttatatgcctcataggactccggaagttcacagagacactgaggaaggaaaatacagctggatgatatcaaaaagttctgttttctaacatctggtaaataacaggaaacttctgagcaatttagttaacataagtaccttaacatcattcagataaatgaacttccatccacaaagatgcgcacgaacggcaatatccatgtcctcaacagttgttcgctccaaccatcccccgcaatcctcgagggctttgattctccaaacaccagcagttccattaaagccaaagaagttaataaaaacaccattgacctgctgttcaacttcaaagtggaaagacaaatttatgttctggagtcttgtaagcaagttttcgtctttgttcacaaaagcccaccgtgtttggaccaaggctaattcttcattaccctgaaaaaacacagaaactgtcgggtgagataggctagtgtggcaagcatattgtatcactgttctcagtatgtggttttcatcagattttcatcatagaacattagaaccactgcaatcaagacacacatatgtagtggaagacacgctatgccatatatgtcatttttcccactgccaacttctaaccgaataccattaagctcagggtataaccactttctaaagccaactggtcacctaacattctcctatgaacatgagacaaaaagacatgattgtttaccttaaaatgaggcacagttttcttcaagaaatccgcaggtggctggaaatctgcatcaaatatggcgacaaactcgtagtctttgacatattcacagttcattgcagctttaaggtttccagccttgtaaccagtacgtatgagacgatgtctatacactatccgaacacccctttgttgccatttttgtacttccgcttttataagctgctgaacatccaattcactggagtcatcaagaacctgaactagcattctttcccttggccagtcaagcatacacacagctcctatagattgttggtaaacctgcaagtgccacaaaccaaaatcaacgagatgagataacagaaccggaactgcaaggatttaaatacgaataagcaggcagatcaaagtaaacatatttaaaactatcaataagtttcagatatgaaaccgcataagaaacacttagagattacgggtcaacatagcaacaaatcctacctagagatgcttgattcccaattcaacttcaaacagctagatacaactacggattagagacctacatacatgttcttacctccttttcattgcacataggaatctgaacaatcaccattggataatcttccaatctaactccctctccaaccaatttagtcgggtactccatagatgcaacaggcttaatacggcggagcttgatccagaagcatccaagcacaagcaccagacggtcaaccgattgaatcaagaagagaactatacatacattggtcaagctctgaagcggtggcgcaaggtaagacgccctgatctccaaccaccaagcgtaaaccacctccacagcgacctcggcggaggcaacagagggaggtgtgaagtgccatcccttgaaataagcggcaagctcgaaacagagaagaagcacaacaacaacgagaaatcccttgattaaacggtacaatctagcggaggaagacacggatggaggattatcgttggcaatgcggcgattggcggtgcgaacaaggtaaaggaaagagttaccgatccagaggaaggaagatgcgagttgcttgaacttgaggaggtagagacgagagagctgacgaacggtacgagtccggatccgatccttatcagggtcaacggtggccggagtacggatttcaacggtgaggaatgcttcatcgtcgccggcgtaaagaacgtcgtgattgttcctatctcgttgcttgttccaccattgttgaaactcctcgttctgggagcgagacattcaacgaagaacaaaagaaggatctctctcgaagctgatgaaatcaggaatcgtcgatctgattagatctgagaatttgggagacaagcgcagagagaacacgattgggctaaacttactaacaatagatgacgtcgtctttcgtcccagtgtcttcctcccatttcttttcttttttctcttttttaaaatatacatctataaaattaatatttataagtgatttaattttttttgtcctcttgatttaattaatatcaattaggggatataattagagttaaatggttgtctagacgaatcatgtgttagatgcttaagagggtcttccattgacaaagagagtagttatgtgttttaagtttcttactcacccgctgattgcggtattaatctcaaatgatcctttaagcatatatgataataaacatagcatcgcgatctgcacgatgattttacttgcttacattttcatcaactctccaatcatacataccactacaatagagacagaaaaatagtattttctaattatttaatctaatatgatgaatagaaaatgggaacaatctaatatcctccatgaaattaaaatatatgatataaccatgccgtaacatttattttttttattattaaaaaaataaaatgtgagagaaaaaaaaaaaggaattgttagcgtgtgtttagttgggccgacaaataaagcaccacacaaagagctcactaaaattctacagattaaaaagttttagaactagcccatagcatatttaagattcgtaaatttagctttcacagtgcgtattgattgtgtggcccattctaacgaatattttttcaagcaggattaaacgaccaacgcagaagaagataagtgtgaaacggctatttttttttctttcaagtatgtgatccactcaaccccgtcaggaccaatgtatttgcaatttttcgagtatccggccggtctgcggtataattgtttatgatcatgtaagatattatcaacaacttgagatagatggtttttgattagacattaatttttgcttgattgataacttgttgcgggttctctttgctatagtaggtaaatagaaagagacgcttctctgttctatatagtttccatcaatcacggcgtgatccctacatcataatcctaattaatcaaatttggttttttgctcataaccactcatattagactttctaatgtatctttgttttctgaataactcccacaaagacaatggagaaaatgacagaacaccttacacagctggttaacactagcaacgatcaaatcatatatcaaatatgatctaacattgaaactgacgttaacgagttattaagacttgagagtgtatattgaaaaagtcaagcttagctaagatttgatgtttgtgaatatgctgtagtacctattatatttgttggaaatagtacatttgagcaaattacacacatgtaatttagcacaaagatagttgtcacgctatgtaactcctgccgaaaaaaactcaataccaactttttggtttcaatgttaaatcgtattccaaccaaaaactgcatactaacatttcatacgctttaacaaataattaaataccttttccaaaaataaataaggaaataatacacataaataaactacaaaatctcacctaacatgcagaagctatatagttttgataattgaaataagaaaatttacttagtatctatcaatttttgcaacacactgttgtttttccttcaccaaaaatgtgtattttctaggaatgatctgtccttgttagcttcttatcacatacaaactctttataagaaaaccgaattattttttcgttttcaagagtttgatgtttttttgttacaagaactgaatgggtttgataaaaacagtcttgttgttcggaagaattatagctatagtacttatagtggggttaaaacatacaatgatattaaatccaaacaagaaaagtttaaagaatctgataagaagaagaatagcggataacaacatgacaatacaattgagcaccacaaatgaatcggaaggataaaaagaagaagttatgtatatgaagatgattatagaaatgaattcgcatatggtgtggtccaattcaaatttcttgttatgtacacccatcaatccttttcttactttctatcctcgagacctttaaaacgccaatatttttgtaaaaatgcatatagtggttgatcaaagttcagctttcatgtgcgatggtacttggtttgatgaacctgcatatataatagtacaatttatacatatcatatctaaacggtcctgcctatataatgaaatggaaagaaaaaatatgatttaaatattcttaccttggttcaattcttggagacggttttgcgcaaaacccatatgaataatgctatgtaaatcatcttcggaaaatgttgaatactaaaaacaaaaccaaaaagggttaagaccgcttcaaattgaagagaaaaagaaaagaaaagtgatagaagaatgttttagaaaaggaaacctgagaaatagagtcagtgaaatgagcaagtgttggtaagtgagaaatgaagcttctagtttcagaagtttccaaagggtttattacgttattagaagaaatatcagggttcaattgcaaatttttgttgtgatgatcacccaataacgtttctgctgaagaatctaattgaagtacttgttgatgatgcattagattgttgcttgaaggaaatatctgtcagaaaacaaaagaaattagtttaaacaaacacacgattggttcacaaagacaaaaaagtaattattattacaataattgtcaattaaaattactataaatgttgtgacggtgacttacatccttagacaagagagcgtccatgttaaagtccagcctggtgttcactgacgataacttcatcgacaagaactgcaccatatttgaaattaaaattaagaaacaaaaattattcgaagtcgtgtagttgttttaaaaagtgattatgaaataatggaaagagtttaaagtagaccaataatctaatgagtaattacctcaacttgtcgttgcaatgattggacatagtttataatttcatccaacatcagtgcttttccagtaacctttaaaaagtaaatttgttattgctctaatcacaactatattagtacaactaaaaacgagttaattagttgtttaatcaaactctcaccttgttgcatccagggacaagatcttgaagcagcttcattctttcgcttattttctctcttcgaacctttttaatatcgaaatcacaacaacacattgaatacaaagcatgattaattcaactaatcaggacgtaattaaacattaagattaaaatcaataaatttggtaagaaaataggaaattgactgactcgttcggcgagactgtgactatcggtggcttggcctcgtcgagctctaacatgaatgtaatctttgtaaggatcaattgatttagttttgtctccattttcttctgattttttgcatctctttggatcagaatcttccttctcttcaatctcctgataatcaaactaaaattagtatttgtttaaaccaaacaaaaaatgggtttattcgaatgtgaagcttcattatgaacctttgatgatgaaactgcagaaggagaattctgcttggatttagtttttcttttccgggaaagttcaccggacgattcgccggcgggaacatgagacgcaagaggcttaaaaactgggctgcttgatacacgtggcattttctcattggttgtgatgggtggttcgttattaatcggaaacggcgagtttgttctgctgttaaaactccggctaccaaaacacgagaacctcgccgctctctcagcgaatcccgggtcgccggacagttctgccatcggcgtcgtcgttttcgtctccatcatacttccaggcggtggagagctcatcggagttgcgtaacacgagtttccattgctcgccgtaattccatagatatcgccgatattacccagtttcccgatgagctctctcataatgacattttctccacctactccgccaaccgaaaagtttgaatttgacggcgtaggagaagagacgagtgagctcagagccgaatcaaaaatgctctgttccgttgacttttcccaaaacagattgcgactgagacttggatccactggctgagtctccattgaaacccacttaagcatcgccgacgaagaagacggtgacgtcatcaccggcggatgcgaaactcctgcattcataaacagctcgttctccatgaagctcctcaattctacggtacggactacggaagatgaaaatcaaaagtatatattcgaattcaggtaaaaaaatcctaaagtaagcgtgtgattaattaaaaccagatcaaagattcgtccaatagaagataaaagtttgtaattttcttaaagtgaagaacagaggaaaagggaagctcgttaatgggcagtaatgaggagtttatatagttgtttaataaatttatattaataaattgcaccaatcaatgactttctttctaataaatggacaaaaaataaagtaaatattaaataaaaatttctgtgtcggaccggaccgtaacgagaggaggactttcgacgttaacacgatatcgctaatgaaacgtctttaccaaatgagataattggagaaacaagcttctaaatacagtataaaataagtgtgaaactattaaatagtacgaaacaatcttaacgttctttaagatgtcaaaaacaaatctggtactaatatcaaaaaccggtaaacgaataacaaactacttttgacgaatgggttcccttgtcgaagttccttaaccatcgccggttcttttgttgatttgtatgtcaacatgtttaactctttctttgttcgaatcaagaaaaagacaaggaaaaatcttgattttataacatgtttcaagtaggcagtttcaatgaggcaatttggtttgttcatgcatgtaagtgagctaaatttttagttagatggttttatgttcgttcttgcatcatgatagtctcttggaaattactctcatatggtcatgtggatcatacggtttggttagaagtagaacttagaaggatttgccgttctgtatagattagtgcttgacttggtgagatttctaaatttctaattgaccatattacgtatattgctagtcgtctaagaataagaaaatcaacataatacatcaatagatatatctaatatttaagtttacagaaagatacaaatagatgtccgagtttaattgaaaagttcattggtttcaaacatgtcccagatcataggtttacgtttgtggtgacacgtttcaataacatatcaccgactttttacgtaagaaaaatatgacatatactagtataagataaccttaagcgccgtcaaaaggataatatacacgttcggcttttctcccatacagctacattcaaattcggatcagatctcggatcacacaaataatacttcccacgcctacgtcacgcatgatgaaaatagtggtcaatagcccaacatcgactataaacactacagagattattatttagctgggcttttaacttctaacataagtatgggctttcaacttataagcccacttacgaatttaaacgggatccatcctcgggagagaattggaatgggctcccctataatatcaattatctacaacttttttttgctaaaaattatctacaacttataacatcgatttagaatttgataaatagttaaatacttataaatctctggatcgggtaatttaatgatgaatagataacatcgatattttcatattttggtgacaatattcgcataattgttcgaaagaataaaatatatacatcaccacttacacaaacaattatgtaggtgatgcataattgtttgccaaaattcctgtttgtaatacattatgtacaacatatgttattttctttacccaaaaaaaaaaaaatacattatatataacatggtttaggaaagatgcttgattttcgtttaaaccggctttttggcattttatcccaagtactttgttctaagacgagcagaactttcacgtattcattagaattatgaataatccattgactcttcgcgttcagataaaatttcaatagcatacaaaaaaacggatttgggtcttttattaataatactactactatactgcatggggcgacgagcataaatagacaccaaacaacaaaacccacttgtcatgttcttgttcttacaaaagattattagatattgtcacttgttcgttacctcattctaaagaactcttcacacctcccaaatcccaacttttccttccattaaattaagaaaagttgttcggtcaggttctgtttcactcgaatatgagtttcagttggtgtattttatcccctcttcacttttgatgttggaaaaaaaaactcgaaaccttccaagtaaggaaaaacttatgatcattagtctaaatcaatgatgattgtcttataatacaacacaaatgttagccttcttgtttgcttgagctgatgagctctatgatgttccaattaattgattttgtttcgaaaacagcaattgcaatggaagacgatttatgtttgagactaacaaaattggaaaaactccgtcatcggttaaaataccatttgaagtaagttttggtgcatgcttagtcgacaatgactttattatatagtacttgttgttctctcactctcccacgaaattgcttgtttcataatatcgtggacctggactggagagtatacctcattcatatcttaagttcaaccaccaattaggaccgagtctttaatggacttgttctccatttcagccacaattttcttgtatcacaaaacggatcattaattatgcttggcataaaacaagattattggtaattttaaaaagaattttaaaaattacagagacgctgctacacctttccctttcatgaagagccaaaagaaatggattaaatcaagaaaagaacaggatagggagacaaaggtgaaaggctctttggttggttcttggccctacgcttcctttcgcaatcatctatctctcgacctatttggcccccaccataaatcatatatattcccattgtgtttcctctctgtcacgtgtcctcttttcatgtaaattctatctttatctttctttccttgttcatggataacccttgtttttcttgacaaaaaaaaaagaagaaggataacccttatttcctatcatccaaatctgtttgcaagacaaactgataaattacttctggttgagtttttttaaaaaaaataaaaaattaatctagaaataaattatatagtttttaaccatttaaaagttttacattgcttgacataaatatccggtttctaaaaatcaatagaagtaattgattagtgtaaatcttgaatattgttttcaaaattgaagtcaaataaatcaatgcattgttttcaaataaaccagaagatattgatgttttgggtcaaatggaaccatgctacgcctgggtcatggagttggtagtttttattaataaagaaaaaacacatatctccatctatatcttttaaataagttttgtacagttgtataatcaagattgtattcgtttaatgttctttaaaacgaaatgcttacaagaaaccaaagaaaaaaattatttgcaagaaatttctatcatgcaaattatagtacataaaatcatagtaaaatattaggactgtaaaatttaaatgaaagcatgtaagactttaactttgtatgtgtttacagcccatctcatgacacgtggatgtcacatctatcttctatgagaaacctcaaaccttcctgggccagcagcatccagaaactactccaactagtaaacaagagagagtgtagtgcatgcagttgttagatgaacattgaatgtatgccacgaaatgacatgtacatttacttagagatagtacgaaatatcattaaccatacatttttgaacttagctaatatattgttaattgatatcacgttatacattcgttagccatgctaaacctgcaattgttttatggtccctttgaagggtcgtcggtggttggtctatccagcccaaaatccagcaatccgctatgtaaaaaggtaatctcttatttaagtgaacagtttatattatacgtacgactatgttcctacgtattaaattctaaagaatgaaagcgtagaaactgtaaaatgcgaataaaaacccgttgcctgttgggatatatatgcctttgtttgcctaacccatcgggccaaaagtcgtcatgatcattagtaaccaagaagtggtatatcctccggttctacttttccccattattacgtgtctttttataatatgtacttacattcgagatttatttaattattttattcatattaacaatataaataacttaagcttctcttcgaatattcggagcccaactcctctctcttcacgcatttctcgttgtcaaagacaaagttctctccttttataaacacccatctccacctcctctctcttattcaaacttctttgagaaaattcgagctaagtgtttttataatatatacattctctgatatgggtttctctagagcaaaacgtgtcactgatccacttgcagaagaggttagggctcgtctcgttggatgcagctttagcagcggcagcgaacataccggcgacggaattgaagactacgaagacgacgactcgccttgtctctctgatctagtacaagggttcttggaagatgaagttgatacagttgatgatgagtcatgctggtgtgatcaagattctggttccgactcggattctgactcggaacttggcgagctccctgactttgccgacgatatcgccaagcttctgaggaactctctcagggaagattcatacggacgaacggtgctggtacatgtggcgagagcgatggaaatgttgtcgtctctcggatctcagcccgaacagcgtgccgttttccagcgtaaggtcatgtctcttcttagagaactcggccacaatgcggccatctgcaaaactaaatggaaatcctccggcggactcaccgccggtaaccatgagttcatcgacgtcgtgtatacaccttccgcctcgtctcagtccgtccgtttcatcgtcgatttagatttctcgtcgcggtttcaaatcgcgaggccaacttcacagtacgcgcgtgtgcttcaatcgcttccggcggttttcgtcggaaagggggatgatctgaagcggatcttgcgtctcgtgtgtgacgccgcgaggatttctcttaggaaccgcgggctgacgcttccgccgtggaggaagaatcgttatatgcagacgcggtggcttggtccttacaaacgcaccaccaacttaacgccgtcaacttccggtgtagacaccgtcatgtgtcgtgccatcggtttcgataatgccgtcggaggccgtctatttgtgcgaacacgataaaaactagaccaaaaagaccacgtgtcatttttaacttgattttttccatatacgttctagagaataataattcattatttacatttctcatttgaaattattaaaataaaaaaatctgataacaaaaacaaacaaattaaagccaagaaaaatccagattttacgatgaagaaagaattctacgcggaaaatgaacatcgtcaagaaaacacacaaggttcagagaaattatcgagtgcgacaggaatatagataagactttaatttacagccgttcgatatgatccaagagtaagatccaaaggttaaaaacttgagaagacagatcaaatggacgtgaagatttgaagtagaggataatgttttatatacaaattgttatgtgtcgacgtggaagtaacacgtaacgtagttctctctcgcgtgcattgaatgtgacttggcgtaacaagtcaggtccaggcctaggtgcatgggtttgtcgtctagtttcgaccacacctgataaaagcctttaggagagagaataaacaaaaattggagcacgtggtctagataaggtttattaatatttctacatttgtttttctcttttggttttatgcgaatattcggtttttctttttcagaccagattttgctatccacaactgacctaatccttactgtctttgattttattaacttcgatttatatccatcgttaattataattaaaataaagttattcctgcttgtatttaattaatgattctattacgacggtccagttatgcattaattaatcatgtgatgctgcaaatcgaatggtataattcccgagaaagatattataagtaggtctcaaagatcacgactcatgagtcgaacgagtcattgcataaagttagtcggcattgatctcatctactactatatgataataatttgtttattgacctagctagtcaaattttcaaacgttgccgaggcctatttttatattactatactacactttaccgagaactaattttatattactactaaaccaaaacaggttatgtataatctcgttgataaacacaaataaaaaatccaagttgatagaattatggatgaaattattgttttcgatgatacaaacgatggaaatatataaattattctttaactaatgaaattcgatcgtttttcagatttacttcttgtactgtacaatgctgattgtataactatgtaaatgtttggtgtagtgtagagatcgtagtgcgtgcacatgtacgtatagaaaactaaggtcgtatttctgatctttaatcgctgatttcagatcgattatttcttttgtttatctatttgttctctctatggcgaacacgcaacatgacgaataaaagaggaaaaatcagagttagagaatcgtcttacgatctcagagcatatcaatcaagttaatttattcccatatatgacaaatcttgtgtcaacaccaaatcaaatgtgttttcgataggacttaactagttttctcaacagttctttattttagtttttgtatatgcagattttatttcgcagcgttaaaagtctttttgttcaaacactcttcagaccacttgaggtttgcatattgttttgtgaaatgaacgaagcaattatgtaaactccctcattactcttttgaagaataataataataataaaaagatattgattcctcggttatctacctcttaaaagacctaaacagcaaaatacgataggttgggtgtgtgaccaaaaaaggaaaagacgaacgaagaagtaagaaaggaatattaaaaaaagaaggaaaaattaaagaaatggcctttgagagaattgaagtggcccaatgagggatggagcagtcaagtgtggggtctctctcacctctccacgtttttcgtctcttcgcttcccttcgccttctttgctctttagtacgtgattttttgggactctttttttttttcgtttattcataatttaatattattctacttataatgattctcttaggaaacaaacgaaagagcgatggatatactatttattttattaaatattctatgtaaattaagttgcatgcactcaacactattcaaggccagccaaagcggattaggatatatttgttgtcttcaaagggagaaataaaataaattggatcttaatttatagttctatttgctaagattggctagtggcttcaacgaactgtgcccatgcctgcaattggccacggactgagcagatgttgtggacgtaacgtataccacttttaaaccacaaaataaattaatgtgagcatcggttactaaacgaaatcaaatgggagattaggatacatctttacaaaattaaaagatgatttgaagttcctttttattgcgtttactgctttaggcattcctagtatagatgaagatgttcagacttgataaattattcaagttctaaaacattttatgcatacaattaacgacaatcacgcccatctatacatgcaaacaatggtttatttctactagattttcgatttttaagttacatatttagagaaattgtgtgtgtataaatatatgaattgaaagccacgttttcctatttcacaacgctgattacgtaaggtacaaggtgaagatgatatagaaagcataacacgaaggatgactggatgagatttgatcgttcagacttgaggcttttttctttcatttcattgaagtagatatgtggctttcaataaccaaagtatgggatccccattctctagggcttgctttgacaagaaactgggcctcatggtcaagtttttatcctatttaagggttcaaagtcccccatactcaacggatctcaccttttggatttacatctattggttttattaggctttacacgtttttgttttcaatgggcctattgaattcattcataaaaggattcatgagaggagaatctttatcctcactaatgaatagaagcataaacattcgcatctttgttttgttaaattgagaactctctatctctagtacattgttcttatgctacagagttaccatttgattatacatttaagatgatatataaaattctattgaatattcaatgtcaactaagttgcatacactcaacattttcaagcaagccaaagtaaagtttatccaaccatctatatggagtatgataaaataaagttttttgtgtacgtttaattaaatgagaaactttagttttatttggaacaatatcataaacgtactaagtagtaagattaagaacatataaaggttgctaattagtaaaacaaaacatatcggttgtgtgtgacaaaagaaacatacgtgtcaaatgggcctctttcatatatgttccacataacatgataacattaatatgataattattttatttctttcaattattggtcttgtcttctatcttacaacactttaattggcttccaaatacgtccaaaccccattaatgatcttctgtactctatatatatgttttttttaatcgaaaaagtctttaatgtatgaactaaaactgaaagatacgaaccaagaatggttattgtttcatattcagaaatttttatcagaaatattttcgattctcatgtatatatggactgaaaaatcactatacaccaaaaaatagcttgtacccatgaatttcgacgtacattcaacattatttcaaattgaatcttccatcattttgaactgcatgttggaatatcaacattacgtttttttcaaaaaagaaaagaatatcaacattccgccgacaaaacaatagggcgagaggaagtggagaagtttgagaattcaaacacatacatatataacatcaaggatatttcgctataaaaaacactaaaaatatcccaagcataaatatataatatgtccagtttagtgtccacatatatgttttatgttaatatattttgacaatttgacatttctttttaatgttaacgtacaccacaccttacatgccaacaactcataatttcatgaattttctctgtgtaatttcatctgtagattaccaaactcactgcattgtgaagaaaataacaaagattcatcaattttctcttgaatttaaccttgtaccaaaaaaaaaaatattttctttcagaagattcagtttgtttttttcaaacttttggaaatgacatgttcaagataagagtgttattatcacacaatcaaaacttaaaggaaaaaaaaacagaaacaaagataataatttgagaaagcagagatgtctagcaagcagagaaaaaaaacgacagttcgaagataacgagggcattagaaagggacacgtgggttagagggtggtcctacgtaaactgattttttatcagcagtccagcttggcacttgtgagattctcttctgtgtttgcagatgagtggtgcccacttctcagaaataatagatattattcatacacgtgtctatttcaaaatgccactcaataatagttggtctactaacaacttcaaatttgagaattgagttgacactattctaacctcaacactttgtatcgttgtatatgaacatcgatcacccactcttatggatggtggttaaataaaccgaagtacaatagtatttttttttataaaaaaaatccatacaaatttaaacaaattcaataaatgtactaataattttagtttgaagttctaacaattaacaatgtagacaaagtgccaagacaaattccgtggccaatatatataacttggtttagttaaaacatttgttggaattaaaacatattttcaaaatttcatgttttggtggaagaagtcgttttcaccttttaaatttgtttcagacatggagtgatgtgtcatcttgtttaatattattgtctacagaatgttactaaaaggtgaaaaccaaatcttgataaagaagttaattataaaacaaaatcttccggttacatttttttggtttttttgaatgttatagatttggtcaactctcttaattcatccaatcacgcgtcgaaagctataataacacttggttgcttttttttttttaatacaattttgtttttaaaacgtttagaacaaaaataaaaagaagaaaaagaaagagtgaaaaacggcaggggtaaaaacgtcaaagaagaaatagagagagagagtgaagaggagtacaacagaatccacgcggaaagacagctgttcccatgttggaataactgtgcgggtcccactttcattacactcactcctctcgcacatcttctaattttcgccgccgttaccgtctttggaattttttttggtttaccacactaatgttacatttttcgttagagatgattttgttttttgattacaacctcctacgacgtttgagttattgagattacttttataaatttccttactctgtttctttgggtcaacaattcaaacaatgatggtaatggagtgatcaattgacaaaaaaaaaacacgaatcaaacaatgatcgattatataaagctgttatggtctaataactgaataataaaatcatcataagtaaggaaccaaattcgaatactcgcaataaaccaataatagtaatttagtggataaaataatagttatgggttcggtgtcttaaagatttgagtttgatcatcgtaattcgtaaacctttgaaacattttctgtttttttcacaaacttttgggaatatttgttttggcttgacaaactctccaaatagctctttcgtcgtttaaaatctcttagttacaaaacaatgtattgaggtttcgaactcccaaaaccaaacacaagggaaagatgaaaaccattaggccgatcaattactattaagttataactagctaaattaccaataacgtgtatggatttatacccaaaaaaataagtaaacgtgtatgagtctacgagacaaatcgtgtcggctgtattttgacaccttagtcgcgaggtaggtcatacgtgctgcattattaaattcttaattttggtcgaattaattagtaaatactcctaaataatgacgtggcaaattcggtgcaggccacaattctattatagtgaagcactagagtacaacaacaacacttgtgcctcttcttctctcttcctcatatttattactctctctttcacaaacacacagaaaataaataaataaaattaattaatgtgagaaaatcaattcaaaaatttggacatacgtatcatctgagagaagaagggtttggtgaataccggcgggtggaaccgacggcgatggcgaagaccggtgttttcgattcggatccgacggcgattgctaaagccaaggaactgaagcgtgagatgaagaagttgctgattaagatcgatgacgaagatgatttgggtgttcagacgattgatcagttacaggacgctttgtctgcgttgagagaagcgacgatgaggaagatggcgaaatcttcctcgttagagatgctcgagactgtgtcttgtcctgaggagtttcgttgtcctctctctaatgagcttatgagggatcccgtcgttttggcttctggtcaggtttgtgaacgtcgcatttcgattcaattcttcttcttctagggttttgaattttgctgtttctgtgttaggtgactgaaaattttggatttttgggggaattttgattggcttgaaactttttcatctgttttctcgacccgactgagagaatccgactcaggtttcataaagttcttgttttgtcggtagtttcggtaatgattttcgaaacgatgaaatctggagattttatcatgtaaatgaaaaaagtgatttttagaggataattatgtgttccttagcttgtttaataaatctggaaagcatataactaaaaatttatatatttgtgtgtgattttgcagacatacgacaagttatttatccagaaatggttgagctcagggaacagaacatgtcccaagactcagcaagttctgcctcacacggctttaacacctaatctcttaatccgtgaaatgatctcgaaatggtgcaagaagaacgggcttgagacgaagagccaatatcatcccaaccttgtaaatgaagatgaaactgtgacaagatcagatcgtgagattttcaattccttgctctgtaaagtctcttcttcgaaccttcaagatcaaaaatcagctgccaaggagctaagacttctgaccaggaaaggcactgagttccgagctctttttggcgaatctccggatgagatcaccaggttggtgaatcccttgttacacgggtcaaacccagatgagaagcttcaagaagatgtggttacaacattgttgaacatatcaatacatgatgacagcaacaagaagctcgtctgcgaaaatcctaatgtgattcctctccttatcgatgcattgaggcgtggaacagtcgccacgagaagcaatgcagctgcagcgatcttcactctgtcagctctcgattcaaacaaagtacttatagggaagtccggaatcctgaaaccgcttatcgatctcctagaagaagggaatccattagctatcaaagacgtagctgcagcgatcttcactctttgtatagcccatgagaacaggagtagagctgtgagagacggagctgttagggttttaggtaagaaaatctcgaatgggttgtacgttgatgagcttttagctatattggcaatgcttgttactcactggaaggctgtggaggaattgggtgagctcggtggggtttcatggttgctgaagataactcgagagagcgagtgcaagcgaaacaaagagaatgcgatagtgatactgcatactatatgtttcagcgacaggacaaagtggaaggagatcaaagaagaggagaatgctcatggaacgataacaaagctttcgcgtgaaggaacttcaagggcgcagaggaaagcaaacgggatattggacagactgagaaaagctatgaatctcactcatacagcctgagaaaagccttgaaatctgcaatgtaaattacctaaaatcttgtttcttttttttactttatttggctgtaagaatttttgtaaattattcatatctttaggatctgaatggttattggttttcgtatgtgagatgtaagtagaaatctgtgtgaatagtttttgcgtttgatgtttctggagaaatcaatcaataaaatcaatgttggtggctttattcagctgtgaaagccttggtcaacaagtaacagtgtgtagcttttcgtctgtttctgtgtataaataagtagattattaaaaatacatagaaaggctgtcatgtcgtgttcctcacatcactgataaaccacaaagcaaatcaatctaattccactctctctggaaaaagagtttattacagagtcacgagttttccattgatgtgattttttctctatgtaatgtaacgtgacgatgtgattcctattgtcgtgttagaaaaaaacagtacttttaagtttatttatatataaataaatactcatcaaagcttataaataaatttcgactatcactgatgaattataagttttgttagaaaacataacggagtagttttgtaatatatttctaaaaaatgttctagacaaggcaagaagcatgtaagtaatgataaaaatcacatgtatttggttggttggattgcttggaagttagaattgaatcacgaaattgctaaaactcgtgattcgtaataattacaggtcaacatatcgtgagaaagttgaaaaaatggaatatttaatagagaggatagaatatggattcgtcctaaaccactctttggtgttattcctcaccaaactttcacagaaaagccaagaaaagaaagaatttgatgctttctttttaactttttatccccaagaagtaacgtttacaattcattggatacaaaaaaagaaataaatcccataaaggaagaaaaagaatcgtaataatccacaaccacaatggtgggtttaccttttatgtgtccccagtggaaatcatatagataaagaaaatagtagttttatttctatttaaaagaccccaagatttacgccttattaggcagaattcattcaatactttgaataccttatgatggcccatgtcttttgctttctttcaactttgatgaacattcaactaaatcattgtttttctacactattgcatgacaactttttgtttttatattgaattttcaggctttcagttttattttagatgattaatcacacaatccagatttttttcatggcacagaaccggagtggtccaagaaggtttcaaaaaatacttaagcatgccttggactacatcctaatgagatacaattcatcaatcttgttgacgtcagagaactgcatctaaatctgtctgttattgggcttttctcaatgataaacaatatctgtatgtatgttattgggctttcctcaatagtaaataaattctgtatgtgtgttatataggctaagccatatggccaatgtgtacagagtgcacaaaaaaacattgtaatatatacacagggcagagaatcttacactgaaaacatcggcaacaacaaacacaaatgtgaaaaaaggtaaacgcacccatctgttttgttcggtcacctgagtagttaacctcaatttctcatccgcttcattgtgtttatgttaatccccatttcgatcaacaacccatcttgtaagcccagacgtgtttttctagatatgctgccactgcctctttgatagccagatttggaacgagattagccgggtcgattttttcacgagttataggatcaaacttccccacctatcaagtggtgtaaacgatcaaaccttaacaggaatgaggaatattttttatagagattaaggctacaagaaaagagcgatgataatgcaaaccttcttgagatgttcaaggattgctgctctttcatatgtaaccccacttggagaaattacaggatctcggaaaatctcaagagttatattgcaacataaataatctggcacctgaaaagaaaaaccagaaatgtatttgacctcaaatataaatgaacgatgggtcttaaaagcttttaaagaaaatttaatgcacctcagttggtttatcttcttctgcagctttcttaaacactcgttcaagagctttcaaacgctcagtatgggcagtatatgcttcgtctgaggactcttctgttcgagacatatctaaagcacgttgttgattaagagcagcctcacaagtttccctaacacaaacatgaatagttccataaagccacaaaagcacagttccaagtcgaatgatagcactggattaagaaagttacagaacctacttcaaactattcagttcccatgaccgcattgcagaaaccagttcccactccatgtattttgctttagaaagctcttcccatatttcttctaccatatatcctgttggattcgagcatcttccaagatctaaagcctatatgaaacgtagctacatgaagttaacaggaaacaggtatcaaaccaaaatttgtttgcagtatttgatggcataaacaaaccaacccatctctagtgatttttctaactaaaacaagtgtccacagtatccacttagacatctttcaaaaggaaaaagatggagattcaagtggtgcctcacatcttcattaagatgcttggaaactacactacttaggtctcaacgttacgacttaaacaatcatgtccactgataaattttacagaaaaaagcttaggactaacaaagatccttaccctttgcaattctttgactccattagtaaattctttcttctgcaataatgcaagtcctagcatgtagtgtgcctgccacagaacataattgtaaaatcctcatatgatggagaagaaaggatcaaagaaggccaagaaaagataaaacaaaacaaaaaacttgacatattccatacatagcacaccaagcaaaagaattccatttagatataatcaaaagagtcaaaccttgacggaattgtggacaagctgaatagctttgcgacaatcctcttcaaccttagtccaatccctaaatttgatgcaagcaaagaagccaaacatgaaccataaagtatttgggcattaggattgcctaatcagaagtatgtataaaatttgcttgacagaacaatactcactttcgcttcatgtggcaaagtgctcgattggtccaataagcaggaacatttggagacaaagctattgcctactcaattacacaaaaaaaaaatgataagaaaaaccactacaattgaataagcctgaagtttcttgatgacttataacgatgagcacataaaagattcataaattccatcaaatgtctattctcgaattgtacactccatcaaaacctaatttggatgcaattaagttctgattcacaaacgaattgtccaatttcgaaattataatcaagggtttattactctacgcagatctcaatcaaaatctcggaaaacacaaaaccctaacgatgaaattgagagaaggagagtgagaaccatgtacctcggtataagcatcaatggcagcaccaaaacgttctttcttaaagcaattgtttccgtcttcctttaaccgctccgccatggcggaagccacgcctgtaaccatatctacggcaccccagaaaaccaagtctttatcctttccaacactcctctgtaacttgtgcgacggcgcgtcccggtgcgtttcagaagagaagtagccgcgaaatttctcgatgaaaggagagagaaaagtaagcaaaagggaattttaaatgaatcggttatcgaaagagattagtctctttaccgggtcagctcgatgagacttggatcataatccggatcttatagtcattctttttgtttactaccataaaccggtcattgggttaattgtaaattatttatacaactaggattaaacccgcggtttcccgtcgcgcgaaggcttttataaattttttattaaataaattagtgtgtgttatattaaaaaatagtaacatatatttagtttttttaaaactggtataaataatgattggaatcttttattagtatggagactatttactgattagaatcatgtattttattgtgtttaaagttgtgtatcaattactaaatgtgtatttgatataagtaaaatggtgacaaaaatataatataatgatagatggtgtaattattttgttgattataagatctttaaaaaccaaagttggtatgttttatcttttatttttggcaaaacaaagataataacatttatgaggagaccttttttctaaatcatacagaatatttatactaaagagtattttgaagctgtattaatgatcccattacccaaattatatgatacaataaaagaatatacccccaaaagaaaacaatgcaaagtaaatcatcttaacacctaattcttctttctaaagattgattagattcactattcatgtttttcatctcttcattgtcttgtccgtagcagccgatcaccaatcgttctcaactcgaacgttctcacagcaaggccaacatcacggattgtagtgtctagcacataaggagtgcgtgctcgcggcgctgagagatcgaaccatggtaatggaagtaacggattttgctctcagccttgtgctatgtcttcccttgtagattctgagacatgtgtacgcctatcgcgaatacattctccggctggaccgcgtatttccgatcccgtcttggaaccttcttgacgtctctatatgccagtttctcaattccccattttctgaaacacaaaaccaaaataccatttagattagtccctgaactaaaccaaatcaataaccgatatgttccctcctaaaaacagaaaatatacaaaccaattacaattcaatatttggtacaaacaaaagaaataatctttacaacatttctcactaatatcatgtgatgttcaataaaagcaaagatcgtgaccgacataggagactaatacagaatgcacaaagacttttacaggccaagtgttgacagaatcagatgcttattgatattatatgtcaccttcaaaaaacttgtgactaatattctaagtcactcaataaacaacacatgggctttggttaacgttcaatcattaaaatcaacaaagttatgaatgttacctgtaagttctggccgggccatcaccggaataacaaacctgactactcataggcatcagttcaatagtaaactgaaaatattcctccaaagattccatcacagacgaaatcgtctctttcaccggaacatgtaaaaactcatcaacatcaacgaagaacatccacttcgtcatgaatacttatgcaaacaatcattcactatcatgaattgattatgataataaccatcgaatcgttcttgatctcaatttggtttgtgatgagaatgactttgatatttatagtgatgaaggaggctagggttgttggatctaatattttcaaaaatattcgaaaatatcttgcaggataagttgcaaatcaaagattggatcctcactaatgattcgaatttggtttagttcataatgattggctatatttagataagtggtaaatattgtttagttgattatggttagttttaaatttaagagaataaatttataagatttttttctaatttatggaatgtattatcgtgttatggtagttagaagaatcgaataaactcgtctatgccgattttatagtgattagtgaggagggtgaatatatgattgaagattcttaaaatcgtaattaaatatgcagactattttgatggaatatgcgtgtattagatactaaaaattgttgagatatacaactaatcgtgttatggctaagattgcattacttgatggtaacccattatgtagttttacatgtgatcaaaagcccattaaacataactcacccgtctatgtaaaacgcggatcctgtttaatttaattatttggtttggacgattttacccttgataaggaagaacaaaattcaaaattgaaatcaaaattgaggctaaattagacaaaaattcaatttgtacttctcttttaataataagaggatatctatctaccatattcaataaaacgaatcttatcaatccaagttgtagaaattttaatgcagtcaaacaatatttatttatcctttttaatttggtcaaagaaaaatataattatcttattaattgaatttggatgcactcttctatcatatttagacaatttaaagtagatgataaaaaaattgatttgattagtttcaaacatttgtgccagtacatttcaagagagttaacacatgatgctaatcccaagacaaaataatcaaaatcttcaaaaacagacatttaaaggtaaaagtaatctctttctcatttttagtgagctgctggtaagatatactgtgatggaaccaggtgacgtgaggggagaactcgacgttcaatattttgagaatgtctataaatgagagcccaacacagatatgggcccaaagccattaggtttgccttctgaagacaaataattaaacaaagaaagacaaacaatatacatggaattttgaaaataacgacctcgtgcacaaaaaatagaataggtagccatgattagagactaatgacgttcgtacaataaagtaaaagaacaaaagcgtgtgcaatttcttctaaccctttttcacccaatcttcctcccaaatctatggatgctaactttatatgacgtcgttaggtctcttttggtgagactcgtgtatacttttgtatatacttctttttgcgtttttgtgattgtacttaatacttaatgtttctatatgattgttatagtctcttattaaattcttaattatcactctgtttctttctagtttcatatcattatagcaatatatcatcatatgtgatatcgtgatatgtacataataaaaatgtttcaatagtttctcttatatctgtaaataatgaaaatgttcacagtcaacgttttcaaaagtaaaaaaataaaaacagaaacatatattctaaaaaatgaaaaatcgagacacacaattgttgacaaaatactgatcatttaatttccaagaccaaatttatcaaatctagacagatgtttgttccaaatttatcaaagctcgaatacataaaatctttatcgtataaagaatacttgttttaatcatatgaccgagagatattcagttcagaactcagactatctgaagcgttaataatttttaaatcacatgattcgataagaaccaaatatataaatatatctaagcaagaaaatactataagctttggttttaatatagttcctagggtggatataaaatatcaggatagatactaaaagtaggaggacaatattatatttttccacaagccacgtgaacaagaagagacacatagggactctgtataaaaacgtcacgtatgcgataatgcttatgtaagcttcctttatatgtcttcttcctcccatcttttgtctactcctcatgaaaattcggaacaaaaagagaggaccatttccattttttaatggacgaaaagaacttcgacttttcacctagagataggtatatattaaagcagagagaattgcgggaacattttacagaaatttggtgttgacattttgttattgtgggtctctctatatgcctagttttaataataaaacgattctagaataatatcatgagaaaagagtaattgaggtagacgggcattggtatatattcaaagttgcccaacaactaggaaattaaagaaagaagaaaataacagaaaagaaatgaattttggctcataaccaattctcatgaaatgacctcaaggaaaattccgatattacccgccattgttccacgttattgacgctgtgtcgtttggagaaaatcaaatatctcgtccctagacacacattattcctttccaaattcgaaattgaatgtaagctgtaactaacaaaacttgtattatttggaaaattatcgatcttttttttttgttaaaggaaaattatcgatcttaatttatcgatcttaatttattttctcacattgcccacctctataaatttcacacacttcaaaactagtataatttatcaattttactttaacactggaatattttcatcttatacagacttcgataacaaaagaatatatactaattttaaacgaaagacttttccaacgaagctacaatgaaaaaagtcatgcatgtaaacaaaaaaataaatttcaacccctttgactgatgacaatatatacacaagaaacaggttgacatatatgatgagtatatgacttctatctatatatatatatatatatatttaacacatgtaaatatatttctataattcttaataaattgaaaaaaatattttcttctaaataaaactattaataaaataaaaaaacatacgatttcttacctagcgatgcagtgaaaatatgagagacgccagttgcagtcaacttccaaaagaacacgcactctccacatgctctacccaaattcctccttacctattataatcacctccgacttttaattataacaaaccaattcacatcgtgaacgtgacttttctatagctagtggtcaactcgacacgtggcatcatctcaacggtctccttgattctctcgtcatagaaacgatgcactgaatcaatctccataacttcagggcattgcccttctatataaacatcacatgtccctgtgtcttaaaatacctcttatcaaacaccaaaccacaccagaacagaactcagccatggcttcttcttcttcttctcttctaatcctagccgttgcttgtttcgtctcgctaatctcaccggcgatttcacaacaggcttgcaaatcacagaacttgaactccgccggtccgttcgatagttgcgaagaccttccggtactcaattcctacctccattacacctacaattcctcaaattcatctctctccgtcgctttcgtcgccactccatctcaagccaacggtggctgggtcgcttgggctattaaccctacggggactaagatggctggttctcaagccttcctcgcttacagatccggcggtggtgcggctccggtcgtgaagacgtacaacattagcagctacagcagtctcgtcgaaggtaaacttgcttttgatttttggaatctacgcgccgagtcgttaagcggcggtaggatcgccattttcacgacggttaaggttccggcgggagctgatagtgtgaatcaggtatggcagatcggcggcaatgttaccaacggtcgtcccggtgtacatcctttcggtcctgataatttgggctcccaccgtgtgttgagtttcacagaagatgcagcaccgggctctgctccttcgccgggatctgctccggcgccgggcaccagtggctcgactaccccaggaacagcggcgggaggtccagggaacgcggggtcattgacgaggaacgtaaattttggggtcaatttgggaattttggttttgttgggttctatttttattttctgaatggggatctctctctagtctctcttctcttcttgagtctctctctatttttttttttttttggtttgttcgaacaataatggtgccccatacttttgtactgttttagtcttagggccatttactttgtttcaccacattacttagagttattggattgtatggaccattactatcatgagattgagatcatcttatcttcttaaaatatctatttgccatccactgtactattttcattaatctaattagtcgacatgtatttgaaaaaataaataattcaattgacaaaccaaacaacacaagaaatttttattactaccgtgttccttgttaaggagacaatcaaggagttgattatgtcaatttatttcaatcaaatattctgtaattatgtctgattagggcaacattagactctctagcttgtgaatcattcggtaataaaatcacccgattctatcctgtgtttcttttatttcatttggtgatatatatatattgaagctttagaacaaaaagttattgtttgttctatttgctgttgtccacaataaacatccataagtgataaagaaatattcgttttgttattgttggttcaaaagtgtgctgacaacgttctaatttcacaacgaagttttcatccttggttagaagaaaaaactagaaaagtttactagtgtttaattttaatttagctagctaaacttgccactgaatgtatcaatgaactaaacgttcaaattttcaactcttaaaatatttggtcactagtattccaaagttttcgtcgaattatgtttgctaaatcaaaacataaataaaatcctaaaacttgttcccgcgggaccatctatacaaaataatttgggcctaaagcccaatagtaagataagtaacaagacccaagaagtatagacagtttcgaacaaggagacgcatatgcgcgttttgatgctcaaaatctctctctctctctctctcatccctctgcttcacgttcgcgacattactctcttttaaggcgcttccttaattttatcatcttctcaaatctcaccctgagtattcccattttcaaatttcgacgcggtttcaatactcaaaactcaagcgctccaaactaattccggtctttactttcgatttagaggtgggtattgaccaaaggttgtagtaatggagtcgatacagagccgagtggaatcgtggatcagagaccagagggcaaggttcttacgggtttcgtggggaccgattcaatggaggttccggtggccaccatggaacggaggagatgcggatcaaaggattaagatccgtcgggaatacgagaagcgcaaaaagcaaattgaggatctctgtctcgcacttaaatcagagtctgtcgaagatttacaagacatactctgttgcatggtactctccgagtgtgtttacaaggtgattaatcttattctttcattaaccttttatataatgttaatcaatttagtctcgttgaattacaaggaacaattaattagttaactaagaggttctgttagttagttagttacaaggctggtctaactagttcatatatatgtatacatctgtgttctctttattcgaattattacttaaaatgtaactttgtaatgagatatataggtagagaaatttagagaagctctgtttatgctattgcattgttattttaatgggggttgtattatgatagagacctgcaagtgagatggttcgagctgttaacaaatttaaagcggacttcggtggccaatttatttcgttggagagagttcaaccttcatcagatcacgttcctcacaggtaactatgtagttggaatgattttgtaacttcctataaatgtattttttgcgctctttagtttctactttacagaaatattttgtgtttattgagtgagtgattgattattaattttgctctttatgctcaaagttggtttcatttatttggaaattaacttaaaagaaactatcttaatgcaggtatctacttgctgaggcaggtgatacattgtttgcatcctttgttggaactaggcaatataagtaagtcttggagttttctattccctggaaaacaaaataggtcagatgttaaaggtgtgtgttttcattcgtgggtgtgttctagggacatcatggccgatgcaaatatacttcaaggacacatatttcacgatgatgtcgcagaggatgaatgtatcgaagcatctgagcctatacagagtgaaccacttaagaataatggagagggtttgcggaatcctaagcaacttagacagaagcccaaacctgctgctcatcgggtatgcttgtggcatgttgaagtagatttcttttcttttgtattttcagtacactgtgattttttgcaagaatgtgttcttattttgtaaatctccttaaattttaacaactaggggttcttggctcgtgcaaaggggattcctgctctggaactttataggcttgctcagaaaaagaaacgaaaacttgtattatgtggacactcacttggtggagctgtaagtctgattgctttagatgttcttacctttgtagctcattgtctatatctgtctctttgttgattcccgggtgttaatatacgtaggtagctgcgttggctacactcgccatattgagggttgttgctgcatcttcaaagagaggaaatgaaaatattcatgtcaaatgtataaccttttcccaacctcctgttggaaatgctgcgttgagagagtatgtttttggagcactagttaaacatacagctgggattagtaatagcattctcataacgtttgcctcgcttggttttgttttttgcagttatgttcatgaaaaagggtggcatcattatttcaaaagctactgcattcctgaagatttggtcccgaggatattatctcctgcatattttcatcattacaatgaacaaagaatctcaatggctggagagactgaagccacaaatggccagggcgtaacatcagaggcagaaaagagaaaaactaaggagcacgagcagttggtcattggtgttggccctgttcagaactcattctggaggctttcaaaacttgtccccctagaggctgttaagaaacaattggataggtacataggaaagaaagaggatcctgcagagacgtctactgcaaatgaatccgcagtgttagctcctattagagacgtggttattgaaccacaatctcttgaaatagaagagggtaaggatggtatatctctcaagccattgccagatgctggtaatggaccaacagttagtggaagaagtggaggaaagaccaattcgcctaatgggttcagggttccttatctaccctcttacgttccatttggagaggtagatattattactaatttataaacgtgataagctataggaatacgatagtacttaatctacttgactttgccaagcttggaaatgctaattgtagctatctttcaatggcatataatctgctttgatggttctttttttcagtagaatcattattcatgaggccttgagaaaaattgacagctcattaagtttgttttgtgtattacagctatatctcttgggaactgcatctgtagaatcactttcagaaggagagtactctaaattgacatcggtacgagcttcttttcctcataaataataagtgaatttatccaaacaatctaaggcctactagatcaagttcctttgattttggagttctctaacttaaagtacttgtatattcggatgcttgatatcttgatgctcaattttgtagtatgtttggtttctgccgttatgtacttattttcatattgaagttctcttatttggttgcatttttttggcaaagatattttcaggtcagatctgtgataaccgaactgagagaacgtcttcagtcacattctatgaagtcctataggtctcgcttccagaggtgatagttcctctctagtccggattttcagatgtgggctggttacctcttgattcatgcataaggaggtgactagttttggtatgctttttcactgaaatgcttctctcttcttgtagaatacatgacctctgcatggatgttgatggtttttttggagtggatcaacagaagcagtttccacatctacaacagtggcttggacttgctgtcggtggtagcatagaacttgggcacattgttgaatcaccggttattagaaccgccacttctatcgctcctcttggctggaaaggcgttccgggtgataagaatgcagaacttctaaaggttgatatcactggatttggcttgcatttgtgttcttttgtacatgcacaagtgaatggcaactggtatgacgctttttctttcttttctgattgatgacctatatatgtgatacaattgttaagtatcagtaatgatctctctctaggtgctcaactactgtggaatctttccctacaacacctgcttattcttcagataatgtagaacagacagaactacagaaaattagggtggtcattggagctcctctgaaacgacctccaagcaatcagatagttgaagatcctttggttcctatgttctcgtctgttgattcgaaaaccggttttccaaaggaaggaatcaacctaggattttttcaagaggacaagtttgtccgtcctgaaggtttggaagacttgtatatattctgcactagtgatttcgctactgtagctaaggaagttgaggtcagaacacggagggtgagactactcgggcttgaggtacttccatttcttgcttgattgggataacatttcttgctttcatacattgcatgtaattgtaaagtctggctcatttgtctgcgtagggtgctggtaaaacctctctattccgcgctatactgggccaaagcatgctaagttcgatgactcatgtggaaaatcttcagatacaatctgatgttcaagaatgtattattggtggtgtttgctactcggacactgtgggcgtaaacctgcaggttgatttcttcacattctggttccacgtgttttaagttacatttttttcacataactgtgaaattctttttggtatcctgatgcaggagctgcacttagaggcatctcgcttcagagaagaactatggaaaggagttcgtaatctaagtaaaaagatagatttaattattcttgtgcacaatctctctcacagaataccacgttaccaaaactcaacaacactactgcagcaacagcaaccagcacttgctcttctgttagatgaggttaaatctcttggtatcccttgggtcctcgccataacaaacaagttctcagtcagtgcccatcagcagaaatccgctatcgaagctgtacttcaggcataccaagcgtctccaaacacaaccggaattgtcaactctatcccttatattatttctggctctggaacttcctcattgccttgggcagctgtgaatgcgggaaatgacggatcagtaggcgtaccgaagatgatattcgctccactcgaccttgtcaaaaagccgtttcagagaaaagacactgtttttccagtggatggtgtgaattctctttgcgagcttgtccatcgtgtccttcaaactcaagaagaagcttgctttgaggtattattactctcttacctgattcagtgcttaatgaaaataatgatattgatgtcgttgtaatgcccaagtcacttcaattttatatctctccattaaactttcaggaacttgctagagacagactgctggtggaactagccaaagaccgtgtcgtagatggttcacaggccaagtcatcatcaatgtcagcagcagctgtaggtgcttcacttggagctggtcttggccttgtcttggcagtagtaatgggtgctggttccgctttacgaaaaccctgattgtacttgatcaaccattccatctgttaatgttatatatttttctatgtacataactcccactaaagttcatgttttcgccattttctctattcggtcaggtcatttttgtttaatccctcggccagaaccaatgtgtagtatcaagacaaaacagattgcaagtatcttattataagtctgacttcataaatgataattataaccttataaagctttctctggtaaaaacaagattgattgaaatcatcgggagcaacaagacggattccgccaagagctctcggagccatcttggttgttgacaaggctgacccggttaacggaaagctctgctttgtaagcatcagagttgagaagtttgcggctgacattgttgaagatctctctgataacgatctcaaaggctttgtctacatttgtggcgtccagagccgatgtttccataaagaacaatccttcttcctccgcaagagctttcccttcctccacactcaccgctcttatatcctccaaatcgcatttattcccaactagcatttgtgccactgccgtgtcacaatgagcttgcgaggtaacaaaacaaagtgttagggatttgtcttgaattcacaaacaaataatcttaaacttgaggaacaaaacagagtatcttctcagctcagtgaaaccaatcacctctcactgcctcaagctaaaaatagaatcaatgaagaatgacccagattcatagcagcagaatccactaatggtgatcaattctaagtgtttggattcacaaactccaaaagattgttccaaaacagagagagaataagagcaccttagtcatttatagaatccatcaatggtgctcaacgacatcaacagatttcctcagagaaaagagtgagaagggaagaagacttactgttgagttcctggagccaacgtttaacgctttcgaaagtgtcacctcgagtgatgtcataaacgatgagagcaccaaaagcacctctgtaataagcagaagtgacagctctaaacctctcttgaccagcagtgtcccagatctgagctttcacttctttcccttcgatttcaaccagctgcgtctgaaattccactccgattgtcgcttttgagttcgtgtcgaactcatcccgcgaaaatcgagacagcaagttcgattttccgacagcggaatcgccgattaggacaatcttgaacaggtactcttctcctcggtcatcttccttacccatcttcttctacttcttcgagactgtggagaattttttgcaagctttgaagaagctttgataagtggtaaagtggtgacagacaagctgcgtgattggcggggtttcctatagacaaactcattaaattcttaattaattacgtttaaagattttgattagtgccaaagtttaggcttttttaattttgctaaaattcgaaaacacctaatcctcttaaaatttgctagataacatttaattttctgaaaataagtttctattaaatgaagaaaaaaatatacatttctcaactacatttccatagtttcctcatatttatttcaaccaccatattcaaaattcaaactatatttcaaaagcttacaaaaacctttatcaaaaaagaaagaaagaaagagtcaaaaactgctaccagccagttttatacatctgactacacaaaattgactagtgagggaatcacacagaaattgtgtggctggataactatttttgaatcaactatagaacatcaaatctagtcgcagtgagtacaattttgagtagatatgttatcaatacaaatatactaaaacttggtataggattatgaacaatttggtataggggttccttattatttcacacccaagtatggttacagagaatacacaacaatgtaacttcaagtttgtacataaatagcttgaggctgctttaattgtttgctttgccccaacttcttgggaaaggaatggcatctttgatatcaggaagcccggtcgcatacagaagcatttgttccatgcttaggcttattcctgaatgtttcactgtcccatgcctccttaaatctaagtaccactcgaacttctccctcgtgaatccggattccccgatcctcgcatccagaatctcaaaccgttcttcgttttggctcccggtgatcacaacaccaacctgtaaaaaacgtgaagacttttgaccctgcaacgtcctaatttttgataaaagtgttgtttggttcagttcttacctttggtacgaccagatcaaacgctgctacagtcttcttatcatcattcaaccttacgtaaaactgtttaattgctttcgggtaggtatgtacaattacaggacctttgtagatctcatcagtcagataactgcaacattgaacgatacacagagaatttaaatcggatcttgaaacaaagactcaattggcaaaaacaataccttagatgctctgttgttaaagcaactccccactcaggcttggtttcaaattttgtagtggttgcctgttttagagaatcagatcattatggtatagcaacacaccagcatataggaactgtatgggatttgagagtgatttaccttttgcagaagactaatcacttcggtataggagaatctcaaaagggagctggatgctgttgcttcgagacgtgtggtgatggtcttgtcaactcgttttgatatgaatttcatgtcttcatcgcgattttccagaacatatttgcagaggaacttgaagtattcatcagcacaatccatagcatcctgtaacagtcaaacgaaacaagttaccatttgttaaatatcattgaatagcatctaccgaaaatcagtgttataagaatcttacatccaattccgcgaaagccatttcggtttccacattccacttctctgccaaatgccttgcattgtcaattttatcagctatgaatcttggtccaaaggtataaacttttccaagtgcagaagcatagctctcaagatgaaacctcccagaagcagtcagataagtgtcgcgaccaaagaaatctttcgagaaatcaagcttctcaggtttgaccaaagttcctgttttggatttttgtttcatctcaatctgcgatgcaagatcgttcgttttcttcaagtcgtgtacagcagcaaccacggtttctcggttgctgtcggatctcttgaggtgatcaataagcctcgtcttttcctttatcacagcctttacggtgtcaatgctaaatccatctttttcttggacaggaggcttcttctcctctttatcatcagttttacctaaaagagtagtgaccctaaacatttcgccaaatccagtggttgttgtgatgactggtacttgaacatactgaaacccatggtattgaaggaatgtgtggcttgctaaggttagcgcactgtggactcgagtcaccgacccaaccttcaccaacaatagaagagaaatatatattaacctcattgccctttcatgacatagttagataaaaaaagaagaacataaaaccagagtcctaagatcatctgagaaaaatgttaaaatatagttataccgtagttgtgcggggacggaaatgagagaagtctctaagcatatgcagaggaagctgtttcttcgagagtggatacttctctggatccactgttccaacatgaagaagcttctctgcctcaagctcaattacatgttttgcagaagcagccaatggtagtcttaacacaccttcagctacaatacaagtccctagagccataagctgagttgctggaacagttgacaacgcagaatcaacaacaacctgagaggggaataaacaaagttagactcttaaaaaagttctaattggcatttcatcgaacatcttatgcgccaaaaatgtattgaaatcaaacatcataacctacctggagactggagatggaggagccatcactgatcaagaagtaaaaaacatactccggtggtggcacggccttctgaccggcgagttctgtcttatcaaagattggataagtcttaccaccaccgctcagtacatcgaaaaatctcttgaaaatattcattttcgattggattatctccgtgcacctaatgttggccgtcgtatgagcttgatccccaccactcgacggcgaaggggcggcaactacaggcagaggaggaggaggagaatttttcttaaccgctctagcagacttaacccaaccaccaatcacaacccttttcccagccaatcctgcgccgcggtcgctccgatcaagcagagtctttaactcgacccgtttcgaatactttgacaacgttatgggtttcggagagagatcattatcgtgctctttctgatgggtttttccatgagattccattttgggtattttagagtaatccgataaatcggaaggttgaggaagaagagtgggagaaactgagaggaagatttgagtttagtgaggttccttgagttggataaatcaaaagagaagaagagattatatataaacatgatgattacttgaagataattgaatttgagagattagaggaagtttagattgttggaacaaggaaaaggattgtttcagtgttgcggagagaagccagagagagcagagaaggagagagagaaaggcaaagtttggtattcttcaaggtttggatattcgcgggaactgtgtctcaaacagttcatattgagggttttaaacctgaataattgtaattttgaggcccaaatggcccaatagatttttgattaatttgcaattcacaccctggcgctcacatatatgtcgaaattcaactagtatttttcgtttcttctgaaattctactagtatttagattaacaactgattttgttccaaaaaaaatatgttaaaatgaatgatccaacaatacatgattttggttgtatttccaaagtatttattaaccacttattctctaaagttactatcctaaagtatataactgaatgtccaatttaaatggtctataccttatggttggttataaatgaatttagctaggtaatgaaaaataaaccgaataaatccccagttattttaataaatcggtttatttcaaatgcctcttattttttaattgtgatcttatttgcctaaaaccattttgatttttgagaaagttaaaacggccagttgtattgtatcgattgtaattaggtacgaatcttgtcattaagcattaagcagttggaaaaagaaaaggagaatggaatggggtcacatgtacacgaattgtaatgatggttagcacgagaggtacaaaacctatggccgaataaatcactattaagataattaaccttttgataagaaatagtatttctcccaactaaacgtaggcttgaggtctagaatttgcagacgaaagcaacatgttttaataatccccctgttgttacaaaagaaactgtattaccctaacagactttatagactatcgtagagtggccaatgatccaacaaaatgccaatattatcttccaagttcttactaaactaatggaaactttgtataagtcttgaaaactttcggctaaaacattagaattaagctaggggacttatacttcctcatttatctctcaaccaataaaatctcaagtccaaggaattccactaactatggaatttctaattcagaaattgaagaagttagagtatgtgtcaccaaaaattagttttacgatccccaaaactcaaaatgtatttgtaaggctgaaattattgtggatcagtttgacttagatttatgatctatctttaacttgattagtatagtatttgagagattgaaatggaatattattcaaaaaggttaacctcctatcctactcaccataggccttcatgatgctcataatcattgcctcttcaatgatttaaagctcttttgatcccgagctttacacatcatcgatcatcactcactcacttcttcttctacttatataaatccacgttcaagaacttgcaaattagagaaccaaactttgatatttaaatcaaatccgaaagacataataaaaaagaagaagaaggaaatatggtaagaagaaacgcagttcatgccatgtcaagtcttccgtcaaggtcctggtggccgcaacaacgaaggaaaggaaaacgagtcgtcgtgcggttaggaaaccggcgacgagggtttttggtggggccaccgcggatggttatgcagagatggaggatgaacatgggaaagccgatgaagatgatgagaagtatcattttggggatactctcaaatggtggaaatgttaagttcttagatgcttacctttggtctttaccaatcttacgtcctcacttgtttccactgtgttgatttttgtaataccaatttctacttgtgagactgtaatatttatttatcttgttcttattttttttgtgtgaatcaaaataatcggcttcataataaatctttattcttgctagcttcttctttaagagtcgaggttaatgaaaacaactagttttgagtttttttttttgtgtgtcatggattactaatttactaccaacaacaaagtaaatattatgctagtgaaagaaaaagaaaaaaatgatgcatgaattcttaaattttgacaatattaaacatgaaattgaccaaatatttcatttttctcaaaaataagaattttagtttgtgtatatatagaatttagttaacaattatgtataacaacaaaaatgctaaaaatctatataaaagttactattagtttaaaaaaaaaaatagtattagttatttaaaagttattacttattagtgtttatttacaaatagtattaatgatttaaaaggatgaaagatataattcttattaaaggacgaaaataataattttggacagatttgggttttatatctgaaagactcaaaaacctatcgtcatttatcttcaacaggcggaataacggagatggccgccattacagctctcactctccgctctcctgtttatctcccatcatctgccacaagccctagattccatggcttcaccaatcaaccaccaccagctcgtctcttctttcctcttaaccccttcccttctctatcaatccaaaaccctaaatccatccgaatttccgcatccgcttcgccgataacaacaccaatcctccagacggagaagtcaacagctcggtcatcgacactcaccgggtccactcggtctctcgctactctcgcggctttagcaatcgctgtaaccagagtcctagctcagaaactctctctcgcaatccagacttcaagtcccgtaatcgccgacgggttacgattctctctcagtaccgccggacctgtcttcttcgcgtctctccgggatcgtcctccgggatacttgaacacgccgctgacggttgttgcggtggggataaagaagtggctagacatttacagtggggtattgatggttagggttttgctgagttggttccctaatatcccttgggaaagacagcctttgtctgccattagagatctctgtgatccttacttgaatctcttcagaaacatcattcctcctatcttcgatacgcttgatgttagtccattgcttgctttcgcggttcttggtacacttggatcgattgttcatggcagcactgggtagaaattggaagacttgagctaatggttttgttgaaacgttcaattgggaaatttctgcaacttgtttcccaagattagggaaaaatcagaatttgatgctgtgttggatgctcgatgagagttgtgagctttatcgtttttgttgttctctttttgactttgattctgaataatgagattttgggttgttgtttatctcctaattacatgttcagactaccgtttattgatggattatctgcgttctctcaactgttgacattgattaagaaccagaaagttaagtattgtagaagaataggcatgttgtgttatctgcattatttttagattttcgatatctagtttaatatgtagtagaatttatcatttgtatctaatccagatgatgacatgtatgtgaatctggcatgagatttgaggtgtttggagataagttcagtatttgcgtgtaacaccttgtcctaggccgagaacatggtgttctttaatgttacttcttcttcttcgttggttaataaaatgtttagtgtggatagaattggtatagagttttgagtagagttcagagtcttattgtttaggcaaaagcaagttcaaggtttcattgaaactccaagggaataagtaatcttaagttcaaggtttcaatgacactgtttctcgaggaaagaaagaaagaaatcagactctttggagtttcaataaaaggtcaatgaaagaaagaaagaaactagaagtttgaattggatcacaccatttgccaattcaattataaaattatgtacgatctgacaaaatcaaactcgttgaactctaacatgaccaaaatctccccaaatccaaataccgtaatcagacatggtcatcatacaatgcgaaaaaaatagtacaaccgagttagattcaatttcggttcataaccggtttagaaaccgtaatcggacaatggacatggtctcatcacagtgcagttaatctttgaactacaatcttacaaaatcacacaagttcgttaagttctaaccagacccggcccaattgggtagggcaaggtgcaagtgtataaggctcatttcctttttaaaaacaattcatataagacccaatattttttaaaaatacagtaaagatccaattttgtttttattatgaatctagagcccaaaacaattaaaactgtaacataatgaaaagtccaaagcaaaaaaacacaagttttttccctaatacttttatatttattgggccggggctggctctatcatgactaaactcaacctcaaatccagaaatcgtaaccagacatgaaatcacaagagaattaggaaaaccgagtaacgttcaatttcggttcataactggtttagaaagcagctctggtataggtcgttttagcttcccgacttcacttctaatctcagactctgcgacgctctttacaaaccgccggaaaaccgccatgaactttgtcgtcagacgggtaggctccattttgccgtcgatacgtcacggcggcgtttcccagattcgactcgcgagaacagaggcaggtcagccgagacggcgaaacaagttgccttctcttccgctaaagaagaaggaagagaaatccgagtggtggatagtagacggagagatgcacgagatcggtgatcacgtccctcctcgtgagcgtttcacaatccccagggacaacattccgaacaaacgccgtaagcagctccgtgaccagttcatgcgccgcactcgcctcgtccttaaagaatcggtcagttcctttcacaaagtttaagttttttcaatcttcactgtttaattgttctgtgttgtagttcaattggaaaaaaatctgttaaaccattgcaatgataggaacatgagccatggtgcaaaaagtatatggaactatataacgagcttagagaaaactgggagaggctttattgggatgaagggtattcaaagaaactcgcaagtgatcatgcaaattatgaatccgctgaagaagacgatgaagattttaatccatacaggtttaatccctgactatattcttataatgatatttaggtgtggatgggtggttttgtgattggttgatcttcttaatcattgcaggaacaggcggtctttcagcgatcaaacaaaggtaacaactttattatgttttttgtagtgagtagatttgagatcttgttgtggttcacttctgtctaatttcattgttttccctgattttgttttgtgttatctgtaaaacttgagtctgatttttgtgagaatcggaaatgaaagcaggagcaagggtttaatagaactacacaaggtgataattgggagaaagtcagtcaaatcagggataagtttgagtatgatagagaaaggaggatgagagataaaggtgagttttcatcaccaacataagtgtaatggtacttttatatactcttcagcattttactgcatgaactgatgaacagaattagtttgaaaattatttggtgtaatggaaagttaaagttgcatcatcatcatgtgctctgttttgttgaataggaactcttaacatattattacctgaaatatatcagaaaattggggaaatgctttaaaacatgtcgtttgcaaattgaagagaggtaaatagataagatagagcgcaagggatgaatttagatgaatgtcgcttattgtctaccatcttgaccgtgtatatttgacatgctaattgagccgagcatcttgcatgaatctagctagagtcatgtggtgggtgatatgtgtgtgctgtattctgcttttactgtagtttctcagctgtcttgaacaatctctctgtcgttgcagcctttgcaccaatgaatgcagcaccagaatctcaagaatctagggacttgaattggaatgcacaaagacggccatttgatcctgatagattcgcaagggattgaatacccttaacatcacatggtgagagcaagtagatgaaatggagcttgacgttacttgtactctatataaatatccaatgttttttctctgatttcaggtagagcaggcgaagaatgagcaggctgctctgaagaaatagaataatataagtttgtgtttagtttttactttatgcagtgaatatactttcatgtaagcaaattgcgtgctgcagatttttccaagttttactgtattagtttatatagagaggcgccgtattgctctctccacccaacgacaccaaaataaacgaaatgtgaggttaacccacaaagtccgatgcaactagatgctaggaaaaggctgcagaaccatatgcgtatagaaactgagaatgttttgtatgtgtaagtgcgaaacaacaagtcaagtgaaatattagctgcatatgaagatacaagctgatgcagcgcacctttagtagttttagggattttatcaaacactcgtattgggagtgttcgacaagtaacgggttttagttttattttacttagcgtttcctttattgaagggaaaattacccatctcttgtagattacattaggattattcttctaggttttatctgtatctcttatatatagtgatcctaaagaaactttgtcattttgtgattttctagagaaattattccaaataactgataacaagagacatgaaattaattacatggaagaaaattggcagaacattttccaggtaaatggagagcgagggtccggtcaacgccaacgatgggtggtcccttggcaagaacgcataaacaaggttgaccaagtgtcttgatggcagcgcaacatagcccgttcggaggcaatgtgctaaacggagccactgatggtctacacggcactagctgaatcaaagccgacaaaaatgtacgaccacatgggtgtcccagcgtctctctcaccagacctgactggaccataaccataagtaacatcactgtaaaaacctgactctttttcattacaatcatccctttttctttttgtgacaatgtcttgtacaaaaaagacgaaagctcatatataacttgtactgagagtgcaaaagagaataattgcatgaagaacctaatggagttggattagatggatcatgaaacttgggttttattgtttctaggcccacgttttctacgcaattagttagattttcacatgcatattgataacaagtgattatcatctcatatattaacgtaacacagagatgatggtttggagaaaagatacggcataagttttttgatacggcataagttgtgtaacgtacaaccaatttaaattcatgcttgaagaaatgtcaaaaatttatgatattatactctcttgtggtttagtgtgctaagtaatctgctcactcgtaggggtccggacccccacaaagggggagggagtcgactgaacatctcagccattggcggaaatttaagtctcgtttatattttaacatgtgcccatccatgagtcataatcacacttattcggctaaatacaagattatgtttatttatgtctgtgcttacatgagaaaagtacaaaacagaacaaaagacaaaaagaatacaataataaacattcatcacttcaaccaaatctgagccattcattcaacatcttttccaaaccaatcctgacatcgttgttaccgtctaacttccgctcacagattctctcggttctgtcaccctcgcaatctggagaaagcaatgcagaaacaacactgggatgggggaagggaaagaatgaagcatctgaccatgaatcatgcctaagatttgagatcaaaacagtagaaagtatcttcaagaatagatgagagcatctatctatcttttccatctttctcgtatagtataacaacatttcttcaactcctgctaaacagtgtttcttccaagagtttgatctacttgatacaatggcaacatcgaagactgaacctgcaagaaccattgaaacacacattaattcactttgccattatatcactgaatcaaatctcaaccaaatcaagaaagcaattatacaactaggcacatacattttgagttagtccttcaataattaaagcaattgcaacacttaatccttcagctaattccataaacttaaaaggtactcagttctacaaatccatacaacagctcaaactttgtgaacaattcaaaaacagaaaatttctcataccttgttttcaccaataaactcggcatcgccacgaaccgcgacacaatctcttggtgtctcgaacaaagacaaagagtattgcttgcgaagaacaccaacgtcgaagaatataagaccagagctaggcacgtcgactcggattcctttcacctgtaaccacaagaacagctcttgcgctgagattcccgataaatccctgatttgagcataacctatcgttcccgaaacaatctcatcgtaatgcagctctgtctcatacttagcctggcatgactgattcaaataaaccgagaaccgtcccgtttcgccattaacggtaaatcctttcacgcctttaggaaatagccccaaaggtaatccattcgctagaaggatctcgtctatagattcattctcggcgatcacggcggagatcgagatcccggcggcgagaacgaaacaaagaagcgtgatttgaactatacgaagcatagtggaatggtttaatttgccagatcttattgctggctatgaagaaattgaattaatgggtttaagcgaggaagaagaagaagacgacatttttatgacagcttgaaacagagtggaacaaaattattgaaggcggaatttggaatgagagcagtgatcctctgtttctcaggccatggtgagagtaaccaatgaatgaaagccacgtctgattatatccaccaataaatttgtatttatttaaatggtttcgttactataagccatgttctaacatttaacgagttattggaaaagtaggtggaccggaccacatgggatcatagagagacttgggtttgggtttttagagttggatcgtgatttgcgcaagtaagatgagtgcctacacggcacaagttgaaccaaagccgacaaaaatgtacgaccacatggctgtcccatcttctgactcgaccaaaaaccgcaagtactatcactgtgtaagaacctgagattcttttcattacaaatatctttttctggtttttgaaatttttttttttttttaattttgcttataattaattatagtaggcgaacaaacgataaataattgcatgagtttgattagatggaacgtgaaacttggggcttatggcttgtagggtcacattttctatgcaattagttagatttgaaagtttgaatatctggatccgatccatatacagtatatcagagatatatttatcaattttttttaattatagatcatatatagtctttcgacgaaaaaaaaatcgatcatatatagtctagtctcgtttatatcttaacatatgcccattgaagtcatgggtctacaccattttaaacttcatgtttcaccaaagatgacatagtctggtggtggtggtggctttagctcctccttgttattttcagtaacaaggttcgaaaccatgtaatgtgtgtttgaaagtggattttgtaacaatcttaaactatataccaaaatataaaataaatatctcacaatcttaaactaaagatccctcttaaaataatgagacactagacaagtttccaagtctcctaaatggactcattttggcattactgtttcattgatccactgaatcttcttaggacagtaacttccgaagccaactggagacagacttccacttcagggtcagggcaggtctttagaatgacgacgaaatcctataattgtcacagttgatttgactgtaaaatttagattcatttaccaaaaacaaagcagccagatattcggtgaaagagaaatgattgcaaattgccaattttctataacacttatttggctaaatataggatttattatatctgttttagacatgacacaagaatacaacacaaaacattcatcacctcacagttatcatcacttcaacaaaatctgggccatccctttagcatcttttcaaaaccacagattctctcctcggttcagtccccggcctaatctgagaacgaattacagaagcaaaactggaatggggagggaaagaatgaagcaatttgattttgaatcatgcctaagatttgagaccaaaacagttgaagtatcttcaagaattgattgatgagaacatctatcttcctttctttctggtatggtatacaacaattctttaaaactcttgctaaatgatgtttctcccaagattttgatctactcggtacaatggcaactcaacctgcaagaagacccattgagcacacattagcttattttccattacatgattgaatctgatcaatgcaaaactttcaaaaccatctttcctagttcgaaagatattcccaatttcacaagtctaacagttcttcaccgataaaaaaatctcaaccaattcaagaatggagaacataaccctaaaaaggaacaatctttcctagctctaaagataattcttcatgtcacatgtctaacagttcctgaccaatcaaaaatcgcaaccaagtcaagaatggagaaaaaatgaccattgaaaggaatctcaaaagtttcagatgatgacgaatgagataagctaaaaaaactttgaaaaaggattctcatttgaattcttagtggcaagcctgaaacttgtgaatattcaaaagctcgacattgaaaaaccacaaaatccagcgataagaacatttgaattatctctattcacactatagcccattagtatccttcaataattttcaagaactttaaaggttcaattgaaaaaactcattctgcataccttgtgaatcccacgaaccggaacgcaatctctcggagtctcgaacaaagacaaagaatattgctttcgaacaacaccaacgtcgaagtatataagaccagaactcggcacgtcgactcggattcctttaaccggaaaccacaagaatagctcttgcgccgagattccagacaaatcagagatttgagcagaacctatagtccccgtaatattggcgtcgtaatgtatctcagtctcgtatttagcctcgcatgcctgattcaaataaaccgagaatcgtcccgtttcgacgtcgaaggtgaattctctgacacctttcgggaatatccccgaaggtaatccgtttgccaggaggatctcgtatatagtctcagtctctgatatcgccgtggagatcgagatcccggcgacgagaacgagacatagaaacgcgatttgaacaatacgaagcatcatcggcttattcttcccgaattcacggtttgtgattttgacagatctctctctgctcgtttatcaggaaattgaattaatgggtttaagggaagacgaagaaggagaagaagaagaagacgacattctggtgacagcttgaaacagagtggatcaaaattttatcaaattattgaaggcggaatttggaatggagcagtaatcttgtgcttctcattccatagatggaacagaccaatgaacgatagccacgtcggatgtgtgtccaccaagcagtatttagttaaatgtggcttgtttcgttaagcctttggttctaacttcctaaatttcttacgcgttattggaaaaagtaggtggaccgtatcacatgggaacagagtggatctggccggacttgcggctattcgaatgtttatagatttttttctgtcttaaatgcctcataaaatacatagaagcaatgttttcttcaacccaaactaaaccaaacaaaatatttggattaatattgaccggttcgattgaacggtccagttagaaatttgggcttgtaagtatgtaacttatctttgggcttataaagaagcccatctccaaattagcgtttcaccctcactcacttttccggtttcaaccattagcacaaaaaatctgagctccgaccaaaaattggggaacgacgatggcgacgactcttcagaaactctcctctcaaatccaccgactctctccattcaccagatctctaatcgttcgcacatccgcaacgtctgctccttctccgtctctgggatcgaagaaagtctctgaccgaatcgtcaagctttctgcgatcgatcccgatggatacaagcaggacatcattggactctctggccagactctccttcgtgcgctcactcacactggtctgatagatccagcatcgcatagattggatgacatcgaggcttgctcagcggagtgcgaggttcagatcgcagaggaatggctcgagaagctcccgccgcgtacttacgatgaggagtatgtgctgaagcgtagctctagatcccgtatcttgaacaagcactcgcgtcttggttgccaagttgtgttaacgcaggagcttcaaggtatggtcgtcgctgtccctgaagctaagccttgggatattccgtaagtttttgttcttgaggatctcataaatgttgggttcgttctcaatttggctaataaaattcgctttggaaatttcggtactctgaagataactccatttgaatctgtaattttcgtttgcttacatttaaattttgtaatgtggtaaagaactctgcttgtttaaacgattccctgcttcaagtatgggtgaatgttgttttcttgatttcattttcgttgcttcttcttccattagattggttagagactatggtgttatatctagagattggtaaaagcaattggaaaatgctaggaggttattgaacacattgtgttgaattgtggttacctggtgttgatatctgttggtctcgagctcaatttgccaacagctttaagcatagagaaagagagtatatagaatgatgtgacttcttagtactggaatgagattctttttacagaccatatagtaatcttcccggtttcggtatgcttaggattaataggccatcctttatattctcgggtctaattgtctaaggaggtgtttccgttgagttagaagaattagtggagttttgatctttcattctcataaccactgcatctttggtgaggctgagataacattaaatatactctgagcattgtaatcacagtttctgcttttagggaaagggaataaggtagaatggatctggcatcttataccaatggtttagtagatttgatttgagccttgtaaacagaaactctgtttgtaggatcgattcttgttcagggtttgattcagtaacaaaacatattgagtatactgtttagatattattttcctaccagtagtttctaaacacagcttaggcatctttaaatgttgcgaatagttttctaattcttactcgtttttcaaaatccgaaaccaaagcaaactgaaaaatggatgctcatctctatctacctgaaaacgtcgatatcaaaatcaatttctgcttgtggtgcacttaacacaataatcattactctcagtcttataaggatgtgcaatacaacataatttaaacctgttaacagactatcaatctgttaagaagtgattaagaccttgactattttaaaggctatctcttttattttaattttattattgttcaagttgtctcttctattttcgaaacatcgccatgttcaaatcgacaaaaaaagaagtgtatagaacaaatccacttagaataagttacatcttatgtagataaaataaataaataagttttgtagaaaattaaccaaacatatacaaacagacgataagcatttgaattgaattatatttgtctataccataaattgagtctcaaaagatttaacctgaaataactatcctaacggaaaactgttttgaagatgacaaaatacgagataatgtgtagattccgtgtgtatctctattgatagactttagtttttgtgtattcttgaaggacataaacctattttaagaccagttcaacagaaaactggtgcagaccacgatcacagttgtaatgagttttctaaaatggtaaccactccttttcctttaagaagcagtccttcttgtctcctgccctaattctcttcttctctataaacccatattctagttttgttctcattcattctctgttcaaagctcataaataataaactccaattaagaatggatcaagcggagcttgccaggatcttccaaatgttcgacaggaacggtgatggcaaaatcacgaagcaagagctgaatgattcattggagaatctaggaatctacattccagacaaagacttggtgcagatgatcgagaagattgatctcaacggtgatgggtacgtggacatcgaagagtttggagggttgtaccagacgataatggaggaaagagacgaggaggaagacatgagagaggctttcaacgtgtttgatcagaaccgggacgggttcatcacggtggaagagctaaggtctgtgttagcttccttggggctcaaacaaggaagaaccctagaggattgcaagaggatgataagcaaagttgacgttgatggagatggcatggtgaatttcaaagagtttaaacaaatgatgaaaggtggtggatttgccgccttaggatcaaacttgtaaaaaaaaaactcatttttcgggttcgggtttgagacccaaaatcattgggtatttttttcttcggaatgattattagggcaaaaccttgaaagcgatgatgaatggatttgcaaaagaaaaaagctcaacaaactttgtgagctttgttttgaatgctcctacaaaaatgttgttgatgaatttgcttttcggattttgaaacataaccatgcgaatctacgggaacacttgatgattcttttattatttatatatttgggtgttgcacttaaaaagttatcactatctagcttataatcataaaatgatgaaaatatatttgtatttgtaaattacaaagattaaacacaaacaaacaatcgaatttctacccaaaaaaacaaacaaacaatcgaatttatgtctttaaagtgaagatttaggtcaaagtaatggaaaaaagtgtctcatggaatatgttagtcaggcggtcaaagtaaaaagtaaaaagagaaaaaactataaactacatgatgtttaactcttcaagtgacgtcaagacataaactacgtgccgtttcgcactattcgtaatccaacgggcgagactggaatgaatttatgaccagatcttggttttttcttgtcgtcttcttcaccgcttaccagttactaacttgagcttcagagatcatcatcatcatcacttcctctctctgaagaaaacacaatttggagttttctaatcttcattccaagtgagtacttcaatcgaatcccttttctactattcaataattcaatctattattcaaattctcgtctatctgtttcgatgattttgaggttttcgctcccttttgttatcaaattatggaatctgattcccaatttcgcgtttgtatgtactcgattttctcttttttcttgcatgattacactttggtgaagttcagaattcgagtaatatcacttgaaattgctactctctgcctattcattagggtttatgaatacatagtttagggtttatgtttccattagtcacttcttgaggacctgcttatcttcgagccattgtgtatttgataaactttggaagaagtgtccactatatctagcgtaggactgaatgtagtagattagaactgctaagagttggttagagaaaggggtgggtaatttataaggattttctagggtttggttaggtattcggtagagagtttctggtttggtgaacaagacatagctttgcatcatttgttttgagttgagatgtttgtgtgttgtgttgtggcagtggaagggaactctttacccgaagaagatgtagagatgatggagaattcagatgtaatgaagacagtcacagatgaagcttctccaatggtggagccgttcattggtatggagtttgaatcagaagaggctgcaaagtctttctatgacaattacgctacatgcatgggtttcgttatgcgagtggatgctttcaggaggtcaatgcgagatgggactgtggtgtggcgcagactcgtgtgtaataaagaaggatttcgtaggtcgagacctcggagaagcgagagtagaaagcctcgggctataacaagagaagggtgtaaagctctgattgttgtgaaaagagagaaatccggaacatggcttgttactaaatttgagaaagagcataatcatcctctcttgcctctctcccctaatgttcgccggaattttcagctccctcaaacaccggtacgtctacgcacttttccttggggtaaaagtaaaacagtgattattggcattgatctaagagttaccaagaacataaagctcaaaaaatgatatcgaaatcttgtacaaatgaacttttcaggacgagaaagacgcaaagattagggagctgagtgcagagctgagccgagagagaaggcgttgtactgctttgcaacagcagcttgatatggtccttaaggagatggaagaacattccaaccatctcaccattaacatcaatagtgttatccaaagtgttagagacattgagtccaatactttcaccaaacaacaaacataatgcttcatttctgttcataaaagcttaacatcaaattctcataatccaatgttctgtatcttgtgattgattcttcattctccgaaacaaaaaaacaaaaaactagattggaaggcattgatgatgaaattacacattggctaatcaaaacaaagccatggacattatccaattttgacatagcatcaatgccagaaagcgtaaatggcggtagagatgtaaatcagcagagcagaggaaaccagagtgacgagcgttgcaacagcttgagccgccgatttgctgccgcaagagagcaaaccaagacggatctgaatcacattaaccatagagagcatcaagaagagacagcccattacagatccgacagcagaagccatcattccccatctcaaaaccttgatattgatgtgagctctgaaaatctcgttgacgtctttgctattaagaaggtttaaggcaagcttaagaccctgagctacaagagaggagaagaggaagaagctgaaggagacgacttcgaagaccagtagcttcttggcgacgtcagcacttgcgtcgcagctggatcgttgttcgaggctgtgttgtcctggagtcgctaaggaaagaccaacgaagacggcgatggtgaagagagagttcacgttcacgagtccgtcgagagcgcttacgtggacacttgtggtggcgagggaggatgttgaagacgcctctggtgacgtcattctcacgccgttctcagcgccggtcatgtagttaaccttcggctcagatctgctcggaaagggaaaaaaagaaacgcaatggttaaaaaaaagatagattgattttagggaagagagagggtttgcttactcatacatgagggaatctatttaagcaatgagtttagctttccgtcggggcttagcttgaagaaagagatggattgtcttaaagagagagcttgtcggaaacactctctctctccctatctttgtacaaaccagcttctttgaggcatttcttttccacgtcacattaagttgttgactttttccgatttttcttctctttttgaattttgtttttctgtatgcagtcaaatgttaatggatttttgggtgaatttaaaagattttttttaatgatttactattagcaacacttcataaataatttgaatgcatttttcaaatcactaataagattttctcttaaaattaatgattaacttgagatttttcaatctaataagacaaatcatataggatacattcccttttaagtacccaattcgaaggttaaagataaaaaattgtctcaagctatggatgggattgacacatataagcatataacgatgtacaaaaggagaagaaatatgagaattgcatttctgaggtaagtgataagaagatgtcaggcttcagatgactgaattctcattttgcctgtttggtgtggtgggagaaggacgaatttctcttgcaaatcgatgactaacataacggtggaaatgtttaagcacaacttgcctttgttctcggttccaggggattagatagacgatgagagcaaacgcaaaagaaactcctgtgatcataaacaaaccgcgaaatgtgtatacagtgagaggatggaacgtatcctcgcttgtggctgacgtcgtttgtctctggaaccaccaattctctatggcttttagcttctctgttctccttagcttttcgatttctcttgacaccttttgaaccaaaggagaacctttctggaaagcctgagagagagagatggattaagtcaaataagtgtgcataccaataatgtaataatagacgaaagttttgggggtaaaagctttacaaatccaaagccgttggttacgctttcggtttcgacaatgacgaattctgaagggtgctttgcaacaaagagctttacatatggaacttcatcgacgataaacgagatagttccattccttaaagcatttgtaaaatcgtcagctgtctttaatcccttgtatctcggtccttggaacgtaggattatcattaaccacatttgctgcaatagaggcagaaaagaagccaatgttttcgtttgatttcaacccgcgtatctgttgaaccgtcatcactgatgtcaacgttgcagtgtaatttgaagtcaatataagcactgcaaatatccaaacaataactacaaatcttgacatattatgttgcagcctctcccctatatatcaacaatatcaaagcaaaaaaaatggtcagagagttcttgtaatagataaaatcaagaaggctaattcgatcttctcgtacttacgatgggcaaagacaagggtcgagaacccaaaacatagcaatgttccaatctgttggaaacaagagccttggaagtcagcgttatcatgccgctctatcaaccaaactatagcccccgtcaagataaagaaacttgcaattgttagccaaagactaagtgtcaaaggcttaaagataatccacatgcttttgtctttggcagtaacaactgcgagtcccatatcagtgaaaggtaatgtaaaatctacatataaagatctgttatcagtaatcgtgatatccccaacagctgcatcgtacttgtctttctgtgaaagaagcaaaacaaataattaatgttatagtgcatgaaagtgaagttgtatctaaaatagtatatggtgaacattggcttctccactaattaccaattagttttgagttgaatgctcataattccccaaacttaaagagtaatatataactaatgatagaccgcgataagccacaacagtgtgtatatatatattacctggctatacagtgtgtacacaagatcgttgtagttcttgtagttaattgcaccaggccaaggtatgtactccacttcataattgaaaggtaggattgatgtctcaaaaacgtcaatacagtatcctgtagcagctgtgactccagttttaaaatctgttttcacttccagtatttgcggagttatgtttcctgctggtactaaaactctcagcttcttctttttaccatgcctcttctctttcaacgaacggattttcggaattcttgtagaccctccaggccagatgattgtctcaagtgctttggtagaagacaaacgtcttcttctattgctgatgaaactaccagaattccaaagtcctacacttctctcacctctccctatcatattcacaatctcaaacttgtctgagataaacttcttatcgatgaatttgatgtcaccactcaaacctttatgcttagcactctctggaatagcctcaagcaggtcatatactgacaaacctggtaactttgcaacttctgctgctcttgcaagactccaagctatatcgtgagcccatatgctacaaacgctcatccttgtaactacttcttcgagtcgcaaagatctcttccatctcaaagtaaagttgtgaagctcctcagtcaacggaatataagacttgaaaccaatcacaccttccatttcctcttttgctaaataatttgtgtcttgaaaattattcatgcttctcgctgtgaggatccaagcatatccttcctccatcattcctaacctccgagcacatggaaagagacgatttgcaattcgttcagaaatgtgcgcaacaaaaatccttatccccgaggccttaaactttcttagctgcttcatgatacattcctcattagatgagacagaaaattccgccttgtactcaatgtgaatggcgttctgttggaaatgtccaaccaaaggttgtatactctctctccagtcatcatcatcctcgtagataagaacagcggttctccaatcaaaattgctgaacagagctgcaattccctttgcttcagaggatgtatcatgagtagcttgaataaagtaattatatttggccaagctcaacgagctaggaacttggaaagaagaaatcactggaactttagttttctccccaagctctgctaaattttttgcttcaagcaacgattgtccaccaacaagtgcttccacttgttcagtttgcaggaggtccatggctgtttaaaaattacatctccatagaatcaatcaaaatgagaaatgaacatttcaccaggttaacgaaaatcagattgaaattgcagtggcaagattcgaatcatggtcttaacagttttaattattgctgcgagttgtctatcttcagtgattcactgaaactatgagcttcttgttctgaagaaaacaatctaggacgtacctgcagcgagagcttggagagggtcaccatgagagtctctggataagacagagactcttgttctatagccattgttgacatgatagaaatcagaaagcgccatcgaaatcgaagttgtcacaagcttgccttccatggaacccatgtccaccaccaaacctatccgaacatcttcgtacactactggaagtctatctacgttatctttttgattagttccgctgcatgttactgcaaatgaaatgaaggcgaggaagaaaatagttagaaaataaccagtgttgcgaatcatacaattctccatcttggtgaagcttttgttctctagcccctatttgtattataagctatatatctgacatctaatttagttcaagattccaaataattttaaactaatttactcttcaggtactaattaagattccaaggtcattaaggttgtcttttatggagtttttatatcccatataatacggcacatactttactcaagtcaatcaatcaaacagctgtgttatttttcattttccaagtcttccacttactaacaaaattcctggaccaagtcttcattactcagtctaccattttcttcattggttttcttgctttgcttagtaaaacgttagcttctttgaccccatctatactccaaaagaaccttttcctcaaggttatcaacaaagcccgcactataagaaaacaggattttgcggctgcaaaccggattttaggcatcgcgcatccaaagcaaattagcaatttctggatagaaacgtgttgtcgcaaagagcgacattgccagtcgacattgtcacaaatattacgacactattttccgacacaaatatctgtggcgtatctgcgatggctgctgctgccatatatttcggatacaaacttttattttcataatttcaatcaagctataaactggttggttctatacaatgagaggcattacaaactttacgtagaaatactgaaatagtaagccttttttttagaatcagccgttatgttacaattacccgaagtggtgtaagcaaaatggtttgttggaaaaaacgaattcaacttaaatacctcaagaacataatagctagatttgattacgatgtttgcagactcatgaattgaagccactcatatgttaatgaaactcaagttttttagtccctagtttcttctgaaaattcttattcagaaatgcgtacctttaaaagttgttgccgagggtttggagccactgatacattatatattttgataacagaagatggctactaattcagcatctcaagagggatcctaagaccaaccacctgcccgacaacagagaaccatgaaaccaagtacaacacaattggcatctgacatccagaagagctgctactttgggaaagcagcttgatccagtcctcagtcccacagggatgtagcttgaaccatggcctgttcaaatatggatgctcctgcgattgattgtttgcatagggattcaataccaaataaccatataatatactttaaacggacattgtaatgtagtattgattttgagaggatacctcttgagttataaaagtccacttagattccagcaaaagactaacagagcatgagggtacatctttttttatgacatccaaagcaagaggttctccacctaagtgacaacaaagatgattttcaaactaaacaaaagaacaaaccaaaaaagtccaagcaggttatattgtgacataccgctgcagtatccgcgaaaatatagcacaggaaccttgtatgatgcactgtaaactatatggaaatcatagtagtgtgcttcattttccatggttgggacctaacacaaataaaagggcatcaaggaaaacaatctcatggattctagatacctgcttcagagatagttaaaatgagaatttctcaaaaggttatgtaccaaaatcgtgtgatcaactgtttcttctttttccaagcaatcagtagctacatttagagattcatcctctggaatttcctcctacacacaaacttaattgtgagaaacaagaaaagaagaacatcactgttaagagctgtgaatctacctcaagtgaactgagaattatgatcttctccagcgacaagtaaccttcctcctgctaataaaacaacaagaccaaggaatttaaaaaacagtatcttaaagaaggttgaattatggagaattggtgttcatcaaccttctttgaaacaagtagagttcgattgatcagaggaacccaagaccatggagggaacgattggttatgtatcttccacttatcggcaaaagctcgagaagctacagagaaaccttcgacggtgagtctaccatcgctgacctctcgagctgaatccattggaggagtaaacaaaatcgctgatctcttcgtcgtctttctccggtctattatctcagcaacatcgtatcaaagcaaccaacccgaatttagtttttgaaaaaattaactaatccaaccaaaccgaaccggagaaattcgattttcgaatctaaaccagtttcgaattaaatccgccgcttcgtcctcgacaacctccatcgccgccttgcataaacctccgtactttccttgccgcatctgttagtctctctctaaaaaacaagacggaaatttttatggagttatactgaacctcttctatgatacgcatatttctggctgtttttttaggttgcgttgtttggaaaagctctgaatttaaacctcgcttattcagttttttaaacagattatactgttgtttgtctccatggaattggtgagtttctcttggttaatgaaagtctaatacttttcgtgtgagttattgaaaacctcgggttgggtaagtatgaaagttttgtgtttttttgcagacatgtctgagcaaaggagatggctttcactatccgccttgtcatatgctgaatctatgtggtttcaggattttaattgactgccctttggacctttcggcaatcaaaatcttctctcctgttccatctggtgttggttctgaagcttctgaatatctatctgatgagtcgttggatgctcagaatccaattcaaaagaagcaaaaactggagagacagctaacttgtgctgatttggtgtgtgaagaaccgtggtacaaaactgtgaaagccttgcatttgtgggaggcttctttcattgatattgttctcatctctaaccctatgggattgctcggattgccattccttactcaaaaccctggattttttgccaaggtatacgtgttcaggacctaaagttttgagttttctgaatgattttttttttcttggggtgtgtattgtgctgagttgttattgttgctacgatgtagatatatatgactgaagtaacagcgaagattggacagctcatgatggaagatattgtctcgatgcacaaggaattcagatgctttcatggacctgacaactccagttttcctgggtggataaagaatttagatagtgaacaagtaccagccttgcttaaaaaagttgtcttcggcgagagtggtgatgatctgggcagttggatgcgtctgtacaggtaactattattggcttctcaaacaatatgttgctagatcttcaagtactgttgatagcttctttaagttttgtgcaatcttttccacagtttagatgatatagagagttgcatgaagaaggttcaaggcgtaaagtttgcagaagaagtttgttacaatgggaccttaatcattaaggctctaagttcaggtctagatattggggcttgtaattggttgatcaacggacctaatggaagtctaagttatgtgtcagactccatcttcgtttcacatcatgcaagaagttttgatttccatggtctcaaagaaaccgatgttttgatttactcagatttctcatccctccaatctgcagaagtgactgaggatggttgtatttctcctgactcagataataattatatatcaacaatcaggtactatcatataagacccctctttacatttataagaggatgtttgtttagatcttaaagtgggggatctttctttactgtttaacatttttagcagtgacaacaaggattcattactaaacactgaagacagcttagaagagatggagaaactagcgtttgtttgttcatgtgctgcagaatctgctgatgctggtggctcaaccttgataacgattactagaattgggatagttctgcagctcctagagctattgtcaaattctcttgaatcctcgtctctaaaggtttgatgtctctttcttctttttctttagttttactttcttgaggatatgaagcacagaaaaaagtttattttagttgaaatgattcttagctgtgtgagtctaagtaactctagtttggctctggttaggttccaatctttgtaatatcttctgtggcagaagagctattggcatacacaaacaccatacccgaatggctgtgcgaacaacgacaggagaaggtatacttctgccaattgtttggttatcaatgacaatattattagaaaaatgaatcaaataggataagttttattttatggtattgaaatgtgaattaaaagtatgtatattgattgatgttgcagttaatttcaggagaaccatcgtttggccatcttaaattcatcaaaaacaagaagatccatttgtttcctgccattcattcacccaacttaatgtaagaagaggttataagttttatctcttttatcattagtgatggattattttgcgtaaatgcatagtttgcaaacacatgtcatgaaaatatcatctctgttcaccttaaatcattgcttggttcagagacatcagtaatatacctcacatggaatctgcaaacctgaatattgggatgatgtgattctatatcaagaagtatgttacagcatgcactgattttttaagttatgcgaacagaacgagttggcaggaaccatgcatcgtatttgcttctcactggagtttgcgacttggcccttctgtccaacttcttcagcgttggcgtggagatccaaaatcattgcttgttcttgaggttttttaatctctttctctcttccccatctctatcagatgatccagtttgaattcaatatatctgatgataaatatgtgttgcaggatgggattagttcaggtttaggacttctcccttttagaccgatagcgatgaaaattctccaatgttcatttctttctggaataaggtaaggtttgcttggctttatgattaagactacattttattctggtgcttcgtagttgtttttttctgtcgtcttggatcaaggaatctgagttgtgtctgcacaaaataggaattaacctgggttcttgtgcaagggcataccttgactgatagtatagatttgactcaccacatatgcattgttgctatttaatgaccagtaatatctcactatatcccaaaatattagtttccaaatatcatggcagctcacaagttaagcttgtcatcatgtagtccagcggccaaatgtgtgatctaaattggcttgtctaccattgctcaatgctgtagtttcttttgcaggttgcagaagctcccaacacttgtatccgttttgcagccaaagattttcttggtaagtattctcttccactctggtgaagaaatatttacatcctgcatctgtctatattcttctatctaataccatattatgaataggtccctgatgctgtcaatcagaggatcagtttggctgcgataaagaccatctcaatcctgaattactttgagaacaagacgctacatgtaccaagaattgtagacaatccaagcgtagagattacgacagacttggcctccaaattgagctggagaaaactgaggcaacgtgaaagcttcggtattgcaagattgaaaggtgggcttctgatggaagatgggaaacacagattagtttccgggttggagcaggaagaaagttcaggaaaggctcggccattgaggcattggggctcagtggctccggaattacttttagacgcattactgaaaatgggaataaaaggatccatcgaacagagtacaggtgataatggatcagaagacaagagtataatccatatagaaaatcctaacagtggcctgatagagttctcagagatgggtactgctattataacaggcgatgagaatgtagtctctcaggtcttccaggcgattgatggagttcttgacggtatatagaggaagtatcaagcattgactcaccagagctattagtgtaatagagtgaccagttcagataaaccttgtaattatgattggttcggaaatactctctgtaacatactatatatagaaaataatataatcttatgtactatatgcatgattaaatgttaatcattgtattctgtgagtattgttttgagattcatcttatgtacttcatatttcgaggcttgactgaatattatttattaaggattcttaaagaaccagtaaactaagaaaatgtaataaataacaaagaagaagaataaagtggatctctgagtttgagatattatatggtcttcaagccacttatatgtttgtaaaagctgcatctatttacatacaacgtagctctccaacgattcatacaaacatataagtacataacttataaaggtaacacaatacattagtcttggacagatcctaggatctttatgacacgacatctaagccagagaactagtcacctccatcttcttgcatactccctctagaatttttaaaaagtctctcacgattacgaatactttcaatagctgagcttcttcctttgcaggatcaacatggaaatactctgttatctttttcactgcaaagagcgtggaaccttcttctctttcaatctttttaatctcctcagcagcagtttccaagaatctggtcaccgactccctgaatttccaccattggtgttcctcactgtgtccagtctcctcacacagtcgcagaacctcactaattttctgaacttcttcataaagctttgacacattcattcttacaacaccgtagtccaactctgcagatttcttggcatcgttaagaactgaactgagatttctgacaacttgtagccctttgattccttctgattcagtgatcttctgtacaacagaatccaagatactggttcttccatctgacgatttgatatcgacaaggccgaggagcgcctcaagtttgaagtcatgagcattcccgctcttcattccagcctccaaggtagctccaacaagtctcaataacattctgctatttcgcagtgcctcacaagcagcctgcaaaagaatcatatagctttatgagacgtaagcttacaacaacatacacattcataaatgtctcttgttatcttcatctttgttttatacctgtataacgctgaatgatcttttcaagtgtttgactttggagtcaaaactagcaacagagagcaatgcatcaacccgtttgaacacgaaaggaacattaagcaattccttgagaaacctctctgatggagcaagcttgatcactgaatcatcactatagctaatcaacttcttctcttcttcttcgctcggtgccactcttgctaaactctcaagaagctcaactccaagtgcatcatagtgacctgatgaaataaaagacaagtcagattcaactcgatacaatccgaataatgagaagaaattagctttgtcattgatgatttaccatctcgaagggcctgacaaacatcatttgtggtgagcttaagtgttgtaagcagaacagcaacattttgactcttccttggatccaaaactttgctctcttgatttagcatcggaagatcacagctaagacttctctgtttagagttagcatttgaagagttgtatggaagacggtcccaagtatttgtccgacgagaacttggtcggactttgtcccaaggcaaaggtttcagctttggcttaggtcgatctgttgttccttccccacaactctgtggtaactccgagaaagatagcttttttccagatttctgaaccataaaagactgtgacggtggcacaagaggaggtggctcaggcattgccggtggtggtcgttgtggaggaggaagagtaacagcagcagcggccgattctctctgttgagttgtatcaagctctggtttttcccaagaagatttcaaacttctagaagattcagagatgttgatacaaaaatctctagcaggtgatgcagaagttgaagaaagaaacaaagacttgacatttcgactgaaatcgttccatctcggcggcgaactatcaagaaccttgcggaaaaaccgatccggcgtggtggaaactgaagagtacatagaagaacgagcatatgcgtctggagttctaatcatacctctctctggtgaagtagaagcagaggaaattcttggaaaccctagattttgattccagaggctaaacattctcagcgactgcccaccatatctcttattgttccttactgttctctccggcgacgacggagagtgagtgttttggttagttgaccaatgtggagccgtcgagttcatcggtggagacatcgcagctgacggtgacattgccggagaatccgagtgtgaagagatagagcaagaacagttactgtacggattgattctccggtctcgtgattcttgaccagctatagacgcgagaggcgagtaaaagtcgtcgtcttcttcttcttcatcaagattagcttcagagtgatgttgcaggaggaagctacgggcaggtaatggcgggagaggagagatatctggtgactccggtttaacaaaacccgacccggaggaagtgacgacgttgccgaggtagagaacatcggaggtagaaggagctacagagagtttgttttgagtgttgttgtttcttggagggggacatggaagagtttgttgttgggattggctaatgtctgaagctaagctcttggattcatctttgaaatgactggtttgccctcgccaccgtccgtagaagaaaaaggccaaggcgattaatgttgcggcggcgagcacggcggagatagcaggaataaggagtgtacgggaaggagtttgcggtttaggggagcgagggaggacgagagcggagatgttcgccggaaatgtcgcaaaagtgggggcgggaggcggaagaggctgcggcggagaaggaggaggaggaggagaggtggagctgtaaagtgggaagaacggcggtgagaatgtggaaggatcagttacaggagcttgaagaaggtgacggcgactgaaagtggccggagaggcgtatgataagggagagaaagcgcaggatagcagggagaagatgatgaagatgacgtagcaaagtccgtccatttttggggttttcttgtagagattttgtgttctgcaatgcgcactatctgaggacgaaagagtgacttaatgctagtgtttttgaataaaaatcaagtagggagagaagaagaacgtatatgaaatgcaataattacgtcaagtaaatttgggtcctctctttcaaaagaatctttttgacttttgcctagtactatacaaaacactatcttctcttttctatgcaaaccaattattaaagtcgagactactatctttatctacgaggaaaacaactagacaacatttctatttgccaaatattgttattttgtctcgtgttatggaatactatgtaatcctattcaaattaatcaagagtagtatatagttgggctaaaatgtctgaaaaagaaaaagaaaaagtagaacaagcaatgcagcatgctttgtcttttatttgtcttatccacatttttcgtgaataataaatatataatctccaaaaaaactactacgtaattatggaaattgaattaactagtgcattagtttgaaacgccatcaagcttttcagctttttggtcaattaaacttttgcatgtttttgggactttatttgaatttcgatttagctttcaatgagaaatggtggtgtggcataaattaatcagcatagtttttgaggatgcaagagagtcatatgacgcctaagaagaaaggcaataagaagaaggaagcgtactgcacaaacaaaacaaatagcgcaatagcttcgttgtagagacaaggactagaaatggagaagacttggtttggccatattgagattaattgttacaacacaccatgtgttcattcacgtacctccatttttggatgtttagtagaaaacaaatgttatatttaccaaccaaattattacaacaattgatttactactggtcatcccaaaaccttgttaaaaaaaaactacagctcaacttttcttgtcaaagaacacaatcacgaagttatgttctcacgaggttgatgagagttccacgaagctcattttcactccaaaaaaccaatctcataacaatagactagtaagaaagatcaggtttcgaatgtgaactgatactctgagcatgaagactttgttgcgacactggcgggagaattaatatgcaaaagtccaacttcttcacaacatccaaggagacactaattactaaataattgtttttatctcgtgggtgggcaacatatataggttataattaagccttggaacgacagtgttctttaacatgcgattcaagttaagaagatatgatcacgtttggttgagtcacaacacttttgaaaatacacttaaatatcagtatgaatgcaaacttataaatatatctagataacaaaaaattaagatctccaaaactacaaatacacatagttaagacgtaagacaaattacctgtcgaatccagaggaaaacaactcatctggtagcatgtgtcaaatcagcgggaacaaaacaaacctcatcctaatatcagctggcttcacacttgacagcccaatatgtcttatcaatgaacatttttcatcatacgcttttttttttcttgttttttctcgatgttgctaccactgatgatttatttcagcagcatcagaatttcctgttggatccaaaaattggttatcaattgtttggagccgatcagctcggattgctgcatttaccttcttgtacatctcttccatgttgtctagctcaagacccttcttaaggtagtcacttaaatgagttgtcttcagaaattgagatcatttattcatctcaagagatcattctcattcaagaaaatgtgcttatatgatttaggattgacattaccctcatgtataatccacaatccacaatccacaccacttgctaaagttacggtacggtgacacaacttcggcataaatctcaaaaattgaataatttgaaggattagaaaataaaataaaaataataatataaacaaatgcgaaaagaaaaaaaaatcatagcaagcaaaatttctgcttcagcgctctcgttctgttttggtatttggattttcaatcatggattgagcgattgttctctttttacttgattgatttcttcgataaactctggatcttttgtgtgggttttcataatttctttttttccgatcaatctaatccaatccagagattctgagtctcaaagttttgcttttttgagtctgttttccaaagacatgtagggctggattctaagcttgcaacgtatccatttccctggtctttcttggtgatccggaactgaagtgaaggctctctggattgcttcatttagatcaatatagaggtttatctgacttaggttcttgatgagtttatgttctgtatcagagtagatatatgtggaggagatagttttagttttaaagattagattttgctgtccattttatacaggaattgaagtgaggcatggaagatgtgtccgagtctgataataatgttgagacctccattatccaccttccagatgattgcctttcctttatctttcaacgacttgatagtgttgctgaccatgattcatttggtttgacttgtcatcgctggctcaacatccaaaacattagccgtcgctctttacagttccagtgttctttctctgtcctgaacccttcaagtctgtctcagacaaatcctgatgtgagctctcatcatctccacaggcttcttactcggtttcagtggttggagcatctttcgctttctggctgcactgtgctgaatgattcgagtctcgactccctcaggtatcccggtgcaagactgcatactctttacttagattgttgctttgggatttctgatgatgggatctccactattgctagcttttgtcccaatctaagtgtggttagtctttaccgctgcaatatcagtgacattgggttagaaacgttggccagggcttccttgtctctaaaatgcgtgaatctctcgtactgcccgctggtatctgattttgggataaaagcgttgtcacaagcatgcttgcagcttgagtcagtgaaaatctcaaactgcaagagcattaccggtgttggctttagtggctgttctccaactctaggctatgtggatgctgactcttgtcagcttgagccgaagggtataacggggatcattagcggaggtgggattgagtttctaaacatttcaggtgtaagttgctacattcgcaaagatgggttggtacctattggatctggaattgcatcaaaacttagaatcttgaaccttaggatgtgcagaacggttggtgatgaatccattgaagctatagcaaaaggttgtccattgctccaagagtggaacttggctctttgtcatgaagttaagatttcgggatgggaagccgtagggaagtggtgccgtaacttgaagaaactccatgtgaaccgttgtaggaacttatgtgaccaagggttgcttgctctacgatgcggttgcatgaacctccagattctctacatgaacgggaacgcgaggctgacccctacagcaattgagatgttcagattacatagagccgatataacactaagaacagaagaaatgatggtcataggaccagactggagactatatgcacaagaataaaagcatcaatttctatcaacagtacatgattcttttaagttcgttcatacgacatttttgggaccaatgtgttggtcttgtctagaggcaaactgcaagaaaagatgtattcaagaataggcttcaagttgttaataaagtatcaaaatcgtttactggtcaacagtgttgtttcaaatccagtaaaagaggaagagaatcggatattataaatatatatcaatagaaaggtctttaacaaacacttaaaacttcactttccattttgtagagtacgacatctatcctttaccacacaatcagagaatactgagagatagagagaagagaagaagagactcaatttgcaaacaaacatctggttttcgtacatcccaatctgtgttgcaggctgctacacggtttatcttctatcggtaaccaactggttgtcatggtgttttaaagcaatgttgaaggatttgggtaatgaaagaagtaacttagttgccccatacattgtcccaaccaccgccaccacctggtgcagcagttttaggcccctcgaggtagttctggtttccatgtggctggtgtggtaaaggtagcccattaggcccttgtggtggctgctgcatctttctaggccttgttctcaccccaagcatacgcagtacaaatcttgctaattctccatataacataccaccacgatcaaatagctgaggacaaataaatgattggttaacatgagaacaatgaaatggatcaaggaaccagtaaaatacgagttggtagaagaaaaaaacaggaaggaacctgaagaagggcagacatgaacatgtgaaaggcctgtgtgttttgatctataagcatcgctacacggccaaagaaattcacagcaccttgcatctgtcatcaatcaaaacatgaacactttatgttatacagtactaccttatcattatcaacttcttttatttcttatacaaaataaagtatgaataatgaacaataccacacggagaaatgatatccagaagcctggtggagatggaggttgattaaaagggtcatttggatcttgactaccataaggaccacccattcccattcccatccccattcccattcccgttcccatacccataccataaccacccatcgtgccaccataaccacccatcgcaccaccaccatacatgcctgaacttccatagagcccaccaccaccataacctcctctatacatgctactacctccatacatcccaccaccatatgatgaaccatacccacctaatgctgaaccatatgtacctgacccatacccagaggtcatacctagatttgaaccataacctgccattcatacaataaaagaactaagctttatgcaatctcagcaaccaaaaaatctaagataacttgaaaaaatatacctccccccatagtgctcccataattctgctgttcccaaggtctagccggtacaggcctactgagtgaattcatattagcagctgtattaggcctgttcacgggcggaggaactacttcaccaggattagctgtgccagaagcctcaactgaaccagccgtgctagtattagaaggaggcctgaaaggattaggaccagatgtatttccttctttttcccaaggtttaggaggactgccacctacagcagcagtaaattgaattaattatacgtttagtgacatgacagatagtattctgaaaataagactaaactttaatcagcacaggcaaacacacacactaaagagacttgatgaaagcaattgtaaagatgattaggaacagtatcggtaacacaagtgaggttatgtgaaaacatcaaagtagaactatgatgtagaataagaaaaggcatcaaattgcaatccaaaacgaaagcatctaattgaatcaagaaaatctaaggccaatcaaagctaagcgcaatccaaaagctgatctcatcaattgattacaaccctaaattaaaatccaattgtaggtcgaaagttaatcaatttcacaactttcaaatcaaacaactcgacgggtctcatcgaacgtaccaaaattgtagaaggagaattcaataaatcgagaccctaaaatctgaatcctcaaaaaaaaaaaaaaaaaaagaatttcaattgagctaacctgcaggctgagacgccatatatcaaagagacgacgattggagagagctcttgttggtaatctccgacgccaacctcaagcgcggagagagagagatagagagacaagagaggtgggatgaagaagacagaggagaagggacctcgaaaagagaggaaaaaacaaaacagattactttcttcttttaggttattatgtatcagcccctatagttataatccttacccaaaaagcctcttaattactaaaattgacgtatttgactctcaaaaatagaaaaccaaaatccgaaaaaggatagagatgaaattatatgtttatattattataagcaaagattccatatttcgagggaagcagaagaagaagctcagtcggcggccggattaatctccccatcatctctctctctccctctctctgttcctatcccggcgaattcatatctgaatttcccaaaattcaaacttttccggtggaattattttaggaaaccaagtgacttcttaagctccaaaaattgggtatttaatggcggcgagcgcgaacccgtcggggaacaatcaggaaggttcgtcggcgacgcagaaggtatcgtcttcttcagcggcggcggcgaatggcgctgctgtgaattccgtcgataatggtggaaatacaggcgcggcggcggataattcacagacgattggcgcgttgaggcataatccagggatctctaccgattggactcttgaggaacaatctctattggaagatttgcttgtcaagtaatcttctcgctctctctctgtatgtttaagatttggatttgctgttttatccaatgttctttctatctgactagatgtgactagatgtagtgaattctgcgatatgttattttccatggcctttcaagcatcatgtagcttgaatcggaatatgtgttgagaattgttagctttggtcgggttttttgaattatatctgagaagagaaacagtggtatttgattagctgattgtgagttttggatgtggtttcaagtatggtaataaataaaatactagaaaaatgactagctagctagtgtggtatcatatttatgataggctcattagtgttagagcaatgtgaaaattttaggatttaattagaggatgagttgtctacttatctgtaatgactggttgtaaatttttgtaggagccttgttaaatcctatcactcttttagtaattaatctttatataggtacgcgacagaaccgtcggtttttcgatatgcgaagattgctatgaaaatgaaagataagactgttcgagatgttgccctgcgctgtagatggatgactgtaagtttcttgattttgcttaatccggcgactttttcgttgttcttgattaaccttcttcgtgtattggctttattgattagtaagaatcaactgacggtttttcacctccatgtggttgctgatggattgcagaaaaaggaaaacggaaagcgtaggaaagaagatcattcctcgaggaaaagcaaagataagaaagtatgtggatttcaatcctatttgctgctacttagcaatttcgatactagcaaggctaagaaagatatttgaagtacaaaccataaatcagcttgattgaattctaatgtgtaactagcttgaacctttagtcatttacttgtgagtttggacggatgaaagttcttgtgttgtcttgtggatccatttataagtctacaaaaactgattgattgtctttcacatatctgtttagcaggaaaaagctacagattcttcagccaagtcctcatctcatttgaatgttcatcctaatggtccttcttatgctccgcctatgatgcctatcgatactgatgatggtatttcatataaaggtttgtctaagattctaggctttttccatttaaaggctaaatcttctagattggattagaaggagcataagtgtttcggctttattgcagctattggtggtgtgagtggagatcttctcgagcaaaatgctcaaatgttcaatcaactttcaacaaatttctcagctttccaggtgaattc

SEQ ID NO: 401 - DNA, 85561 bp, Arabidopsis thaliana
gatctgaatacattcgatgtatctgccgttagctcacaaaagactcctaaagttttgcttctgtcaacaaagaaagacactcctgtcatctggcgggttctaagtggcttgtacaatggacgatttgtcttttacaacacagaggtttgttatattttggctttaatttccacttacatcactattcctacaattattgttactgcgagagtctgatggtcgtagaaattatggggtggttccctggtccacgtttaatgacgagtcagcaaatttgaacttaattattagaattccttagacatgaaatctttttagctaaagtatttttttctcatgatcttgtaggtccatgatacttctgatccaaagatacaaaagttgggggtagacaagtttccggcaatagttggttggttatcgaatggggagaagcaagtcttgaaaacaggtatcactgtgaaaaatctgaaatcagctgtccaggaacttggtaaattgcttgaaggattagagaagaagaacaagaaggtctcttctaagagtcaggcgggccaagcccctaacgagtcctcagaaaagatacctcttctgtcaagaccaaattttgactccatttgtggggagaacactcctgtttgtatcattggtgccttcagatcgtcaaatggtaaagagaagctgcagtcaataatgtccaaggtaaacaaatatatcactacctctatactctatttatatgcctttggctcagtatgatagttaaacacggttctttgataaatttcaagaagtgaagcggtgttctttcttcaagccattactcttttggttctttgacttgatgatgaataatcctccggctctattctttgtccaggtatcccagaaatcactctctcgacgacaagcttcaaccacaggttctcaggacacagtatcctattcgcttctagacgcaacaaaacaatctgcgttcttgagctcccttgacaaatcagagttcaaaacttcttctgataagctcctaatagcttacaagcctcgacgaggtaagtttgctacattcaaaggcgatatgactattgaggaagttgagaaattcgtagcagctgttcttaacggagacatacagttcacaaagacaagacagaaaccccagatcaaatgaaagttttttttcatcagacattagtttcagagatgtacatcgttttggaggagaaaagggtgatttttcacgtttcctgtgttgcaatctgcttttgacagtaagtttgtgtattgtcaagagacgtgaaacagttctataggactagaattatgtcattgtactgagtactgactactgagttctttgtaattattacaaattataaatatgaaaatgttggggttttgactttgaaccccaacacacttctgaaattagagaccggtaaaaacagtttaaaagccgcagtgaccctgatttactccagttaaccacactctatagacaagttagagtgttactttttggcagaataacagtttaaaagccgcagtgaccttcgggcctttgaccgcgaatccaacggtcacgaaccggaagaaaccagactaaatccgcgacacgaactttttgattgaaccggctaatttatggtaccagctaaaccttgtagagcaaaagagaaaccctgattcttcttcttcacatcgtcgcgagctctggttctctgctctcatccgcttcacaaaattgatttgcgagtcgttgtgttccaactctcattcttttgcacctggatttcttccattttcaggttattacaatcacgttagattttgcgttttttttgttttcacagtcctgtggtcgatttcgatacggttcgattaggcttacacttcagattagtttcatctttcagttccatgaatcgattaggtttagttcactaattttagcatggtttgagattagatttagaaaacccgattcattaactggttgacaatgctgtggttttagactgtagtgtttgatctaaaatggttttctgtttgatataatcgtattggttgtattttaaatctcatttaaatgatgtatcaactataaagccttctggttttgttgcagatagatggttctatgaatgttgctgagaatcagatattagttaggccatcttggacatgggaatccagaatattttatggcaagtggcgaagaaatcattcactggaagtattatagggcttaccatttcagatagatgttgtagcgttgttccagtgagaggagattccatgtctcccacatttaatccccagcggaattcttatttaggtaagtgtcctactgcacaaactgctagaaggtagacttttgcttattttggtccattcttctttcttattagatgttcaaatgttgatgcagatgattatgtacttgtggacaaattttgccttaaggattacaagtttgcgcgtggtgatgttgtagtgttcaggtatgttccctataatgccacatttgagtcatcctttgacaagggaagattatagctacataatacttaaatacatgttgatctcttgtttaaaccttttcttggatgcttacagcattcacaattttattaaatctaattccctaaaaccttacaaatgtttgttgtcctatttgtggtgctgaaccatgaaattcgtgcatattcaatctctggtacatttgatataatgtatttggtcatgaatacaaactctttggattctattcttgctttttgcttcctttagctcagctttttcaggtctcaaatctgttttataatgttcatctgacattgtgccgtatgtgttctaagttgtatattttgaaatacatcattaagctcctgacgatgtgaactgcatctctgtggcagctctccgacacatttcggagatagatacataaagaggatagtcgggatgcctggtgaatggataagtagttctcgggatgtgatcagagtcccagaaggtcattgttgggtagaaggagataacaaaacttccagcttagactcaagatcctttggccctgtaagttctctgcttccaaaccccagcacatagtttcatagaattagaacgtagatgatgcacatgatattcttttcaaggcctgtcccatgtgactgatctggataaacttgttttggcagattcctttgggtttaattcaaggaagggtcactcgtgtcatgtggcctcctcaaagaataagcaagatcggtcgataatgctaatggagaatgaaaaggtatgttccttcctgttccaaatgaatacccccttcctcaagattctctgttaaggaatctgcttcataccaaagaatggtttatcagaaagattgaaaggtcgtttttcttcttcccttttcatacaatgtaggacgtctccatgttcctcaagatctctatgggaattctcaaattcacatttctatcccatttttttttttttaaatagaaaaataaacgacacttaaatactccgttctcaaatcggaaccaaagtcacgtgtcaatgataccaattaacactcttcgttcttatatcggttctggtcagcttcgatttcttttgtttcagttgaattccagttgatggaattaaattcacttggtcgatccggtttggtcgcttgttcgaacacgagcaattaaatctagtccaatcagaaaagaaaagacataccatgggaaataaataaatgctgtaataaattacaatgttgtacacgtggtaagtgtgattaattccttatgttaatttcctggaagaataagtgtttattatataaataaatgcatggaaaattcgaaacctcctccttgctctggcgtttctccttcggggtaagatcaattttggttgttcctccactttctttctttttcttttttctcgaattttcactgtcgtacaaattttctcgtctttgctggaaattttctgggagattttcttttcttttatctgtttctctctcttacttttccttcattttccactcggcgtcttgcgaactacgcaagtttcttagttactactatttcgttacctttttttggcattttgatcgaaagccttttctcgagattaacgctctccgcccttttttccattttataccaattaaatgttgtgtttcgtgaaacgcgaactattctctggtaatttctcttgattttggctatgtgttcttcgttgatcgtaattttctcgcttgttctgtgaaaattttcttggctgtttgtttgtggtttcgtttcagtgtggtttatttctctgttcaatcggtgccccttcaatttttagatcagaatcttaagttgcttttgcttggtatcctcaatttttttgtgagtattgttcaagatctgtgacggaaactgagatctgtctgttggtgtttttttgccttttcaggtaggtgggtttgttcgaaatgggaagactattcgtgatagacctcgaaggactggtttatagctgcaagtattgtcagacacatttcgcagttactaatgatattatctcaaaggtgaatttcttctagtcacattcttccctttcttctctttttatgcatccttcatttcatttccatttcctacatttatactttgctcttgcttgcttgttaatatcttggtctagtacacttgttagccttcacacttgtgtttgtaatatacaagttttcagaaatctgactgaaacacacaacttacagttacagtttcagataataaaaaacatggaaaatgggaatttgccattctgttgttaatgatcaattcatgctcctgaattgacccttgagaccagatgattagaacacacaaaacctcatttccttactaatcaaacaacttgggaattgaccttcagttcttgtttcctatttttctgttaaactgatcgaacgcaccatgatttgtgtttctacagtgtcgatagatgttcttgcattgatcaaacagctacctgatttgtgtttgtgcttgtgttgtttccagtcatttcactgcaaacacggaagggcttatcttttcgacaatgtgtaagtactacttacacggatttgatcatgcaaggactcgtgacaaggttcccttatttattagcacacctttttgaattcttagtgtcaatgtgacggttggagagaaggagcatcgcgtcatgataactggttggcacactgtagctgacatcttctgtgttagctgtggctctcttgtcggctggaaatacgtacaagactcaaaactcatacattgtaaacaactttctttgtgatgatttgatgctaattctctttttctccctcaggaaatcgcttacgataagtctcagaaatacaaggaaggaaaattcatcttagaaaggttttcatctttcaatgtttaataaaaactccgcaaaatgattcaaacgatgatcaggtttaaagtggatgttgtgtaaccaatgtgaccaggtttaaggtgcttgggccctatggaggaggatacgacatgaaccagaacgagcctatgactggaagcgatgatgaagaataaaaatatggtatctctgttatttaacgacccattggaaatacttggaaagtggtcaatgcttcgtatagactatcggtgaccgggaaactcgccgggaaaaaattcaacattttttcgtgtaagcgttcaaaagaaaccaaatattcatcatataagtaacaaatatagtttttctatgaattttaaaactcatattataatgcatatcaagttgttaatcgtttttcggaaactgttttgtgcgattagaattcaatcattcattgatatgtctaacgacacatacaccagtgaatgaatcaatctcgaaattatacacaccaattttaccatttgaatatattttacttttatcttatctactagtaataagatacgtgtaatatactattcagtgaataaaataaaactagtaacataagattgtaagaagaaggtattcaatgggcactaataatagaatagaacttttgtagccatttttgctaatttatctgaaatctggaataactaccagaagttacttccactgatggttctctaccatccttatagtggttgcttatagttatacttatacacttgaacatgtatatagaattcaatgtcattctatctagtgaggggtaaaaatgtttggagtgttgtgaatcttaattaactttttccaaatatggccacacaattttttgcagctttaaccacataactttcagcatccaccataaatcttttggagtcataaaaacacaagtggcattttcgtagttaaatagcatgttcatgggtaaagacagagcacgtgtcccgtgggctctttctttagatcatctgcgttttgaacccgacgcttcgtgttctgttcaaactttcaaaacccatagttcaattatttaagagagaaaaaaacaagagatatggtacgaccaaggggttgtctggtttgaaatcagaattttaaaaaaattgaacaaattaaaaagaaaagaaaaatctcgttgttgagaagaagaacatcttccccactctctcccttcttcttcttcttcttcaactcaaaaaacttctctctctctctctctctctctctgaatcaattaaaaaacggttttgggttcttgtcctctgttctctagtggcttctattattctcattggtggctgttccagctctcttaaggtctccttagtgtgatctcagatctgattggtccgattctatttttctttttattttggagataatttgttgttgtgcaagttcagacacgagacccagaaaatttcaatctcagctttcgtcaatgttgacccacgacagagatgaagaactctctctgttccttgagatgcgtcgtcgcgagaaagaacatagagcagattctcttttaacaggtctgtctttctctctctatatgtttatataaacttatgtaataatcatttggcaatgttgattgaatttgttctgtctcttttaggatctgataatgttagtatcaacgcaacgttgacggctgcggcggcggctgctctctctggtgtctccgaaacggcgtcgtctcaacgttatcctctcaggagaaccgctgctgagaactttctatattcggagaatgagaagtctgattacgattggtaatgtttccatttttattttgcttctaaaatatctatgctagtatcagaaatttgcaagcaaaatctcaatttttttttgttgcaagtgtatgtgcattctaaaattagaaatggtaatttaggattatacgtctagtaattgaatttgtcctaattagattgaaattaacacaataaagtggcacttattcttgctttacctcatttgagcttagtgctagagagtaattatatgtctccttcttcagcgaatcattggtctgatgttcttgtctcttgtttaggctgctaacacctccaggcacgccacagttcgagaaagagtcacatagaagtgtaatgaatcagcacgatgctcccaattcccgacccacggttcttaaatctcgggtataaactaacttgttagacagaactaattcattttcttataatgcctctggtccaagtttaagttatttctttatcctgataagcattgaaactcttgtgttgggttctgcagctagggaactgtcgtgaagatatcgtctcagggaacaataataagccccaaacaagctcttcctctgtagctggactcagaagaccatcttcttctggtagctcaaggtcaacgagcagacctgccacaccaaccagaaggtctacaactccaaccacctccacatcaaggcccgtgaccaccagagcttcaaattctagatcctcaacacccacctcacgtgccaccttaactgctgcacgtgctactacatctacagcagctccacgaaccactactacttcaagcggttcagcgagatcagctactccaactcggtctaatcctcgaccgtcttctgcatcttcaaaaaagccagtgtcaaggccagccacaccaacccgcaggccttcaaccccgaccggtccatcaatagtttcgagtaaggctccgtcgcgagggacttctccttctcctactgtgaattcgttgagtaaggctccgtcccgagggacttctccttctcctactttgaattcgtcgaggccgtggaaaccaccagagatgcctggtttctctttagaagctccaccgaatctgaggacgactttagcagacagaccggtctcagcttcaagaggcagacctggagtagcctcagcaccaggttcaagatctggttccatagaacgcggaggtggccccaccagcggcggcagcggaaatgcaagaaggcaatcttgttcgccgtccagaggtcgggctcctatcgggaacaccaacgggagtctcactggtgtgcgtgggcgagcaaaggcaagcaacggcggaagtggctgtgataacttgagcccagtggctatgggtaataaaatggttgagagagtggtgaacatgaggaaactaggtccaccgcggctaaccgagaatggtggtcgaggatcggggaaatctagctcagcttttaacagccttggatatggtagaaacctctccaaaagctcaatcgatatggccataagacatatggtacgatcacgtctcacaattttagtcaaattttctttgttgagagtagagtagcatccgaaaatcttcgattgagagtttctcacaagctcgctatagattaaacattgggcccaagctggatgatctgactcgcaagaagagtgtttcttaaagttctctggtaataataacacaattgtcgatctttggtgtgtaggatataagacgaggcatgactggaaacctccggccgcttgtgacaaaagttccggcatcatcaatgtacagtgtgagaagtcggccgggtagtgtctcaagctctccggtggccacgagcagcactgtgagctcatctgacccgagtgttgacaacatcaacattctgtgcttagacggaaacgaagccgaaaatgatgatcttcttagtgaaagaagctatgctgcttctccgcggaaccagtaccccaagttcacatcttgacccatattattatgtaatctgtgttcttgttttttgttctcacgcttcgaagcaacttgtttctaagtgatcaaccgtataatctataaacctcaggcatcaaatgtcttttttccttcataaatgttctcccaaagcaattgctaaatgctgtgtctgatattttaaaccaagatatagaacaaagtgagaatcgagaaacagaacaaaacatggaaatagtaaagaagacaaaacagagcatagaagaagaatttaacgagtttggtacctaaatctcgcgggacaaccctctttgtaaatccactaaattacttgaaaatttacagcttttggcatgtaccaaaatggttcattccaatatgaccgatacaaaaaaaaaagttgtacgataagaatctccagatatatatttgaatcttttatactatatgaagggacgaaacagagacatgtaaatgggtttcggttttcttacaagtgtaaacaaaggaacatattcataaacttgtctcgttaggtttataagagagtcaaatatacttgaagaacatgtcgttgtgaggatttggattcggtgaatcgtcttcacgtttagagacaacaagaaatcagacctttaagtgacgagtaaagtaagtagttacatgccacaactccaccaaaatcgtgtttatactttttttttttataaatacttttattactacaattttataacgattactatttcttattgaaaattggtcaaaaacattttagaactttattttactttttttgtcaacaaggtggacttttcaagttttgattttgtggcgcaaataagaaataatggaggattttcgtggaacgatgatgtcatgtgccaactgtaaattcaatttcagaccgcaatcgatagaaattaacaaacgattcgttttaagaaagaaagaaagacgcaaggcaatgtgaaaacaaaaattcctttttggatcattgagttgggatttgagaattcgaactttctctttggatgattgaatgtcagcgtagtgatgacgtcaagtaaaagctcgtttgatgacgttataaaatgttggcaaaaatttcttttttaagagaaaaatataaatgcatggttgtctgaacggcgagaagaacttggtcaaattaaatgtgccgtgtagtttggtcaggtaaacaaaactttattagtaactatcgctcttaattcatacgtatgtacgtatgagtctatgagaacctttcttagttaaacggtacgaggacaattattgtaaaatgtaaaaaaaaggtaggtaagtgatagaatttgtttggcgtatttgtgtgacttaaattgtaataaacaggtctataaaatccattgaagttgaattcttctaaccttgccttagttacaggcagaagaaaataattaaagaagaaatctaatcagtgcgacttttataatagtctcgtcgtgtgaaaaaagtaaaataaaatatagtaataaaagtctcgtcgtcgtgtagctgtcactttcgtttgtcactttcgagcatcagcagccgaacataaacaacaaaataaaattgaataccttttagcgtattcactgttcatgagttctgggtttggtttgctttgtatgctcaacaatttattgacatcttcacgaaaaagtttaaattttaaatcagacaaaagcagtctcatgatttctctttgattaactcaatatagatttcttcttcgcactagcaaataaacacattatcttcttcttcttcttctctcatcgttactttatagatttagtatcgaggagacaggtcgaaattgaggttcttttaaagaaaagttccatttcatatctctatcaaacccttttctgaatattattttgcttgtgaatttgaatttgagcttttttcctctgttcttgggaggaatttttgtctgtgtttgtgatgcgttataattgcttcggacttctagatatgtgcaacggaagtgatcgtcttggacaaagagaagctgaaggtatattctattgatggtctttaccattatttttagggttttaaattttgttctcaattttgtttctgcctttggcttacaagttactagagattctgtagaattcgagaatggttgaccaaatatcaagtcacttcatcttaatcttgtgtgctaattagaacatggaatttgtattatttgatgatatctcacaaaagttctctggtcttttgaaaaatcagagatttgcaccaacaatgtgagggtcttttcatataattcattaagatcagccactgatagtttccatccaacgaacagaatcggaggtggtggctatggcgttgtctttaaggtaataaaaatgataacttctcttacaatctgcttaaatcatgttgaggttcttctggtgaatgtagtaaagggttttgaatcttgcagggagttttgagagatggcacacaagtagctgtgaaatcactatcagcagaatctaaacaagggacacgcgagttcttgaccgagattaacttgatatcaaacattcatcatcctaaccttgttaaactcatcggttgctgcatcgaagggaacaatcggattcttgtctatgagtaccttgagaacaacagtcttgctagtgttttgcttggtaacttttgccacaattgcattcttgtctaccaaatcccatttgtgtcctgtttttctgatcttgtttgagtgatatcaggttcaaggagtagatatgtaccgcttgattggtccaaaagagctgcgatttgcgttgggacagcttcgggtttagctttccttcacgaggaagtcgaacctcatgttgttcaccgtgacatcaaggcgagtaatatcttactagactcaaacttttctcccaaaattggtgatttcgggttggctaagctttttccagacaatgtcactcatgtcagtacccgagtcgctggaacagtgtaagaatccctctataaacatatcagtttccatctttcctctacatgtattttcagctgatgaaactgcgactacaggggatacttggctccagaatatgcacttcttggtcaactgacaaaaaaagcagacgtttacagcttcgggatacttgtgcttgaggtcattagtggtaatagtagcaccagagccgcctttggagacgagtacatggttcttgttgaatgggtaaagctaaaagcctcgtacctcaacaaaaatatatatagctctatgtttgtgttaatgtttcttacaagtgaaaaaataatacattttcaaaatgtaaaatgcgaaaacaaacaatattcaatgctttaaactctgtcttgggcaggtgtggaagctgagagaagaaaggaggctactagagtgtgtagatccagaactaaccaagttccccgcagatgaagtgacccgtttcatcaaggtggctcttttctgcactcaagccgcggcgcaaaagagaccaaacatgaagcaagtgatggagatgcttcgcaggaaagagcttaacctcaacgaggatgccttaacggaacctggcgtctacagaggtgtcaacaggggacgcaaccaccgtggaatcggtcttagggtcggccaaggaggcagctcacaggagagctcgtcaacgcaacgtgacaaagggaaaagctcagccgttcctcaagggtcgacgtccaactctaatatttccttccagagcatcacagagttggctcctagatgatttttttctgttaatagagcacaattttattcttgagtatattaattagtttatgatgtgttaatatcttatacatagggtatatatgaataaaccaaagatgctatctgataaaatgttatgtagttgtctgacatttccctttgtgtcagaagccagcagtttaaaattatgattggcatgattttgcaacattcttgtattcaatgatttggcttgatttgcaacattcttgaaatgaatgattgataccttattaacttactaaaccatcggcaataatgagatgagtataatattattgggaacagatttttatgcaactaactatgcgagctttcaattgtcaaagtcaagatgcttccataacttgacaagttgtttggatgaaagatgtatatggacttatttccaattcaattatgttgtacgtgaaaaaacaaaaaacaatatgaaggatggattagacaataaaaaaatctgatgaaactaaatataacaaactgaactacgaggaaagtgcctgacacatctttagtacctcgctttgagccttttaaggtgccttcttagttatagcaagaaaatagttaaattcaacgaaataaatgttttatttgtcagtcaactatatgaaagtaagcgtgtttataattaggaagaatttttttaactactaaaattccaccataggcggcctaataattaataacaattatgaaagctagaagattaagaccatatcaaaagacagattaatagttgctttgtccttgcaagaaatatttatttaaaaattacgagaagattctaaagatcatcaacatgtaataaaaagattcaaaataatggataatgtagctgtgctcactaaattgatatatccaaaaagaaccaaaatatatcaatccgaaaataatgaacagggtcctaatggatataatcatagagatgatcacagaaaagtcgtctatatgtagcaaaaataaaagtgaaatgtggataaatcatgatcatttatttaagcgtatggtcccattttaattacataacaaataataatctacgtccaagtcagcctgctttggctgcttaagaacttttcaaaacacgacagcttcttcaccaagcaagcaagaaactcaacacaaattataagagaaaaacaaaaaaatacagacttcactatttttttcttctcctaacttattttccaaaaaatggatcatgacatcacgacgaaagtcagggcgatgtttgatcaccgtaggttaaaccgctctggatcatcactcttcacagcgtttgcttccacggttatagctctggtcgttttcaccatcgttctcgtctctaatttatcggtgagagaagatttctcagcgaaggtggtgacaatagagatcaagacaattgttccttacttacctctaagctcagagaaggaggtaagtgatcaagtcaacaataactattcgatcaagcaacaaatcacagtcaaagaagagattaacaaactgcaagttcttgaagtttttggaggcaaagacgtgtcggagaagtttcaacagagagcaacagagtttttgagagatgattgtgaggtcaagttcatgatgacatggatctcacctgcggaattgttcggtaagagagagatattatctgtagaaagcgtattcaaatctcatgctagaggttgtttgatgattttatcatccacaatggattctcttcaagggtttagaatcctgaaaccgtttcttgatcgaggttacagagttatggcggtcacgccggatttgccttttcttctcaaggacacagccggagaatcttggcttgaagagattcagaccggtaaaagagatccaggaaagatctctctagctcagaatctatcaaacctcatgagacttgcttatttgttcaaattcggaggtgtttatctagacacagacatgattgttttaaagagctttaaaactctaaggaacgtgatcggtgcgcagactctggagccggtttcgagaaactggacaagattgaacaatgcggtattgatcttcgacaagaatcatccattcttgctcaaatccattgaagaatttgcgttgacttttaatggaaacgtttggggacataacggaccgtatcttgtttcacgagtggctcgagccgtggaaggaaccgatggctataacttcaccatcttgacacctcctgcgttttatccagtgaattgggttgagattgagaagctattcaaggttccaagaacagagaaagattcaaagagagttcaagtcaaggttcttgaaatgcagaagagaagctatggattgcatttgtggaataagtttagcagaaaattcgaaattgaacaaggaagtgccatggataaattggtttcaaatcaatgtataatttgtgacagtgttgtatctgtatcatgacttttcttttttcattttgtaattccattgtagaatagcttgtaaattgtaattaacaatgaaaccctcagtttttttcatttctttcaatttaaaccctgattaaaatcaatctctctataaagctcctatcaggatggttctggctttttatgtttgggctgataattatcctatagagattagcacaggcccatataagttgacaagtcatcagttacaattacgtttcttcttcacacagcccaattagcaaaaactcggttcaagctgaaatcgaaactcgaaccggactgtgatggtggtttccgatggcggcaaacgagtgaagctcaacgtcggcggcgagatcttcgaaaccaacgcgtcgaccattcaatcatcttgcccagactctctcctcgcagctctatcgacttcaacctcccatggatcgaatccggttttcatcgatcgtgacccggagattttcgccgtcattctcaatctcctccgtactggtcgactcccagctaattcctccggcgttttttccaagcaagagctactagatgaggctatgtattacggcgtcgaatcactcctcagattggcgatgttaccgccgccgctgctaggtttcgatgcgtctcttgtctccacaatcgtaccggctgctgatggagtcccgtctgctttaaccgctactgctggagacgcctctctgtggatcgctcacggtggtcagatctccgtctacgattggagtctttcccatgctggaaccgtccgtacacatctcaacgatatcacatcgatctgccgtgtctggggcgaagctgctgcaattggatctggatccgcgtcgggacttcatttctacgatctctctggaggtcgatacatcggatctacgcactggacggatccggaagatccgaggatccataaggcacgcgtcgccgccgttgctgattcggaaggtggagtattcgcatcctttgattgcctgcacagagagaacagtgttctccagatcgacaaatccactcttcaagtcgccgccgtgatcggtcagcaatctggaaactcggctaaaaccacagtaccggagaaactccggtggctgccagcgaaaggtcttttggtgggatcagccgttcaacgtggagtgtttggttgctctggctacatccggatttgggacccaaggtccaggaacatcgtatgggaaacgaacgagccaggatcgggacgaagcactaggtttggagacgccttagctgatatggacgtggacgttgaagactcgatccttttcaaggtatgttccaagtcaggagacctcggaatggcagacattcgtaaattaggtgaagatccatgggtatatatgtcagacgagaatcccggtgcctggaaagccggcgacggaggtggttacagcgtggtacattgttacagaaagcaagtgttggccgccagaggtggtgcattagaggtatggtcaagtgttaaggagaagacaagtggtgatccaattcgcaggagaaactttgtagacaaggaagatgattccaagagagggatgatttcgaaaattgaagcaggaggtgaccggctctttgtttctcgggaatgtatggaaggtgtggaggtctgggaaacttctagtttctccggtgtggtatccgtcgagtaatggtttcccgaagaacggtgatcgatcaccctctgttttcccgggaaaatcttgttaatttcgcaggaaagtaacaaatcttcaaactttccagggtctagtagaagactagtagtactgattgtctctacccaggtccacacttgaacagaatgaagaacatcatcaagattcacactttaccattatataaagtactagagaacactctcttatgttgtaaattgatccatagatattgtctttgtaaagttttggttctagtggataaataattatagtcacaagtaactaacaaatccagtttagagacagaagcttaaaaaaaaaaaaaagacactaattgttgcgggaaaattttgtttaaaaacaatgtaaaggtatgatggaagtgatgtcggtaaaaggagaaaaaactaaccttccttgttcatcttcattgtatttaatctaattgatctatgatttctccatattttaatacccttttaagtactcaacattatctcagcgtaatgattatatctcttttagtttgcaaagcaagtttccattgtatagctaaaattcaactactctttttgtctttctcaacctactctacctaatactcttcgttcttttcttttttgatgaaatgtttaccttttttaacaagacaaagaatctttctttatgtattgctttctttgccaatgtaataaaaccttttgttgcaacttctgtgtagtgcattccacacaaggtcttgaaaggagagaggaacccacatttttaaatgcaagtccttcattggattctttagatagtattgatacattatgtttttgttaggtcagattttggacctacaatttccgaaacgcttaaagtttgttatgatgaaaaaattaaatttcatccttcttttaagaaatgtcttggaattttccttttgtagtatatattaacaagaaataataaaattttgattaatgtaatatggggtcaaaaaaagaagaaagccaagtggggatttcccatgagctttcttgtctttggtcctttgacgccgacccctccttttgaatttaaacctggcttctctctctcttttttatttttttggtcggttacaaaatatcaacgtaacttgtttaaaacaatggaaagttaataaaaacagtgtgatattttattttattgtaaaaaccttagtttgctcaatgaattttgaaaagaagatcaagaataaccatttctagtcaagaacgataaatatttctgttatcgaaaataagaaatttaaaacactcctatacaattctctaacattacagaaaaaaaaaacagagaataggagctctctgtttgaccggacgcaaatccaaaccgggtaaaatcaagaagaagaccacgttgagactgagtttgatctcgacagaggaaaagaagagttcaagaactcaatgcaatcttcaatagcttctgctcgatgagactctgtctcgtttacagactttgacctcttcatataaatagctgacgaagaagaagacgacgacgacgaaggcaacaaaaacgatgacgtttttcttctatcagtagtatttcttctgaaggaaataaaacgcagcgttttggcgaatcttgctccaatacgttggatcaatttcctcgcggccggcgagctccttagaccaaaactgagaattccgacgagaaccacccttctccggctgtgatgtgacgagcttaaaccgtcgtgttttgggaatatgggttcgtctgtggcttctgggttcgggttaaagcttactcttttgcatgctcttcgtgacatattttttgttgtctgaaattgcggtgaagagagagagagagacagggcgaggagaaacagagagagagagaggggttgagagaagaccaaatagcaaatactaaagagaagcaaatgggatattttgaagactatttatggggtgttgtctaatgacataaaagacattggggtgaaattgtaaagatataaatatggtggggtcagtttaacaaccttactaaaaattgaaacttgtaactcacaattttctactttctaattgtataatgtggatttagtgtgagagtggttatatggaaatatttatcttatcttttctacagtttttccttatctataagagctacctactactacatgtgtgtattaatgaaaaaataagagcaacttaaacaaatgctgatcatgatcatggggatgagtactggctcgtcaagggtattgttcgctcgtggaatgagttataagtttttgctcatcttcttaatgaaaaaatagaataaacacacattttgttatactactaggcttttcctaaacccatttcaaactctttaaggtaagtttattaaccaaattatgatccgtcactctaacattaaatggaagtttgttaaccaaaaaaaaaaaaaaagttagtttacattagtactatttatagatttgaacaatcgatctgtccttagatatgtaaataatttatactaattctaactgcgtataagcaaaacttaatggtactaaaatcaaccttagtcagcaaccactactaagacagagagagaaagtgagtgtgtctgtgagggcgaatcaatgtctctgctttctccagaagatgatatttactttttgtgtcaattagctgtataacgtcttcttcacataaaacaagaacactccacttactaaaaaaaataattatttcttcttgaagagtggaattctttctcgaatcttagaaaattccatttagaactaaagaagagagagagatccagtttctcgtcccagttaagctatggccatgttcaaaaccttatcttttttgttccttttgtgctttcagatacatggaacggtggctgcagatgaaaattccttgttttcattcaatggttttgtaaaatctccgagctttgacaagagggttgctctgtttggagattcgaagctggtcaatgacagttctttgattcagctgactgactcagtgactcgaagcgttggtcgagtcgtttacaagaaacccatcaatcttttcaaaggtaaacagaggaattcgagatctttctctactcacttctcgttttcttccatgtccaacgagattggtgatgatgtcttggcttttgtaatggttccatctagtttggatcttagtctgtttggtaagaaggacaacagttcctctgctttaggttttttatcacaatatgcaaagaacgagacagttgttgctgtcgagtttggtatctccaggacaggaaacagtgcaagaattttagttggtagacctgaatctgctgaaattagaaacctttcgtttgtgggtgacttgatgatggacaatggaaggactctgagctgtatgattgagtatgaggcaagttctaagagaatgatggttcgattcagaaaatctggttcggtaaagctgtttgatccgttcttctctttctcggtagacttggccaagttatggaaaggtggtgaagtcactgtgggtttaagctctgccaatgggaactcttcttccaaggcacattttctccattcatggagatttgaaataagacatcctcctccgatgtggatgcattcagtgccgcttgaaccgaatgaagtttcaaaggaggaggaaaatggtcgagggagaagtgagtgtacgcggaaaatgcttggtgctttgatctttggtgcagcttgtggagccttaggggcactgctgggtttgtatctctggacgatatgccgtgttaggcggtcaatggccgtggttccagaggaatgtgctattgaacaaggcaagaagtagtgagtagtttggttttggtgttgaaaagttgtcttgtgttgtggtgtaaatttaggaactttctcttcttcttcttccctcttgtttacttgatcgttctttagtgattcttatgtctgtttacttagttgcaggttttgtgaaatgacttttcacatgtaaaatctaaactgtgagaagatgtaagcttattgatatgttgcaaattaacttagttgttcatgttgttcttgatccatttggattatgagctgtgcatttatcaattttctgtttctggatcggagtcaagaaccaggacccactttgtcttcttctcactttggtgttttattgcaacagaggaatgtgaaatctgaaatgagtacataaaaaaagtctcgtgaacagagttgaaatgtctagaaacaactcagcattcacatgtgtccatcagttgtcacttgcttctatgtcgcttataagtaagtaagtctccaccagaagatagagactgatgtaatgtgaatctaaactcagcatgggacacaaacaaaaggaaagcagatactaaaaagataatgtttcaaaagaccatcttcgtttgtcactcgtgctaatggaaataatcatcatactctcttacaccaactagttttgtaaaaacacaccaagtccacattcctgccagcaacaaacaagatttactgtaacgatagagatacagtgtctgttcaaacatgcacaaattacacaaaggaaattaaatcaccttttgttctcgccatgtcagatatttgtactgtgctaattgggtctccttcgatggatccctctcttccttcacttggattttcgtctcatttcctataagaccttgagctttggctgcaaacaaacccagttacctgatctgatagtactcaaggaacgagaataaagccttgttttcttggctacatgaaaacttagtccacatcaccaaaggcgaaagaaacatagtcgcatgttcgtatgaaatttgagctcctaccattgtatctgattttgtgaacatatctggtgatcttcagctctgtacgaaatcaaatatggtcgagatgctgctcaccgttagtgtgtccttgttttattacacacaatcaagagaaccttgttccacgatatcaggattgacaacggcatcatctttcatcaaatcataaagatcctcgaggaacatctcgatttttcctatttcagaatgagatttgtctcctgcagcaaaaatgtgtgttctctgttccacatcaatccagctatatccaggtaccttcttgactcctctgtctctcatgactttcctcaaagcattggccttttcccaacatccctgtgaggcatatatgttcgaaagaagaacataagctgacgagttttgtggttctaattcaatgagcttctcggcagaaatttctcccctaatgtcatctccatgaatcctacatgcaccaagaagagatgaccaaagtcttgcatctggtttcaggttttgtgcttctatgaagtcatcagcttcttgaagatatccccatctcccaagaagatcaaccatacaagctacatgatctacacgcgcttcaataccatattgaccaatcatcatctcaaaaatctttcgtccatctgacactttccctgcatggctacaagctgtaagaacacctaggaaagtgatttcatctggcatgatatgggattgtctcatagaatcaaagattttcagggcatcttcagcgtaaccatttttcgcatatccattgatcaaggagttccatgagacaacgttgcttctacgcctcatttcatcgaaaacttgtgacgaacctttcatgtccccacatttagcatacatgtctattagggtgttagaggtcaactcgtccaagtcatgggccaagtgaaaaataagagaatggatagctctaccttctcttaaagaggaaaggacagaacacactcgaagaacagtgacaaatgttgcctggtcaggtagaacaccatcatgacgcatttctttgtaaaacttcaaggcctcctcataaaatccattctgactgtgacctgacatcattcccgtccaaagaacaatactcttagggcttgataactctgagaagagtgcacaagcctctgtcattccacgtgaattcatgtacatgcccaaaagggaaatccctagatattcaccttcagatgagaagcccctctttgttatctgaccatgaaattgcgttcctagagttaaactttctggtttatgacaagcttcaacaatggtggcaaaagtgatttcagatgggttaacacctctggtcagcatttcttgaaagagaactacagcttcttctaagttgttctgagaataacctgcaattagagcattcattgacacaacgctccactcaggcagagaagagaaaactttacgtgcatctttgatgattccacacttggaatacatgtcaatgagcgagctaccagtatgaagatctctgtctaggccacatttgacagagaggcagtgaacttgttttccttgataaagaccatgaacatgtgtacatgccttaagtgtgctagccaaacatgctccatcagacactataccacacaaattcatcctcttgaacaagtcaaaagcttcactctcattctcatcttggacataactcccaattattgtgttccaagttacattatcacgatcacacatgcgctcaaaaatttgccttgcatcttcaagagctccgcattttgcatacatatctactaatgcatttcctacgaataagttttttgctaacttcttcttgatgatgattgagtgaaactggcttcccatttctagatcatgtgatgcagcacaagtgcttaaaaggcttgtaaaggtaaagtcatcaatgttataaccagaagatttcatatccataaacagttccataaccttgtgggattcaccattatgtgcataaccccttatcatcgcgttccagaagacgtcatttttttcctccaaagcttcaaatacctttgcagcagcctccattttctcacatttcgagtacatgctaaccaaagaactgccgacataaatattggaagcgagacctagtttaatagcctctgcatgaactaccaaacctaaatcaagattagctacaatcccaatagcactcaaaacgcttcctaaggtagaacgggtggatttaacactagatttccgcatattgaaaaaatattcaatagccacagtctcacatcctcttttcccatgccctgaaatcattacattccacgctaccacatctgggcttgacatctccccaaacaacagacgtgcatcctttagcttccccaacctgatgtacgtatttataacagtcacaaaagctaaatgatcaggccgatggccttcatcccgcatcctttcaaatactaagacagcttcctctggcaaaccagccttcacatagccagaaaacaaacacgtccagcaaactgtattaggatccactatccattcaaaaactcgtcgagcatcactaatacggtcacacttggcatacatatcaactaaagcccctccacaatacgagttgcgttctagccccattttaatcatactgcaatgaatttgtctaccaaactctacattagtctccctggcacaggttgataaaacaatcgaaaaagtgaatttatttggaaaaatctgattctcaaacaatgatacaaaactccttaagacctttcctggtttcccaatgctggaatacatcgatagcattgagttccacgccgttacatctttttcaaggaagtcgaattgcttctcagcataagaaacttgtgcacacttggcatataaatccacaatggcgttacctaatctaccttctgaatctattccaagtatcaagcttttggaatggacagctttgccaattctcaaggctagtgcaagtctttgaggcatttcgtcgaacactttgcgactcttgaataatttgcattgccccaaacagatttctaggagacgttgatgtatctgatcatggctgggcaaaacatgtccatagattcgacgacccaaatccggggaataactcaaacgacgtacaaaggagaaagaatcaaacatggccgaggacggcgtcaagagaactcggaaatacatgattgagactgcagtccgacaaaaaaggaaccttgccggagctagaacagaggtctcaattcctctataaaccatgagaaacaaaaagcatccaaacgaacagggtcgtcgtgagtaaagaaattcgaaaagctgtttcaaaaaaattatactttttagcggaaaaaaatgagaagaatcaaccttttcgggttgacccgtaaacccgccggttgttgactcggattaggactcgtatgtagtgtgaattagaggttctctggtcatttacaacacataattagaggttcgatgaagaaattattctgtgtaagtgtgaatttaaatatagcaaacctataagctcaaaactttgaatatggccaatttataaagaaatttatgtgtggaagtatgactttaatgtaattaagaaatattagagccaatctataataatgtctcaaatatagggtcttttatgcaaatactttaaaactcaaaactggttttggataatgcgtaaactaaattaaaaaacgagaggtgggttactctgaaacgagccttcttcttcttcgttgaagaaaacatagaagatgatgaacacacttcatgcatttcagacaaccttaacaccaaactttcatgttcttttcaatgcctcgagacattctctttcccgaccccaatttctctgtctctccaaatcgggagacggaacttcagattctgattctgatcccgaccctccaaaacccgaaggcgatactcgcaggcaagaactcttagctaggatcgccatgattcagacatcgaaggtccgtttgacggatttcttggacgagagatcagagtatctcaccaagtttgctgaagaagccaatgcggagtttgacaaggttggagaagacgccatgaaagaccttgacgaagctagcacaagggtatgtatcagttgaaaacgataacattttgaaatctcgtatcatatggaaatagtcttaacctgtgcacaatacagttttagaacagtagaatgtcttgtttcaatggcttaccttaattctctgatgcagtttgatccttatgaattgtctttactctctagatcaagtgaactcagaagctttcagatattgtgatttgctcgatgatattgcaggaacagaacgatagataagctgatattgtttttctttccgggtgattgagcagatactggagaatatcgaaagcaagatgcaagcttttgaggaatctgcgggattgaacagattagagatcgaggagaacgataataagttggctgagtttgaggagaagattcaagtagacaggaatgaaggattgttctttaaaagcttacgtgacaaaaaaccagtggatagagagcaagctagagaggaaactgagaaaatacaagaggttaccaaagaaagtgcaggatcaaagtcaagaaggaatatttacctcgggttaattgggattgtggttctcgcaattgctgattccttcgtttcttcaccggattggagaaaagtcgcaattcttggagctatccttgtcccactgctcactcaattcgtatacgagcagacattattatcagaagcagataagggaaaggaaaacaagaaggaatgaacgatagaagccgacaaactctgtattaatcgaaagagatgaatataacttgatggcatagacccaaagtgtgaaacttatcactttaggtttgatgcgtcaagctacagcttttcttttgcatcatcaaatatcagatctcgatgatgtttactcgaatcattcaaactaatgtgtatcacccaaatgcttttgatgtatgtatgtatgtataatactagttcatcagatgatatagctaacttgattcttatcgacttactgcagtttacctcctgtcacttccaagcaccgagacatacaattcaacctccaaaacaaagattcagggtcagagcattgtaccttatcacgcaaagctagctgagctggcccagagatcatccagggtcaaactgaaccctagagagttatacagcaatatgcaacagattaaggtttcctttaatattcatcacattagcgattcacgacagctcgaacaagtatgttccaggtgtaaacagttggaaaaatgccatggtttctagcatcatcaaagaattccatagcatacgacactccgcggcacatacacaaccctttcattatagtattgtaggatataatatcaggttgcaaccccatcttgtacatgtaaccccaaatcactgtggctctgttgctatctccaactttgaagaatccttccatcaaggtgttgtaggttacaagatttgcagtgcaattccgatgctccatatttgccatgacagtcattgcatcatcaagtttcccaacagagcacagaccatgaattagtatgttatgcatcatcacatcggtttcgagtcccgattgaagaaattggtgccacaattcaagggccaaatcgatcttcctgtcgcggcaaagaccacataagagtatactataagttttcagatctggtttccatccgttttcaagcatttctttcacaaaagcagatgcttcaccaaatttccctgctttacacaaaccgcaaataagaatgttgtaggatacaacagtcgggcgacaaccgttcttccccatctctctcagaaaaaaggaagcctcaccaagtcttgagtctcggattaaaccacctattaatgcattacagacatgagaatttagctccacgccatgcttactcatctcttttaccaaatttgacgcttcttctaatcttttctttttgcacaaacagtctataattgacgcatatgcataaacatccagatgcccaccactgctctccacctcttgcatcacccccaaggctttattcacataaccattcacacataacccgtgaataaaaataccgtaagtagttttgtcagctgcatagcccttggcaggcataagcctccaaatcattgttgcttcatcgatcttcccattctccaacaaccctttaatcaaaatgttataactcactatgttaactgaattcttgtgctccatgattctccacaactccaaactctccttaattttcccacaacggcaaaacccaccaagcatagtattgtatgtaaccacatcaatcgaggctttcctttcgtccaactcattaaacacactttcagccttatcaacattacctgcatcgcacagcccatgtatcaaactgctatatgtatataaatctttttcacgctcattttgtttcattctctcccatatctttaaacaatcatctactcttccgcatttgctcaaaccactaatcatgatgttgtgagtcttaacattcggataaacagaagagtcctccaacagtctgtcccacagttccatagccgtcttgtgatctttttccttaagaaacccatcaattaagatattataacacgtgacatcaggtgccactcctctttcagacatttcatcgaacagttccagtgcatcatccaatttcccagctttagcaagatcgttgatcacagtgctgtaactaaacacatcaggcttaaacccctctttccacatccaatctagaaaccctctcgctttctcgaactccttcttcttacaagacattttaatcaaaacattatacgtctgcagatttggcgccactccagcagtctcgaagtaggcgaacaaggactcgactttaacccattgtttcgcctccacgaacgcattaagtagagtgttataagatcgaatcgcaggctcgcacccgaaaatctctcgcattcgtttgaaaacatctagagcttgatcaggcatggagttctttccgtaggttttgataaccgataaagcgacatcttcgtcgcatttacattcttgtgacctaataagctcgacgattcgacttacatgattaaccatccgcgtctccgagagacgtcggaggatatggtggtaaacgacggcggagtgtgcatagcctggatggcgagtcgccgaatcgaatagagcaaaagccgcacgcgggttcttctccgatttcaagagcttaaggacgtgtttgggtgacagcgactttgggaacacgaccatgtgagagtttttggtgaacgttatttctccggcatgttttgggctttttgcctttaattagaagtgaagtaataaactctttgttgattatagttagtcaacaatctctttcgattttaaaattttaatttaggttaactaacaaaattatcagactattcaatttatttgttccaatgaaaattaactaatcaaaatttggttaatcattggaaaaaatttaggtgttgattgggaagcctggaaccaaaaatatagctggtcgaatggcggtttattccggttaaaatagacaacgacaacaagtgattcgtttgagaatgcatcccctccttaacattacaaagtaaaccaattgaaccgaaattaaacctaaaccaacgaaatactaaaaacaaaggttcagcttcatagagctaattaaaccatccaatgaacaattttgttgatcaatacagcctcattacactcctcgctatagaatgcccgtgactattcgcccaccctccgccgccgccacctcctgctcctcctgtaccgctcattctccgactagctttcatatgtggcaagtaaaacttcaacattccgttttccccattcttaggtgagtaccttgaactcttattcctcctatccaatccgttgactttcctcgctgatccacctccggaactcctccagctcacattgctattactcctcaccatcctcggccctcctcctcctcctcctccattcctcagctccggccatgactccgataacgatctctccaccattccaccgtttaatctcctatacctatcctcttcctcctcctcctcttcctcatacttgttaacactcttcctgtaaataagtcctaaaatgctccacttcccccaccgtctcgacttcttgttattatcgttactattcactttcctatcgccgatcatcatcgccggttcccggaaagatccgttatctgccgtctccacggcgtagttgttgttatctctcagtgatcctgagtaagcgtcaattgatatagccgacgacactgaaagctttggctcgtccatatccgccacaacggctgcagccgttttcctcatggagctactagacctgtcgagacttttccgcctccttgacgatgagtcagtatagtagtctcgggtttggattgatccgccgggtatgataaccgggtctgacacaccgttggtttggttaaccaccggtggtggtggcgccggttcttccaccggaaactgcatatccgctcgggttacgtgacggtgcaccggcggcggcgcatcctccaccaccgagagcattgacggcggcggaggagctctcgcggcgggaggaaacattgtccgtccaatcaaagacccgtcccaagaagctctcggctcgtcaaacgaataacgaggatcatcaagcgagatcctaccgatgtcaacggagaatctaccggcgtcaagagagaatcttccggcgtctagagagaatcgagggtcggtatcgcacgacctccgaccatatccgtaatcagcaatctccgattgagtatcccggagctgtctcccaatcggtttctccaccggtaatctagctgatcctggccgatggtcgccgccgttacgccgcttcttcatcttttgattctgcctccatttctgaagcttcttgctgaaaacagaggccgccgaccaaaaactccgtcgtaccgatggcttcttggtttgagaatcaagatctatgtaatcctttattggctttaactcctcttcgcttaaaccctttgttggtttcaccgcttcttcaatctcctctctaacttcaacaatctcgtcgcttttttccctcattagttcgccggaatcattgagaatctcaaagtcgccagcttcaacgtagtcttcctcctcctcctcttcaagttcttcgtcgtcactttcagcttctccttcatcgtttacctctagaacaggctccgcaacgcttgatttcctcggctcgacatcaatctcaccgccggtgacattgcttggaaggtttcgttgctcatcttggctaaacaagttccaaagagagcttcgaagcctgacgtcacaagacctacgttgtggctcaaacacgccggagaatccttcgttgttcttggatgctgagaaagatttcgtacgacggagctccgggaagaatccgggtttaacccggccgtttccgtttgtatttacaccgcccactccgttgtttccggaaggcttaaagagagccttgagagccgcagcagagatggtcggaggctttttagaggaagaagaggaaccgccattgttggtctgatctaagactgagagacgttcacagagacaagaagggcaaaaaccggtgaaccgctcttctgggtgacggttgcaagaggtagagagacggtgaggctgcggaggttgtggaggcggagcaagagcagctgcggcggcggagactgggtcagtagctggattcatgacgggaaatggtggttaatcctccctctggtctcatatactatatcgtcatcactgtctggtctctggcttatagagagaaagacaacacttaaggttagagagagagattgggtagtgttgtctctgaaacttcgtcttgttccaacggtaattgaaagagaaaggagatgaacaagaaaaaaacaaaacaaaagaattattatagaaaaaccaaattagtgttttcaaataaacaaaagttttaggatatggttttagcgtgttaatgtacggttatctagaaattttgttcagatttattcatatgatataagccaaatcttatttttatgtactatatctaacataaaacatattaaacctttgtccacttcaatattttgctttttattttctttgtcagttacattttttttttgttaacatgcaaattaattggagaaatatgatatgtctaaattgaccttatgttctgtcgatttttgtctcatgtaatgctaatataaacccgttacttgttgggtcggtggcaaagtggatttttttccctgctttgtcaaaagcaattttaactaaaaaatcaaaattttcacactacttttgacaaaattttcaaaaagcaacaacacatgcttcattttaatctaaaacaataactctatcgtgattcaacgataagtatggggtgcgtgtgttatttagtacatgatgattttgttgatctaataaagtccgtttaaagttacaaacaaattatttcaacgatattaattgattagttaatactagtagtattttgatagtgctgcatcttgtgcatttcttacagtgctaccgtaataatcatgtcaattatcgcatcaatcatagcaacaggcgtcaactatggaatttacccgctttaaccacagtaacaactaagaatttactagtatttgtttttaatttaaagaaattttaaaaagagatactttggaattaaaaagattcggacccaaaaaaaaaaggaaaagcaaatcacgccatcacactcctaatttcttgtctctatgacactctctcctttcgctttctctcttctttcctttttctttttctctcttttgtttttctgtgttatatattcatacatttctccaaactaatcttctcgatattctaacattaagacgaaaaacagaggtttaaaattaagacgaataattcataacaaaaatcaagtactttcaaaattcatttttaaagttatactgtttgcaagaagaagagaggttatagtcaagaaaaaacacgagaaaacattgatcaagttttcgttatcaaagactgtattatttgtatgctttctttttttgttgtgatatgcattctatataactttaactttagttttattcctttatctgatcaaatttgtcttggcttttcttttctttctgttttccccacagaataatattcaatttagatattcaaatatatatatttgctattaatatgatttaggaactatagtacgtacgggtctccgaatgtctctagcatgggaaacaaatattgtccttcacctaaacgccgctcgtttggtgaatcattttgttctttcgtataaactacaacatactgtactaacattctagtaaccatcgtaagatataatttactatcgtattttaattaaggtaatattagaggatgaccaaatttgacagcattattaataaaatagccttcgtgcagaaaagttgggtaaataacatttttttatccttcgaaataactattttaccctttataaatgagataaactctttctttccgacaatagctgctacatgtaggaaacaaaagataatacgaaataatgattacaccgctacttcttaaaaaatcatgcaatattagaccactacttattaaaatcacacgcaatatctcttataccttaaaaatgtatacgtaaaagaaaacttagttaaaagatagccatttagaaacagttgtgattgagtatagaaatattgcataagatatttaaggacatgctatttatttttattacattaaaatgtaggtttattgttttgacaatatggtaaatgggtttcaacagagataagcaaaccacatatgtgttatttatagattacatgtgattgtacaaatttgcatgtgattataaaaaaaaacataaatcatgaatcactaacttacttgtgattttagtaaaaaaacatagattatttgtaaaatgcacattatctttaaaaaaatattatcttatcaaaaaatataaacgttttaggaaaatatacatatcaaatagaaaaatagaaaaatagcatgaagtattcaaaaattacatgctatcgtttgaattgagacatacggatcattgtaattttagtaaagaacaagtattatttaaaagaaactttgaaaaatacaatgttttagaataaaaatacatgtcaacaaaagtaaacggcggtggtgatgaatacggaagaggcggtggtgttatggatatggtggtgaatacggaggcggtagtgtttacagatctaataatactaaatacggaggaggcggtggtgttacggatctagtggtggttattgttgtaagggaagaggaggttatgaaagctttagtggtaaaactatttgcctataaagctatttgtccccctcaaccaaaatcctattatagaaatattagagtaatttaaagttggtttccgacaagtactatacgcctatggttagtttatataatattatggattttatggtcatctagtgcatatacccttttaattattcgattacattcttcacttcttccttttttttttttttttttttttaagtaatcttgagcagattgatatatagaaaggatgtgtattcgtgtgtatatatatattatcggacgtgtgggtaagaatctcccaagtaaactaactcgttcccacgtaagtataattcatcattggttcattatctatttattgtacagtatgtgtgtatttctatgtctttttgtattaaaggtaactttcgtagttaattcgtaagcatgtcgttttttttttagtggtcaaattgtaagtatatcttcttcttctttttttgcgtttaaataattttttggtcgtgtgtgcgtgacggactgacgctcattgtcattgttgcctcgtatcccaccttaaacctcacgcaatcaatgccattaatataggtgtctttattaataataatggtgatttattagtaattcactttcactttaacgttttttatttttattgccaaaaaaattattctctactatattttagtaaaatactgaatttagagatataaacaatagagaacataaatgcttgtaattctgtttaacggagtcaaatttctaacaaagccaatttaattgcaacgcataataagttaaagccggttttatgaacattggacagtaaaccggttagtaataatactgcaatcttttttaaaaaaacataataattatttcaccgctatatattataatatattatctttggactgtgtaatttaatcatgaattttaaaagatcatgattgtaaatttcctccattatgtggtatcaataaaatgaaggaaaacatgaaagaacattttggtgctaataatattattagtatggtaaaaggtttccaaagtgttaaacaaaagtataacaaattataaaagtattttaacaaagtataacaaatattttgatattattccattagtctataatttgtattatagtgttttatttgatttatgaaacacattggattaaaggtaaagaaaaaaagagagaggtataatcattacaagagaaattatgagttggaaaaggacaatcaaatatgaacctttttggcccacaacattcgacaactcatagaaatcaaaggcttttcgtttttcccaatttatcaagaagaaaaaacaacccaactaataatttttctctttctttttcttatttttaaaatcggaaaagatttattattttacataaaaagcctctattttggacccaacatgcttctgtatctcattctattcacatttatgaaagtctctttagttcctttcttactcagatactctaactaataagtgtccatgtatatctttgttatgtacacatccgtataaatggttgtgccattgtattaaacatgtgatatattaatagagtgtatcatatggtacggtcaggattaaaacaaatatgttacacaatgctatttcatatgaattttatttatttataattatatggtaatgtaaatattgtaagacaactttgtatgagattaggtgaactaatgacagatggaagagatgaaaaagagacataagaagaggaggaagctaaacatctactttgagatttgttgttagaatttaaaattttataagaatgaggaatcccaataaaggagggagctgttttttttttagcatgttactaaagcaagacaaaaaagcactcaaaacaggacaaatttctaggatttgctttattactaattttcttttgtgaaatagtagagatttcttagatgattagtttttacttggcataaatgtagagttaccgatttgcatatttagtaaaaaatgactttagattcaaacgattttactacttgatcattttttaaaaccattaactaactttatacacatgaatatttgcttatgtttccttttgagagtggatcacaagcatatattttgaacaaaaagaaaagaatatcatcgtatatatgttttcttttgcacaccattatcgtatattttatgtaacttgtagataaataactatcacaaaacaagtccaaaaaaaaaaaaaaaagtctattacctaacccaaaaaaaaagtctattcttgccatgaaaatcagcagctagtagtagttactagttagttctcaaaggaagagacatacgaaaaggcatagttgaaacactacggacatatctttaacactactttggtggatccgtttttttttgtagatgacagattcgatcttgaaaattacaagatcaaacaagtttaataatactataaagaaattactttaagagttccctataagtaactttatcagaaaaaaatggttggtgcaataaaaatataaacacaaaccagtcaatgtaagacaaatcaggaagagcaacaaaacaattcattattattgaatttgtaaggtgaagtaactgataactgtacagagtttatttgtataatctttctacttgaactaattggacaacattctatcactagttctatttttgtgctcaagcattatcttggcaacaatttcgctaactttatgagacacatctggaatcattaaagctgcttcatcaaacaactgagctctaagttcacctgagatttgatcccgaggagaagctgtagataattccgatattgactggacgaaaaccgcagcagcagtgtttaaaccgtgtaacgcttgacggcaagaagttatcctttcttgaagtgactcgtctgcaagtgtatcgtggaatacttctgaagacgtcttgtcctgtgacatagcaaaaccaatgatgaaacctgtttatttagttacatatatacgaacataatgttggcacttagcaccatttctggagattttatgcatctatgagtgattttaagcctagtaatatgtaagtgtgtctgtataataaatctgtgctgtgtaatgtataagtgagtagatatatacaaaatatgacgtggtgaaacctgctcaggatgttcttctgaactatgtgaagattgatcattcaccgtatcaagagggatatgttcttggatcgacctcaaagtcttgtaccctgatttttgggagggtgtacgcgtaaattgtttagttccgccaatgtagtctcttcttaggacaaactgagacgaatatcttctttgctgcgatgatttttcggcctcgacctatggttaaagtaaacatatttggccatcaagatttctattggcaacctaaaacatgtcgaagcaaatagggaagagagatcttacattgtctattattgacaaactgttatcaaactgtttgaacatgtccccctgcccggcagaatgtttggtgcagaaattttcaggtttctgttgtttaatgaaagatgcttggatgtttggagtatttagaagatccaaacacacgttgtagatagtgttccaacgggttttttctttcctattgctgttgagaagcaaaataaaaacaatcaatgtggttctcataaaagcaggcagagagatagagagaagaattgcagtaatgaccagaaacaagctagagcttcttacctaggatcatctccttgaagccctgaagtttcagtatcgttggagcttttggacaggcttccaaggcatgcattttcggttcttgaaccttgcttgggagtttggtattcaagattcacagaagagcattcttcagcattgtcaatagtatttgccatacttttatcttcatgtttctgttgtggaggcaataaagatgcccaatatcagaagaactaaaagccttagctgaaattttgggtctcacaaagcatttcataaagatacactctatcctgattcctaaaatcagaaagcaggcaacttttttggggttgtacctggtttgaaatggaatcttgacaattggtagcaatatcagatgtttccactttagcttgagcccatttaggaagccgagaaacgctgaacttaaatgaggatgtccatggggagcgttgctgcatctgatctgcgttctcctctactggcttatagtttgcagaacatgatgcatcatttggattgtcttcctccaaatcaaccgcaatttgcttgaacttttccagttgggccacagttaacctgccattttcatttactgcccgtataatacgagtagccattcgcaaaggaagtttccagacaaaaatacagccgtcacttgcaacctgacaataaacaccaaagaaaagttaaaagcaaagttttatctcactttttcgttttcatttgaggcatacaagaaagatagatccaggcttttgagcagagaaagctcttttacggtgattcaattcaataagaatgagacattgatcttgaaatcatccaaaagtcatggttcttacagttgtaagtaacagaaaactacaattcagaaacttactgatatgatatgtttgcaatcaggtaggaaaataacaccagtcacagcttcaccatgtcctgtggcctgagcaaccagctctccggtgacaaagtccacaaagcaaattgtcctgttagagtaggagcataccaagtagttgcagcttgggtccaaaatgacctgtggaagagatcatattgtcagcactagaacatcaaacaatgttgaagtctaaccaaacagtttgttcaatgcacctttacgggatctccatggtctcggtcttgcttgaatgatctgacaagctttccactttctatgtcaaatatgtttatcttcttatcctgggatcatgagataaagcatcagacttcttgtttaatctgatggtaggtgtacgattaattgactcaatatgctcgagataaggtggtaatatattaatgttcaccgaaaggtaacaatacctgtcccactgtgacaacaagtcctgatgttggatctacagccacatcatagatcgttccatgagagagagtttgagtatgagaaggtgaaagacgcacactacttgcttttctgttaacgtcaaacatctgcaacctgcgacaatatcaacaattatgtcataaatttctccaaagtaaatttgcaagtttcgaggtcttgcagcatataaaacattacctatctgcaccagaagttaacattttccggccattgcatgcgaatttaacagaagttacagcagctgaaccacaaacactcccaacgggatcaaagttcctgacaatgagaaaatataagtttgtatggccttgccatggaaatcaaaagaccataacagaggttttgtttttacaccttttgacatcataaatgtgaattgcgcggccctttccaccagaagcaagcaagcttgaggcattttcagaatcaacgtttgtcagtacaggaaagctaaagctcaatgactgaatttctgcttcatgagcatcctgcaagatggttatcaataagaggcttatgaattggatgtctggacaccacccagtgaagacatagagccaatttaaaacactggtggctagtattaccataaagcatgtatattctgattcttgcagatcatatatatgaaggttccctccacagtcaccagctgctaagtactttccatcttcacttacagccagtgcccgaaacccaaatttgctaccacatgtctcaacgagatcacgttcaaaaatgccagcgctagctgcatttttaaaatattgagtggacgagttgaaaacaaacaatgaacataagtatctagaatagaaaaatactacaacattttataattacctaaatgcataatcccctgtgttgaagattctgagggattgctgcttgcattggcttctaacggattcacttggaaagcaagatcccacaacctgatggttccatcttcagaacatgtagtgaaggaaaccccttcactgcatcccctggctacacatgcagctgttggactgtgcatatttccacaagagaggtttttgatatcccaaattccggcagagtgtgatatcatcatggagcacctagtaggctggaataaggaagaaaagtttcaccatatgcagttgatgctctaagcttcaacagaacacttcagagaaagaattcagaatcaactaattttatgtggaaaatactgaagtacgtttacagttaccttgttcacatcatccacatcccaaacatagagactacgattcccatagatgacaactgtgaagccaaaataccaccttttgtcaaaaggaagatagctaagcaatgtactgctattttaaggttcttctacactcaccgagcttatctgtggtagaaaactgacaagcaactgcgtccgggaagataccaggcgaagattctatatttttgggttctggtgattgagacagattttcagtgttgctgcttttagcatctgaaaactggattgtgccagcataatctaaagtttcaggcgtaaatagctggaccattcccttgctgcaagcgcaggctatcaatcgactggatgcagatagagcaaaacatttttgaacctgacatttcattgcaagccattcgaagaagctcttgttagatgaaaaataagctcggctggggaagctttgtatctgaatgttccccaagctaacatgaaaaattactgatgtctgtggacctagagtcaacgcatacaagttaacaaaacttattgcctacgctcacaaggaaaatacaatgcttctggactatgggaaaatgattgttatgcatgtctcaatgatggggtgatccagttatggttcttagtttagcaaagaaaaagattgaaatgaagttattgtaccttcagatccaccgacttcttgattaacatcccataactcatgagcattagaacacctacacctcagaataaatttcctaattttcatcagagcgagtgtacaaaagctcatattaacagttgtaactgtgtggagcgaatacctgcttctgttagagcgtatattgagataacttcgtcaatttgttcgtcacttccactagagttcactctgttggctgatataactgacacaaacgagtttcctttttgaaaaccatcatcagtttgatttccatgaaatgctaaagatcctactttacttgaacgtgtcctctgaaaagaaccaacagtccagaacttcaagtgcttattcccggaagtaacaatgaattttccattagatgaaaatgtcacagaagttatctcagagcaattagaactcgctttgaccttcgccaccaagatgcttttgcgccagtcccaaagatatatgtatcctccaacactcaccaaatattcccctaaaggccaaagtaagcaaatccacaataacaagtaatgtggtaacaattatcaattagagcaacaaaaaggaaagaaaactaaccatttggtgaaaaggaaagacactgagatccataaagatggcctttcagctccgagacaagtcccaaagtgtcacaatcccaaatcaagactgcagagagattcggagactgagaaagatcaaatcaaacaccagaaaactatcacgatacgaaagatgaaactgattaactcaataacagcagtaaaaaagcaaatgcaaacactatcatacctctccagcagcaacaaatctcccattctgcgaaatcgccacacagctcaaaggcttaggcatacgatgagatacaacaagatgtgactgagtgcacgaatctacatcgtagactaccacaacacatcccgctaagtaaacacatttcgagctgcaagtaactgatgccaatccattggcgttcttcgtcgtcaaaccgatgatctcttgtagaattagctggaagaaataagaattcaaaatccagttagaagaaatctctatggagaaaaaaaaaacaaaaattgaatacatttgcctcgagatttggtgagcaagtgcattgatataatgatatgacgtaccttcgtggatgagctaggcttctttaatttctggctcagcttcattccgattagggtaaaacaattaaaaaaaaactaaaatttctgaggaatctggaatcggaaaccctagcgagagagagagagtgattctggggattttccgagagatgagattgtcgttactgtgtaggagggaaacaattatcaaaatattgaattttaaaaaataaattcatccgttataaattaatttaacctaaaaattagtttctctttaattttttgtttttgaaaatgggcccataagttaccaaataaagccttctaaaatgtgggcttttcaggcccatatattgtttggatttgtttcctttttttattccattttcttgaactataaatcttgttcgtttcctcttctaaatctctcgctttcaccaaccaaacccagaagaaagctcgagatcaatatcgaataaggatcacaaaattagggttttaatttgatagagaagatgaatttcagaagctttgaggagttctggcctttctacatgatgcaacactcgaatccatcgacgcgaaggttgcacttcataggtatcatcgcgagcatcgttgctttgatatgttcgattttgatcaactggtggttcttagctctggtgcctctgcttgggtacggattcgcgtggtatagccacttcttcgtggaagggaatgttccggcgagctttgggcatccgctttggtcgtttctctgcgatctcaagatgtttagtctgatgctcacaggaagcatggagagagagatgaagagacttggtaagaggccattgttgcagctctcttgaagcagcagcagatatctctatagaattgttcttgattcttcttattgcgttctgcgattggattttagactccagtttgtaattacttcatggaatcgttgtttgcgaatgatcatttcttcaaattcaaatttcgtatgaacaaaacataaattctcaagaaattaagttgtgcaaaaactttataaactcagaaaagagttgatctaatactaaagtcgaattacattttaaaaaggtacagaaatcgaaaactctagcacgaaattgtccctggatccttttgatgagctctatgaggatgtgtacctcctgtttacagatggtacctagtatcataaatctgtgttgcgggaaaaagacgggagaggcacggcttcttgaggccgtagtatcacgagcagaccgaacatcccgagcatcgggagaacaagaagccatttcagaagcttgtagtaatacatatggaaagttagtgagaattcgtctgagaaatggagtccattcttatctgccatctccaccattacagttcctgttgttctcactcccacagttggtagttttatccggtattttccagggcggtcatagatctggctctgcgttatcctcctctctccctggtaattgcctggaaccaacagcgtcgtctgtatttgaaaacagctggtttagttcagcaagaagccattgctcatctattgaggtttcaggaacttacagtaacgttgtagggtgcttgtgaaccagatggatatctatatttatcaacgatctcgatctcagcccagaagtttttgccttcctcatcacggaaacctctggtcgaatgcgtgacaaaaacgccttcacgatcataacgattggccttattgttcctgccttgatcactagatctccaagcctgatgaattcgggaaccaagtgtgaaatcagtaatttcccccattttaaaaaacaatcaaagagatgttgagcagaacccgctcgcaaatagagttcggggttgatcttgccttaaggggatggtgaggagaaggcgttgagaagcaaaagacgtttccattcatagttgagacaataagatcgagatcatctccaccgtcaacattatcagccaagaccatgctgtatctgtaactcgaaagacattggtggtcaaaatactaaagatattacgtgccgagaggaagcaaaagtgacttacgaagtttcgccaatgtcaacaacgtcagtgcacgaggtgggtccatctatgagatacaggtaaccgtcaaaggatgtagtaacgatggtgagacccttctttttctcacctcgcttgttcagatcaacaagaagaagttggttcatcactcttccatgagtcctgtatgggtaaggacggacaatagaaccatccttgccactaagaacgtatatgtttcctgatgatgtaggaaccacaacctccgtgtgtccgtcaccatcaacatcgcctatagaaggaccctgtaagagaagattggcagcaatcaataatcgtgaagtgatcaattcagagacaggttacaatgttacatggtaaataattttggtcttacgcagggacttaagatctcatgaaagcttgtatacactacaattatttgatagaattctgatgatgctcgtacaactggttcattcataagagttttctatttctgataagaataaacagaggtaattgttgacctggggaacaaggctcttaagatgtgcttcccaaatttccactccttgggtggtccatgctgctatatttccgtgtgaatcagtagttacaagttcaatctttccatcatcatttatgtcggccgcaaccactgctccttgaatttcagccatttccagtgggaatttttctctgatgtttcctgcaaaaagacaacaatcttagaatccaaaccaacatcgagatttgcaggcaaaaatgtgtagtaaaacttgtgtatgtattgtccatgaacaagaatctaataagagtgaaattttggtcttgcagggaaacggaatattcaaacttaacatagatttttttttgaagtgtgtgaccttgactatgaaagctatagttgcataatcacataaaaccgatccaaaagaaacagctcctgctagaagcattgcttggtaaaaacagtaacaggaaatgcagaattgtcatcaatgcaagaaaataaacagcaggaagtaacaagaagacttaccacgatgatccatggcgtagaataagccaaaggaagttccgacaaggatatccaaataaccatcgccatccaaatcaacaaccgttggtgaagaataaatataagcacggaagtttgctttatccgtactcaaatctagctctttgatccacttgacttgtttagtatcaagattgaaaaccacaattgaactagcaatataatttttaatgtcgataccaccaagctctttcagatgttctggattatcatagtacctgaaaattgcgtattgtgttagctgccctatattctgcaatgcaaatacattgaaaacgccaatgataatattcaagacctcatgcatgcaatacatactaatgatgcttttgcattaacagattcagagaacatttacagcatgaaagctaaacttactcggggtcgaagaaataggaaacagcaacaatcatctcctgtactccatctttgtctatgtcagcaattacctgataaaaagagatacagtaagatctcccatggaagtaagtaatccggaataatcctaaacaaggtttttgacatagatgaaactcacaggagtgcatagtatatgggcgtcaatattcacataatcttctgagttctcgtgctgcccctcaacccattcctcatcaccccacattttctcatcaacataatcgtcataatcataactgtattcatcagctaactcatcattctcacgcaacaactcaaacgatgaatctgcgtcagcttctaagcctccatcattttctactgtcgccatgcggacaccctcactgttgtctttactgtccgaatggctgtccacagattctttcgaaccatcctcttccagaagtcgcctcccacttttggttactgtctctgccgtactactgtttccagatgtccccagagtttctgaggaattacccgtactagtatttaatttaataacagtttcattcttatctccactaattttgctttgatccacctcattggtggttacatttctattgaggttttctcttgagccagctgtagtagcatttgctgccaaattatttgctccagcatccatggaggaattatgtagctctggagtaggctttacaatagcttctgtttgattattctctggtctcttttgatcctcttgagttgacacatatgaattagcgccatgaacttctttggtcatcgagactgtaacatttggtgttgtggtagttgcattcgtttctacagagtggagaagtgagagtcacaaagtaaactttcatcacgaactaaattgactctgctaattcatgtactttttctaccctctaaatactggagcttcccatcagacgtaaaatccataagaaaaaagcaagacacaaaatacaaaaacattcttcagataagctgaggcagctactcgaagcataaacttatctttatactttcaattacctacctgttcagtgtcctctagaactaggaagaacgcaaataaccaagagaccatgggagatgggaataacttaagtagcaaagaagaaactgatgtagaaaatccaatatgataaagaaacttacgagtggtcgatgacttcattgccatagcttcctcctcaagcacatcatcatgaacatcaggatgtgaacggtcaacaggatcaggattaagtcccacatgccagttcttgtgcacttttctacgtggcacttctagcttatctgacatcaaaaagcctgataccctggaaacaagaaagtatcatatgcaaaacccacaaaactctaaggatcgatgataacagacaaaagaatatccatcatctgagagaaagaattacctgaaaaagagcacttcggcattgtaggtagccagagcaatttctctaacaccatctttgtcgatatcaaatagaagaggactcgagtgcacatttgactggtgaaaagcaggccaacctagaaatttatgagagcatcagtaaccttttcaaaatccttaatattctacagcatcaaatgaacaaagcacaaaataaaatttcagaaagctaaaggtaaagaagataagatatcttgtacctggcatcttgtctccatcagctccttcaagaacttcgaggtaatgaacaaaagatggaacaacaatgtcaagctttccatcactgtaacaaaaacaaaatccggctttaagcacaaagtatggaaccagcactcattaatcatgatgccttaacccaaattcgagagagaaaacatctgattgtgagtaaaagattttaacacagaatcaacataaaaacattggtgggaaagataataaaccaaacctgttaatatcagcaatcaagggtgtagcataaacgctagaagtgacttcagtttgccatcgcagctccaattttttcgggcactgagtattcaataaagcatcttcatcactgcacaaacgaaacaacccagaaagaaacttaaatcggagaaaccaaacagaaagccttacgaggaaagaaacatatctccagcaatcaatggtatgaattatgaaacaaaaattcgatcaaattgaggcgttgcatctcaatacagatcgaaaacttacatatcggggtagcccagctcgtcatcggtggctttacgctctctgaacttattttctccataggagagattcgttaaggaaagacagagcaaacaaaccagcagacactgcctcgctcgagatttcatatgatcacactctgcgaatactaggcaaattcccttgacataaaattaaaatcgaatcagaatcgaagaactgtatccaactacgtcgatagattttgtaaaacctccccaaaatcggggtttagggaatttggaatggtgaataaaaaggagagatcgagaaggagaatgagacgaagctgagactctgtgtgtgtgggagatcgcagccggcgaaatcgaatgacgctgtgaagagtaaactgcttgccgttttgatctaagtaaaacgcacgacacagctcgctgtttagttacaaatatgagaaacgtcaattattccctatcacttcgaatgatcgaaggaagatttttaaccttttccgttcttgatttttctatgtaaaatgcgatgaaaagatttcaaatcaaaatgattgacatatgatatgagaatcggagtggtgatactttctcaatgataaaagtgtctaacattcttttgcttctgaagtataatggaaccaacaataataatatgatactaatactaaaagattacaacattcctaagtactattgctagtaatattacaaacaccttcatctaaacatatgaatcacttagaagagtaaacacatcttatcaagctaaaaccatcatcacatacccccaaacggaattttgattcataataaacccaccctaaaacctccttgaaaccgggattcttacacattcgagaaatgcagcgttctttttttttccttcttacgtacaatgttagtatagaagcaccccgggatttgcaaagaagagaagcaaaagcattactgccaacccagacatgtctttttcttgactcagcttcttgggtatattgagagaaacaaacagacgtttcatctgcggcgcgcagctttgctatccatttgaatacgatccgcatacataggcaaacggatgatctcccttatctcctgcagtagcacttcctctgtgatgttgtcctttatgcttctcatcacctattttgacatacacaatggtttagacttaacccaatcacaccggaactcaaaagacagaaagaaatgtcagttatttacatgaggaaagtaagttagtaaagtatgatcgtcaaccaataatgcaacaactcaagtatataaagagggattatggtactgacctttctgaaagtgttgatatcatttggcgttgatttatcgaccctgacccgcatgcttacccagactttctcatcctgatcccaagaacactctacaatcttcccagagtactcagcagggtctgaatcatctgttgcagtttcagcattagtagcttgtagttcttagaaataatgtaagttatgattgactgtgtttattacgagttataaatataattataagcggagatacacacctctaaaaacaacagaatttccatccatatgctttttcttccctctttcaaacaaggagagcattccacggccactctcatcctgctcgtatagaaagtcaaccgagttcatctctggatacttccatttcaacagaccttcatgggtgcggggaacataaggatcatcccagccctgttaacagagatttagatctcagatatgtatttggaagacaatatacactgtactaaaactaaaacttcactgcctttgtatgaaaaataggctttaacatcaaagatcctcttcagtcgcatggttacctgaaagattaggccgtcggcttcatgtgaaagtgatggtatgaaacccttcaaaaccttctcaaccgcagaaagcaaccagaaatcctttctccgcacctaggtgaaagaataattaacagctccataaacagtttatacaaggaaaaatataaaaatggaaaagtggcatgaatttttttataacgcaccctaaaaggctcaagatcatatctatagatatgacttcttgccttctcatgattacgggggtctatcacctccttctcgagcatcttccatctttcatagaaaggcctctgctccatttttgaattgtgcaactttctattagtatcttaagaaattaacacataatatagcaagccaaatacaactcattgatactctatactactgacaagatgtgtatgctggtaaccagattacgtcaaggtttaactgtcagcaacaaagaatactgaacaactgcgaaaaacgatataacatatttgcatggaatatgcaccatcggagtcagatgctctatatgagcataggaattgtatatgttcataattcccaaaatatttattgcaccacgagaaagtcagacatgacaaacaacaaacactctaagctaattacgacagtaagcccggcctacataatgtgtttaatttctcgaatgttctaatattctataatgagggtaatggcagctacagtatttacaatgtgcttcagtaaatactcagatcttgatcaaaagagccaccaatccaaccattattgattacataaataaataatgacaattccaacctctacaactgattggccgttgattgctaccatgtcatagattaggtatctcctctcctgcttttgtttatctggcaaggtatcgattatcatttctccatcaagtaatgtgaaatggtgcactttatcagatatgccctggcaaccaaaaacaaataagtaagaaaaaccactagttcacacaatctcgcccacaaagcaggaatattactcacttcagttgggtgcctaaaggggaaccgcatctgtaccctccggaatctaaagcttctatctactatgtaacatccatcggtggttagcagcatcatatatcgcgttccatcagctttccatgttgcataatagtaccgctgcctcaagagttgcaaattttccctgttttaccacaagagaaatattaagactaaagttctgcaaaagaaatggactaattgaccccaaaactaaggggatgcattagtccaatcatctcttttcatacactacaaagagtaacacagagattcatacctgtttaaggagacagggtgtgaacctggaaattgtgaacatcctcttccctagattagagaaaaatgaaacttgttagatactcacagatttaactaaataatattcagtgtgaccatcacatacgatttgaaatttcctaccccaatattcagtgatagcatcctataaaagaattggcggtaaccttcctcctggtctgggggtatttcatcacctagaacgtcatcatttgacatcttgacatccacctgatgactttcctcctggaaaccctaaggcagtaagaaacaataaataaataaaaccatcataaaagcaggaaaaccagattatcactttataagttttgtcagctttggataaaactcaattacagccatcaatatgcaccattaactaaattcctggtaaactgattcgcgagttatggaacctacctaaacccatctcagaggcaatatcaatatattcaaaagatcactggtaataaaatggcacagaaaaaatgattgtgatgctggaaattcagtactaagctgttctttaaatggttgcccctcactaacaaggaaagacaggtctaaagcttaaacaaacgagcaagaaatcattggaatgacggtttctgtatatagatgatcagctaaataaacaactatagcttacttgcacaggaccagcaggaccgccatcatcatcttcatcatctggcaaagcttcaccatttaaatcaagctcagtagacctcttccattcaggagttgatgggcaaatgacgctttcaggttttatttcgtgataaaacgagtataaagcatcaatataatctggtttatagatcccaggtgggcgggcatcggaaaagattttcaaagcctgacagaaaccatagtgttataagattctatactcataggaggtacataaagttcacaaatacaatgagagaagtgaaaatactcacctgtgtaacattcattggcccagatcgcatgagataatgaactatcatgaaccctgtccgattatgtccatgtgtacaatggacgagaatatactttttcgagtgttttagatttaggacaaactgattaacctgcagacagtttcatttagtgagctactaacagtaaacaaaactgcttacacaagaacataagagaaaataaaatacaacttcaggaaaacagttatgattcattttggctacaaaagaatacctcattgacaaatgcgttgacagacacattatctggcactgcatcacgacccttgcatgcaatctacaagcaaagaaatctaaagataaagcaacctgctacagcatggaggatatggatatataacagtatctaattcgtttaccttcacatgcttaatgccttctttcttcaagtctgtcgtagaatagtaacgagttgtgtttgtcaaatcgatcaccagaccaagctgaaaaattcagtgacaatacacaataacttggatcacggatataccagtgttgcatagacgatgatacatactcatacaatcaacaaagcaaggagaaagaaattccagaaattacctttctcccagctatcctctggttatggatcacctgtttaaaagagtatctacttccaggaggtacatgattattgtaagattcattcaggggaacttttgaaggaacgaggaatcctatctcattcccagaaggagggcagtctagccaacctgtgatatcggacaggctgtcaaagagttaccctatttaaagaaatttgccgaaagataaagaaaagaacacatacaagctaaaaccatttcagtaaatttagaggccgtttatacttgaagtaaatcttaagcatgaaatgataagtattcattcggtaaaaaaaatatcaccttgagggatcttgtatctatcataagctttagtatttcgattctggtaatattgatcacggaaaactggctgagagttatgtgttggcttgtcatatctcattcgtttctttctctcttcacgttcctaaagcaaaaacatatgaaaatccatcctcagactcaggggaagataagaaaacatgtggggatcaattattagagattccacattaacgatgacattagttaatagtttcctaaagtgtcctgcattaaagtgactacagaaatccatgttgagtgaagaaaatcaatagtacccgtctagcgatttcaacagcagactctatccgttcatcccgagaagaatagtcttctagatgtctcacatacggttcgtcatcttcttcgggttggggtgaagcatttaagtccatcgtagcaaccatccaagggcaaatgaacagaaattaacctaacatatccttcctctgtaagaagctacctaagttatatctgaagcatgaagaaagcacaatattatcaacctcgggaacacagaccagaatgcaaactcaaaatcatttcccaattctctcaatatagagtaacaaagccgaaaattgaagcaaataagatccaaagcagagcaagagatccatatactctcggtatccttctccaacttaactcgactaccataggaaaataaaaccctagaagctacgaatcaacgaaatctcagccgaacatttgaaattcgtcctcttctcgaaaacatatggacatcaaaatcatgcgtatcactaataagtgcgaaaactcaccaagggcatccaatatctgaggtatcaaactaaagaacacagagctttcggagaatcggaaacaacatccaaggttctttgaaacaagtaagctccgtagatgcctacgaaatccaccggagatggtgatggacggtgaaggttcagttcaaatcgcgggttcagtggaaaaaattgaaatcgaaaccctagagagagaaaattcacgaaaggaagagagagatagagagtagttgagaaaggagagagagaaagaccaagtcttccttatatactgaggccagtcgagtcaaggcaaaaacttattggtaatcaaaaaaatacaaatgagaaaatacaaataatcccttgataatttaatgacgtggaggaaaaaacattacctttttcacgtttttatcattttatgagtattcatttaccaatttgcagagattaaaaaataaaaatagtgaaaagaaaatacaacggatgtaatgatgtggaggaaaaatgacgattttttttttgtaattttaatgcaaaagttaaaaaaaaaaaaattggcttggacaagttattatttggaaaatgacaaatttcttcttaaaatagaaaaaaaatctctataagattatccacgttgaaacaaccatataatttatctcggttaagtggttgtaaaccagaacgctctacgtatataagaggctcctatgtaatcgttctaacttctaagatgaatcagaaagtttgtttcttctactctaccttcatgattcatctagtcttcgttgtctgaatctgttgaatatcatttaaaaagagatattccagtttaaaatagattcaagaaacatcacaataacaaagataatacaatcacgtcatacatttgagacatttctctgtaagatttcttaataagagttgtcaagatcctcaacatagtgttaattcagaaaaatccttacatagagcaaatggagtacaatcaaacaaacgccatgctctcaaagattctgtctgcagcaaaacaagaaaaaggaacatagctacagaagctgccaagcttcatttggtttgtcagacttttgaatcttaggtgtagattgagttacttcgtccgggtccatctttgagaggaagtttgagagaccattggttaaggcagaggttgtgatcaaagaagctctaagtaagctagtggcctgtaacacaaaagtagtttcaaaaatattaagaactcaagaatcaaagactataaattaaaaggtagaggcaccatacctcagctttgccaatgctaattacttgctcctcaatatcaccaatgttcatctgcagcttgcttaacaatgaaattgttgaggacgagttcataggagtgacaaccagatcatctgacactatgaaatttgtttctcccttcacaagtccaatactagcagaagctgaagtgaactttgcaattatttcaccgtttgaaagcacagccttgttaatctttttacagagcatgttatgaccataatgggtgaccaagcattcatattctggtgattcctggataacaacatcaagaggttgtgcccttccagtagaaataaggaagcatgcattgagaaactgtggctgctttctgcttctcaaagctcaaatctttcacacttctgcacagattaccaacacagcccatattaccaatgtcaatagaaagttcccaagcaaactcaatcgggatggcaagaaaagtgaaaagaaaatcaacgaattcttctctgcactcagcatagagaacagccctgtctgtctttctaacataaactttcaaagttaagagattgtctgcagctcctgcaacactgctttcttgtacaagtggtgtcaacattttacgtttccttgacatgcaatgtttcctcaggaaggtgtctgtcaatggagcttccgaagtgaacaaacaccctagcaaagttagaatctacatttacaaaagaaagtagtgtaagaaagatcgttattaagaagttgtcatcaagggtagatataaaaagttcaagtacctcttcaaaaccaacatcaataagcatttcttgcagcttatcaaaaccagagtaaccaaaatcattgaggacattcaaaacaagacccatagagttcaatgccactttgagatcatccgtaataacaaatgatgttctgcagctgggaaatactccatcagcttgctgttcttcaaccggaatctcacggtgcatagagcttccacaacgacacttcatggtactaacattgctgaataacttacggcatgcttcagtagaaacaaaatttgggcagacaaagaacttggtcgcctcggtgtcatcaatgttgagctttagatctctgccatgactccccttcgcactccgaggatgcagcaagaaatgcttacaagcttgagactcgaaattatcaacgtccatgtctgcaacacttttgtaaagattgtgtaaacaaccaacgactgaagactgcggattctgatgcttctcgagcaacctgacaatggtacccataggaagagtcaaaagactacagagcacatcaacaaaatccttcccagcttcagccaaaataactctgtttttctcctcatcaatgagaagtcttaggctaaacttcggcttctcaaagctcttagccatcaaaatatcaggggggtcaaatcaaagaagaaagataatttatgagcagtgttttagaaaggagtttttgtcagtaaatggaaacaaggctttcccacccatataaatagacgtgttccacagaacataatgtttagttaccataaaagattcaaatacccaaaaccaagaaacctttgagtgtccctatgagcgcatgagtttggattcatgtcccaagggaaagagtgtatattttccataaaaatgcaatcgattaaagacgagccgcccacctatctccagtaataaacaagacagtagctataagggcattgagaaagaaacgccttaatgagtttcatcagatttaggggtctgcaaagtcgactgagctacttcttgaggattagttgttaaaaataaaataaaataaaagagttacttctttaggatttttctttagagagaacactggttaatacagatttttgtaatcaaggaagctctctctcagttaactaacagcctgcaacaacgatacattcgaaagaagaagaaaaagtctaatgttaatgatataaagaagaatcaagattcatatgctgatatatatctgatctgctaacgttaatcactttctcctcaatatgactaatgttcatgcaatctttcttaacaatgaagttgacgaactcaactacagttttagatcattgtaagcaaggacaacatctcaacaagaacacgattcttaaaccccaaaagccacaagggacggtcttcagaaagaggcaacttcagagtcttaggtattagcaaagaggtgttatgatagagcaatgtaagaaaaaaagaacttttatttagaatcataaatcaacaaatgctgaaaaccattatatgagaattgcttaataggaacaacagcagaacgaaatgaaacagagaggaaaaaaaacattagaaccaaactgttttcttgaatgccttcagcaccagagaaaaactgaactcaagattctttctttggctcctttgcaagtaagttcgagagaacgttggtcaaagcagaggacgaagtcaatgaagctcttaaaatattgacgagctgcaaaaacaaatgcaggaccacaatatttaaaccgatgcagaaaggctataaaaaagaatcaattgcaaaataaaaaatagtatgagcaaacctctgctttgtagatacaaatcgattgagcctcaaagtcgttcatgttaatctgcatcttctttaacaggccaatggttgaaaatttgttcattggagtgattatcagatcatcagagacgatgaatttggtatttctcttcacaaacccactatcagctaccactgaagtgcaagacttggaagtctttggatcaataggattcaaagtaacaactttttgcccttcaccaagcacagataattcaaaacttctggaaaatttgcaaatagaataagggtgacgaaaatagggaattaaacattcatatgctggtgaagggcaactggcaatatcaaggagattcttactgcaagtatagtaacttggaataaaacaattgtaagccaaatgtcttctatacccacatcagcacaaattctttacacatccgataatggtattgtcttcgaagaacgaagacgccgactcgagaggcagaacaagaaaagtgagaagagaatcaatgaagtcttcactgcactcagcataaagaatctttctgtctaactttccaacgaacactttaatatggcatccactgccctgttctacccgtccagttttgaacattggtggaggtgacagtgtaagcatcgtcgtcatacactgtttcatgaggaatgtgcttgtcaaggcagactctgaagtgaataaattccccagtagagacaaaacctaaatttaaaaaagattttatatatatatatatatgaaagcctatataaaacactgagaaaataacaaaaagagaaaaccaaagtacctcttcagagccaacatcaatgagcatttccttaagatcgtttatatttggatatcctaggccattgagaaccttgactatttcatcgatagaattcaacatcactttcaaatcatctgtcagaatgaaagatgatctacagctaacaaacacaacatcttcagcatttcctaacgagtctacaacttgctcatcttctggaacatgaatctgatagatcatcaaagatccacagctacatcttgatttgtaaaaattgctatacttacttgagtcgctctcatgcttttttgagcatacatagaacattgtagcctgagtatcatcaatgtgcagtttgagtcttctgcaatggatctccatggagctctttggagaaagcaacatactcttacaagcctcggtcttgaaatcatcaacggccatatctgaaacacttcgactaagattcttgtaacatcctaggatttgtggtaacttctgatgcttctccagcaatcttgcaatagtccccattgggaatgtcaagagaccaaagagcacatcaacaaaatcttgaccagcctcagccaaaacaaccttgttttttttctcatcaacgagaagtttcaagctaatcttctcactcttagccattttaagttaaggaaacgagtaagagaaaagcaaggaagagcagtaactgaggttttaggtatctcggtatgaagatgtgaataagaagatgcgcctctatatattgaagaaccagcggttacgaatctcaagagttttctttatcagacagtaaatgagaataatgaaaccacaagagtcataatcttttaaccttccctatgcttgaacttggaatacaaatcctacagaatcaagttccagctgtgatatgcccaccaaaacctttgcgcttcccaaacactgcatgagttttgaacacatgtcccaatgggaaaaagcattttcgtctttaagaccagattatttcaaaaaagtgcatcgattaatgcaaaatcgccaacaaacatcgactaatttcaggcttagatgcttagggcatctccatagtgagatacggtttctcaaaaaaaaaaaaattttgtattttaataaatattagttatataattaatttttaacaataaaataatatttgaccaataaatgatgtacaagtgttcttatgggttctactctctctcatactttttgattatattttatttttatattgaacagttttctcaatgaaaaaccattgatggagatggtcttagtaactacgactctttatattcaccatctagacaaacaaaaattcctctcctgcatcacatttcctgttaggttttgagtttaagcatgccgaaacatatcattgatgagattgaatctctctcccttgccactggctttatcctcaagaatggggattttactgaggagaaaagcttgctggtgaagccaaccatgggcgggacctggcactggtctcctataaaaggtcttcactcacaggattcaatcaggaagactcgtgcctacatattgcaggagattgcaaggatgaccatctatcccgaggccggtgtcagtcctaccttgaggcgcaagaagggtattgtcattggggtggccagagctgtgtctactgagctgtatcacattgtcgagaatgacctcatagaggaggagatggacacagcgaaactggcggtgggatacgatggcgaaaccatagtgatcaaaaacgacgtggactcaaagtggaaggaggagctgtccaaacctttgaacttgtctgaaaccgaaaataaagtgattcaaagactgctcttaatctcccatggagtcattcccctccagggctactcattggtcacgacttcccaccactacaatgacaagtcgaagagagcattttccgcggtggagaggcagtttttttctcgctgtgaccaattatcttggtggaaagaggatgaagaagccttaagggacgctatgtggcacaaggctggacatccagtgaagatatctttcaagaaggagattgcctgcagtattactatcaagcagagtctggctaacgcaggtattgggagcgtcgcatgtaggctccctgccactgaagacgtcgtttggaaggctgaagcctacaggaaccttttaaaaactttgtcacctatcttcgatgatgaggtcaagtgggaggctcttgatgagatgttatcatatctgaatcatttctccgctgctaggccaacagaggtagtgaccgttcacaacgcgcctactcacctcatgagcttggacacgagggagaaggtcgtgacatggattgcacaatggtgctctcagaacgctgaaaaagtagctatttgtttaggctttcacacggccttgcttgaaaacgctggaaagtttcccggaccctcctactcgctcatggtactcagaaccaatgttgactcctacatcttagggacaaagcttttctctgattataccgtcttcaaggccaagcttcgtcaactcatggacagtgtctcatagggtccttttgcttattttgtttcgtttgtgttttctctgatgtgtctgtggattgttaataattgataactcttcgtggttttttgaaaaattctgaaacttttattgttttgctttgcagaataagcctttccttaatccttcaattctattgagatgttgacaacgtttatgagctagaattcagactcttaattaagccttaaaacctctttctaatttgcttgtcattgtctgttataggataacatctcataaagattacagaatgtttcttaaaccctaaaagccacaaggatttgtcaacttcagagtcttggaaaagaggtgttgtgacagagcaatgtaagacaaaataaattttattttaagataataattaacaaaatacttgaaaccattggtttataagactataacaatggttcattgaaaactataaagttaaccttagccatctggagcagtccatcataattaattgactcaggttcaatgtaatttattcagtaagaagataagcatgacgacaaattgtgttttttgataaaagttaaaatagaagatggaacatattgatgaacataactactgagtctctgctttggccttcttcgagattaagctccagaaagaactagttaaagctgaggatgtcatcagggaagctcttaacaaactgatagcctgcagtaaaagacataattcaatgaaagaagacaatttttccctcgagctcaaacacttaaatcaaacaaaagactaaacccatacctctagtttcccaatggtgatcacatgttcttcaacatcttctttatccaagtgcatgttcaactttagcaaactaatgtttgagaccaagttcttcggtttgataaccaaatcatcagttaccaaaaaccttgtgttttgcttcataaacccaaaactagtcaaatataaaactgatgttttattggtgaaaaacatgttctggttcttttccttcagagaattcggacgaggaggcatctttctagtgaacttaaagtcatactcattattagtttcaacgacacacttgaaactgcaatagatctcttgttgctcagtgacgacatcaagtaactgtttagggcaactataaaacgaaggaagcttggttttggaagaggatgaagcatcaattctcttgaagcttctgaataagtttccaatacaacctaaactgatattccctgcagagatgttccagacagattcaagtggcaaagctagaaaagtgaaaagaagatcaatgaagtctgctccacattcaacacagagaatcttgatgttcggttttctaacaaatgctttaaaagttatggtttggcctggtactgctccatctccagatccttgcaaagttggacttagaggtatacgagatctgatcatttgcaatgagctttgcttcttcagaaaagtgtcggttaaaggaaggtccgaagtaaagaaacattccagcaaagtcagtacctgttgatgacacaaacaaacactcaacaaaacatatatattcaaactacgaagaccaacgtaagatgatacagtaaaaaatacctcactgacaccgacatgaagaagtatttcactgagcttggaagtatctgcgtagcctaagcctctgagagtattcaaaacattatccatagagctcgcctccactttcagatcatctgttataatgaaagaagaagctttacagctgaaaaaaactccatcattatcctttctcaaaatccttccttgaacttgctcttcttcaagtcccttaatctcccgattcatcactcttttgacaaccttcgagtcaacaatttctccacattcacattcctccgtgttcgaaatgctataatgatgtctgcaggattctttaaagcctgagcaaacaaagtacttaacagccctagtgtcatcaattttcaacttcatatttctgaacttctcaagattcacactcctaggatacagtagaacttgcttacatgcttctgtctgaaaactctcaagatccatctctgaaacacttttgtaaagattgttgaaacatcctatacccacttgaggcgatttttgatgtttctcaagcaatctaacaatagttcccatgggaagagcgagaaaactaaagagaacatcaacaaaatccttaccagattcagccaagacaaccttgttcttcagttcatctatgagaagtctcacacttagcttttttgactttgtactctcagccattggagattgttaacagagaacgctaaggaagagaagaacaatacaaagagatagtaaagagaaaacgttttgaaagtttaaaccaagagaagaaggattgtgacttaaatagtgtttttaaaatttaataactttaaatgttatgaagttctattttaaaagaaattttgataactttaataaaaagaaaaataagaaataaacaaaataaataaatgaaagataataaactattgctagagagttttctataatcttgttgattagttactccataatcttgtaaagtttatcaaacaatctttctattattattattttggtagaaaacaatttttctattttaatgatacttattattactttattttgagaataaaagtgtaaaaaatcataaatcaataacaaaataatttaatttattaacaattataaattcttttattttagttggataaacacaaaaattttcttgattttataaaattttaaatatgataactccaaatttatgaagattttttacaaaacaaaaacattaaattttagcagaattttgataaaatcttaatgaataaccacagatttttcaatcacatataaaattatttaaattacaaaccaataaacacccctaaacttttgaattccccacgtcaacgtgactgtgcattccacgtggcggatgtgggccctatagttggaccatgactcggacggatgttgaaattcattgtcgttgccaattgcgtttgtctcactgaaactgtgaaaattttatctcttttatagataaagaatcttgcttttttcagttttcagtatgaagaagaattgaagagagtgtccgaggaaggagacctttggtttcagtttgtgagtcttgttgtaatggctttatcaatggagtttgggttttcaattgggtcatgcttcaaggcaccaaacccacctgttctaatctctgcaagccctaataagatcaatttcacgttgagaaggagaaagaaaagattcttacttagagtctctgctgtgtcgtataaggaattcgcagagtctgctttagaagaaaccaggaaaaggatcgttcttgaaccttcacatctccaggtatatgcaattacatttcgttagtgtagtgggaggattatatttctcattgtttcttgctgtgaattttgggtaaattgatttgagttgtcattaggaaccaaacaaataactttactgttatagactgcttatataagtaaaagttcagattttgtttttctaatcacgaaactgtttcaggaaaagtatagtagcatgacaggactagatggtaagaccgaacttcaaatgcttgcttttaaatcttcaaagattagactcttgaggagtatggcaatagagaatgagacaatgcaggtttaacttcagcagtacaaactgattgctttagtcccatttccttactttcaattgattgattgtttgtatcttcgcttaggtctttgactttgcgggtttcatggagcctgagtatgatactcccatattctgtgctaactttttcacatctaccaacgttaacatagttgtattgtaagttatcttctagttatgctggagttatcaggtctgtattgtccaaactgatgttcaatattttactgtatgttcttctttagggaccttaatcctttgcatcagttgactgaccagacggattaccaagacaagtattataacaagataatgtccatatatcacaaatatgctgaggtgaccacaagaatacaccaaattactcaattgcaagtaaacctaatgctgaggtgtaaatgactgatcttgagatttatttgcagactttcccatggggagggaaattgactggtgaatccataaagtttttctcgcctttggtgatgtggactaggttttcgtctagcaaagaaaaacataaggctttgttctctgcgtttctagagtactatcaggtatatactcagcggccaaaagctaaggttttattggaaactttgactgagaatctatcatcttcttcctacaggcatggcttgagatgacaatccaagtgagggaggagatggaaccatctcatgtgagagccaattgtgaagcacaacacaagtacctgacatggcgagcacaaaaggtgatttcatttccttttgtgtaatttgcatgtttgaacagacactgtatctgtattgttacaatggatattgatttggtgtttgcaggatcctggacatggtcttcttaaaagattagtaggtgaagcaaaggcaaaggtataaaagatttgatcccattagtgtccccattattaattagcttgtgaagatgttgaaaatgatttgaacaaaatcaggagctgctaagggatttcctgttcaatggggtggatgagttaggcacaaaaacattcattgattactttccagagtaccaaacagaagatggaactgtaagcgataaacgaagtatcattgggaagtcatatgaaactcgtccatgggatttaacaggacaatttatcggctaacaatgatatatgtgaacaagtcagatttcagagtcatcaacacaagaggacgtgaacttagggaagtaggaataagaaagagcagcatgaggagtctctcaggtctatctgcatttcaagatgattgtttgagttaccatgcattgtagttttacaagtgtagctctcagcccttcatcaaaatgagaatcctcgagtatgatatgattttaatgaaaatgtattcgtctctacctaatcaacagagattaacttataaaaatccagacataaacatatcataactctaacatccagacataaacatcatgcgttaggtaaccaaggcagatgatgattagcgagcttaataacttaaacatctagacaaaaagcataacaagtaaataaaaaggaaggttgcacaagttaaaaacacccaagaggttcgtctgcgagctttcttctactccaaagtcatctttggcttcttaattatcttcttttttgcagtcctctttggcttcttaattatcttcattatggcagccatctttggcttttcatctataaagtaacaacgaaagtttgttacacttggttaacaggaagcaagaatcaacaagatattgacgtacctgggcggccacaaatgatgcggcctttctggcggcgggggtggaaaatgtttcttccatggtaagcaacaaaccgaacaactgctttgcgcccccctcccatgtcggtcccactaagttttggggccttgtctattgcgtcttctcccagtagatacactatagagaagctgtaaaaaaccaggacgacaagtctttagtataagtttagactttactaacttggggaaatatggttggggaggaacaagccacaaacctatcgaaaatcatgacatgatcaaccttcccacatgaagagaaaagtttactcaactcgcacttgatatcagactcactaagcgaagtgtcgtatcgtatccttcaacctctaactcaacgcaactgaaataattggattgcagcagatgatatagtataattagaaaacaatcttaaagatacaaatctcggaaataaattccgtttacttgtcttcttctttcggaaagggatcggcctcagcatcgacagtccatcctcccatgtcacttccattgagttgcaaggccttgtctgctgtgccttctcccacaaaataaataaaagcatgactccagagagaagaattgcgagtttcgggaatatgaacatccgtgatctctccacatggagagaaaagttttttcaactcactctcgacatgttcacgaggaagctcaatgtcatatcccgtaacgctaatcctctcaatgtcactgtcactacaagcaagagatcatgatcaacatatatacatatcttactcatacaataatctcaaccaatcaatcaatttaccggatttttcgactacgcttcacttcaagcccctaaagatacaaaaacatctatcagaaattcgaaacagatcgtcaaagagtgaataagaagaaaggctataaggatacgaagaagattaccttgttggcgatttcgtccatggataagttgacaagagcgccggcgataacccttaagagatattttacggttttagagatttaggtctgatttgaacaaggtattaataattgtgttttaaaaataaaataaaaaatcattactagcttgctatgcacggacatagtatacttgttattttctttttatagagaccgaaatatttttggtatcaactaaatattttaataatttgaaaccaaatgaatcatatttttatctctttaacttttaaagacaaatttcatacagttaaacttttttcataaagcaacttcatacatttagactaaaaaatcattataaaattattatgattagctaacagatttaaattgtaaaccaatttaaaaaaaaaattaagctagtcttttcatttttacaaaagattttggtggatcaaacgtgtagcccttaaaatctatttttgttgtttggtactaatacgttttttcttggttttatatcaagccaatctccgtcacttatttctgatatcaaaaatcacttttttttttaacagtttaaaactttattatctcctttttcgcaaatatatgagttgtttttatcaaaatagtatatggaatataatggttctgatgtttagatctaatcatccagaaatttatgcggtcgtgatagtggaggtacaaactacaaagcatgtcgcggaacgcaacttttctctatctttcggaatatggtgtttgaacatattttgatcgtaagcttcatgtaattgctaattctttattgattattctccaaagcagctagtgtctgaggcaataaaaattttcgtaaatgacttttaaatacatatataatctctcagatactaaatataatatattcttaatatgaactaccctcacaagcatggatgtcgggaacaacaacatttcgacgcacctgaatcaaattccattttcattcgaacaaaaactggagaggtttgatcccagtcaccaaccgactcatccttgtaggctagatcccaaacactacttttctcaaccttccatttctgaccactcaaaccggttcaaaacgccctacgacgaccaacggttcaattcggcaagaattagcttctacaagaagcttacgatctaaatctgctctaacaccatactccgagaaaaagagaaaggttgcgttccgcgacacgctttgtacgtccgccatcaccaccgcaccaacgtttgtacaattggatctaaccatccgaaccattgtatttcgtgtaattttttgaataagaacaactcaagtatttgtgagaagaggagatactagggtttagatttttagagaaataagtgatttctaatatcagaaataagtgacggagatgagcttgatataaaaccgcatgtcatgcgtgaaatcttatcatgacaaatgtatattatattgacccatcataaactttatcgccaaatattttttctttttatccaaaagtaatattcggtatttttttagggtgaattagctcaataaccatattccataaaaatattaagtaactaacaccataaacgaaggaattgagagagtgacgctacgggtatgtgaagttacaacccactccctaagccacgtttctgtgatttcttgtacgcgcgtgagggtaagagcgagcttctttctaccagctgacgtgtctcctttcgaagccagtaaaaaaattatcctagcaccgcttgagaattgtcccatcagtaacataacctgcagatttttacattaatttgaataaaatattccccccaaaaatatcggagcagaagatgctctgttttctatttattgccagtaaatgctataccttttacgcagagatctaacctgcaaaacagaacagtatggatggtggtgaaaatagtacagcagtaaatacagggaatcaaaagggaaaggtacaaaaccatcgctttcttgtttctgtttttagtctctcgtgatttaattgcctagtgtaaagtttccatttaaaaattctcacttttacgttcgaatataccacttacctagattgtagatctgctaaacaacttgttagtatttacttaaattagatcgtgattcacgctgtatttgttattccgtaattaaaagctacgaacgattaaattggaaaactgttattattgattgatatttacatttaattttcattatgttctttctaaataatactgaactatttccataatccatgtagaccgcaggacaagatgaagtattgttggtgattggcgagtgggtcagggtggataatctagcctggcagtttgaacctaagactgtcgaaggatcgtcattcatccgactcagaactaacatgacgtatgaagagctatctcagaaggtgaaagataaacttggcttgcgtggaagaggcatcacagttaaaatggcataccaatttccagagtggatggcgatagatgaaggcaacggttctccacctcaatacatcagcgaagatagtgatgttacaatgttcattcaaatgcggcggcatatagaggaggtcaatctatgtgtaactgtcgtccaacacactattccaagttctccggttgctgttacggacaagaacttcaattcagaggacagtgacgattcagattatgactcagaggaggaacttcaccaatttgcacttgatagtgccgtgttggggcctacactagagccaaccgctgctacaacagagacagaacaacaccgtcgtaccaggcgagagctgttccctacaggaggaatcagtattagagagcctgaagaatgcatccgccttaaaagccctgactgtctccctactgacaaagggaaaggaataatggacccaattgggaagaaagggaaggctggtccaagcagagcaacggtgacagatacctcaacagacagtgatgatgacttgctcattgttccattcacactgccacccaatccaccagctatcaccattccggaaaatgctgacatcgaaggcgcagattcctcacgggcagctgtgggcacgcctcatggcaatcatgtttctcctattggtaatgctgtagcagaaactgaccttcagcgtcaaaacattcttttttgggggcgggcacaagaagctttaaacactatcctatccgatttcagtgatgaccctattctttttggtcgggacgccccaccagtatttaacgatggaaaaggtgaaggtataacttgcattccatatctacatatagattttgtttgatgcttgttgcaaaacaaatttggttatggagtaattgggaaaatagagttcacaccttatactattctatttatattaatcgtgtactatttatattacagactacaaccatgtcgctgatagatgttccttttatttcaggtgtggactctgctttctttgacgttaaatacgaaggagataagctgtttgttggcagagtctttaagtcgaagtctgactgcaagattaagatagctatacacgccatcaaccgcaagtttcacttcagaactgcgcgttctactcctaagtttatggttctgaaatgcatttccaagacctgtccatggcgtgtatatgcatctaaggttgatacttctgacagctttcaagttcggcaggcaaatcagagacacacatgcacgattgatcaaaggcgtagataccaccggttagcaaccactcaagtgataggcgagcttatgcaatctcgctttcttggtattaaacgtggtccaaacgctgcagtgattaggaagttcctacttgacgactatcatgttagtatatcatactggaaagcttggcgggctcgagaggtggcaatggagaagtctttgggatctatggccggtagctatgcacttattccagcttacgctggactccttcaacaagcaaacccaggcagtctatgctttacagagtatgatgatgatcctactggtccacgccgtttcaaatatcaattcatcgcattcgcagcatcaattaaagggtacgcatttatgcgcaaggtcattgtagttgatggaacatctatgaaggggcgatatggtggttgtctcatctcagcatgttgccaagatgggaattttcagatcttcccactggcttttggaatcgttaacagcgagaatgatagtgcatatgaatggttttttcagcggctaagcattatagctccagacaatccggatttaatgtttatctctgaccgccatgaaagcatatacacaggattgagtaaggttagacacaaccatccatctcacgtttcttcatatagtatacatatatcgatttacttaatatgccaataagctggttctattttgattggataatgaatgatttccctaatattgttgcaggtctatacgcaagccaaccatgctgcttgcacggttcacctttagcgcaatatcagacatctatataagccaaaaagcctctgccgcctaatgtctgaagctgcacaagctttccatgtcacggatttcaatcggatattcctgaagatacaaaaattgaaccccggatgtgctgcatatttagttgacttgggtaagtgtttttctcagcttacatatattgttattaacgtggctgagatgaagttgactccataacctctgtattttgtaattcatataggattttcagagtggacaagagtgcattccaaaggccggcgtttcaatatcatggatagtaacatatgtgagtcttggaacaacgttatcagagaggcccgcgagtacccgcttatctgcatgctggagtacataagaacgacgttgatggattggtttgcaactaggagggctcaagccgaagactgccctactacattagctccgagagttcaggaaagagttgaggaaaactatcaatccgctatgtcaatgtctgttaagcctatctgcaactttgaattccaagtacaagaacggacaggggaatgttttattgtcaaattggacgagtctacttgttcctgtttggaatttcaggggttagggatcccttgtgctcacgcaatagccgctgctgcaaggattggcgttccaacagactcgttagcagcaaatggatattttaatgagttagtgaagcttagttatgaggagaaaatctatcctattcactctgttggtggagaggtcgcaccagaaattgctgcaggaactacaggagagctgcagccaccattcgttcgccgtccaccagggagaccaaggaagatcagaatcttgtctcgtggtgaattcaaggcaagtacctattagtaaacattacaatgtacttcttatctgttaacaagctaataacctatctacttttaatatgcagcggaacaggacaaggtcccagaggaggtgttcacgttgttgtggtgttggacacaataaggcctcctgccgtaatgctatataagccgtcaactactgctatggggtgctaataggtgttatgaagaaactttctggagtgggcttaaataatggttgttcccgcatatcttgcggaagcgggtttgtttacttctactaatgcaggagtaagtacatttatttaaatagtttggtatacccaactttgatgtataccttattattttgatttttatgtactacctgttcatcgtgtatatttgtgttggtatctctaatcccgatgtaattaagtaatgccctgtaacaccgcttttgaaatgtatatatatgaaaccccgcagtctgtctaatcacccttctctgcttctttccagtgcaaaatcatccatatcttacttacataaggtacagtctttctttttacgaaaactaaaccctaataatgaagtgggaacccaagcaatgatgcatcagtaattgtatacactgatttttcctgtaacataatcaatggggtaagccataacaaaccaaaaccatcaatctgcttttggaaccacagaaatgagtttgtttacacgtttgatgaaactgttggccgaataacatatgttttacttagtttcattatgctgtatgttggagatgcactttcagtcaatcgcgagcttgtacctgcaagctgttacagaaccaacgtggtgagctggcgagctggcaatgtgaagcgagctggcaatgtgaagcgagctggaaatgtgaagcgagctggcaatgtgaagcgagctggcaatgtgaagtcggggataagcaaagcacgtgttgtgagatggcgagctggcaatgtgaagtcagggatgttaagcaaagcacgtgtgttgtgagctggcgagctggcaatgcaaatggacgttaacggcgatcgttattaacgtggttagcgtttactttctttacctttttgtataagagcaacatgttatgctcatgctttcattatcgaagattgttatagaaactctctctcttctagaactttctttgtaatctctgggtttttctcatcttgagaaccagaggagaatcactccgcgtttcatgaacgttgtttgattcttaagtaatatacagagctttcaatcgtgttggtgttttggttgttaatcggagatcgtgatattttctgtatcacaagcatcacgtttataaatgttatgattatatagccaaacgggcatcatggatggcagcttcgtcataaatagttttgcatggtatcctattctatttactatttactgtactattccgacccatatgcaagattcaaataaaaaagctcgttttacatcaaataattggaggctcaaattgttttctcttgatgtcatgttttcagtatatatgtgaaaatattactcgtttagttataatgatatgcaagaacttgacatttcatttattagttgaatactttggagttataggagtttgtagctataggagttcagcatatctgttattgcatcactgtaatataacccaacacactaggctaataggctgaaacatttcacttcaaacataaatatacaaacatcacagttagtagttgagtttcaatacaactgttctctgattacaacagaaactccatgtttgttcaacataaattacacatctacaaatcaagcaccacgttctgttggagacaatgcattgaaagtttcgatagcgtactgtttagctgcatctcgcatcttcccatcatctagtttcccacaatactccattgcgttcactgagtgtagctctagtaagaccacacttgcaattccaaccagccctgaaataaacaaatgtaactatatatgtaaaccaatcacattgcacacaattagtgggagatcacaaatgaaacacaaacagacctagtgaagaacaactgcactgtatcttgggtctactaacagtcattggctccagcctctgtgttagcatgtacccgttaactccatgctttcgaatcaggtacggtagcatgattgttatatgctctacgtacttctccacctgctcgtctttcaacacgtctctgttacagtctaaaactgtgactccccacttcttcaaatctatgacaagcccaacccaatgctgcctctcgacctgcatggggcagtagatgacgtcaatctcggcaaaccatttcggacgcaccatgaaggggactcttgcaagagtgctgaagtaaaaagcactcttatctgcagctcctacaaacttgttgtactggcgtcttagctctgacaagaaacttgaaggtaggaaatcaaaacgcagcggcttatttttatctaatcgcagctgtatgaacctcactaacagatcaggtccctgtggcaggaaaatgtttgttagcacaaattctatacatgagttacattgtctatcagtactcccacagttgctgcaaaagtagatgaatgaagtattctatagtaacttactgattcatctagtagtgtctggccctcaaaaatgttcaaaaattctgtattctccagtacaacgccatcagccagaacatatgagctgcatgttaacatataaaggttgcattagttgataccacaaagaagagcggttactattctatacttagtgtgactacttacactccccgttccatttgtttgagaaaccttttcacagatgatggactaggcacagagaacggtttaaaaggcccaataaaagcaggtgattgatttggagtctgcttctccacttttgcagaactactaacatgacttttaccagcccctctgctagctgtttgatgcggctggaccggtatgctagtcatattctctatactgttgctttgaattggcctgtcccttatccggttgctggaccgcaacacagaaactttgctggggaatgtcttcttcttccctcttggaggcaacctgcttctgttatcgttgatttcttgcgttagtcccaacgaaaaattcggctccacaatgtctacttcatcatccaatttctcagttggtgaaacatactgcaaggcatataaacatgtacatagttcagcggagcaacaacatataacgttacatttacataaatgggaactcttactgttttgggttcatgcacggcctctttgttttcaagctgccaataaccaatagcgaaagtaagtgggtttgctgcaacataaagtatgtatattgtaactcaaaaccagaaataaatataattacctttgtgctcgccacatgctccatatctttcgctcgcttcagtggcctattagattgtgcatccatttgagaacaagattttttctttcctcctttctgaatagaatcttcttctcttacctaagaggcatcaaaaatatatgtcattcttaccgaatacacacaaatgcgtcataatcttcactgtattctcacctccattctagtgttagggttgctgcgttctggaacagacactccaacgtttatgccgcacgcagccggcaagttgtcacttccttcacttaacccaatattaggttcaacctgttgggaaactccatgcttatttcctggctggtcagctcttatttggtcctgatgcatcaacagaaaattgttgtttaatgtgaagctgtccatatacatcaaatagcacctactagtgcaatacttgaagtctcaacaagcaaattgaggtgcttaacctgtttagagtgggcatcagcaacacatttgctgcattctccaacaattccagcctgtctatttagcccactcacagcttccctaaccgattcagtaagtattgcaaccaattctttcttctgcttaaccagttcagcctcaaagtatgacttcaattcatcgttgtttgattgttgaatcttgagaacacgtttctcaaactcatcagctacctctttgatgactgcctctctaagaccatgtccagcagagccactatcattgttttccatctcgccagctcttgggacttcctgctgcaacccttctccatccgcaaaactgacaccatctttatctgtcaccggtccatccttattcgcctcaccatccaatccgtctacaccttctccggctgcacactcttccctctcttctgcagcaacaccagaaccatcaacatccatctcatcgtcaccatcccccttagcctgattcacacagtcatcagccatgaactcatcttcagatggatgttcaacatcattagcatcaacaccaccactccaactgttatgctcgaatgggtgttcctccattatcaatgatagcagatgcgaaacttcttcatcatcctcctcatctgagaaagataagtcgatctctttcgccaggagctcttcattcagcagtgaggttacccggtcctaaaagttaagagtcaatagaatagataagtcaagtacacaatctttctacaccaaatacaaagaacaagctttacaacaatagaattaccatgccactttggtcgatagttcgtgcatcatgcacattgatgttcaaactcagccccaatacatactgaaccagcttctcgactggaatggttgggtctagaatgttaaacaccgagtctgccgtgtatataatagctggacaacatgccactgtcacaagaactaaggcatgaggaaacccttgtatagctgtggtatcttgtgcaagctccttggctgttctttgcttggcgcttcgaatagtcgcgagaaacgaagttctaccccaaggatatttaagaaaggattctacatcttttaccatctctacatggtcaggatcgatgatagttcgcgaacatgtcgggcaaagaatcccatcaactagtagcagcaacgataggcgaaatcgagtcaacgggtctttgtatttcttccccatagatagcttcccaacaatccattgtgaagtaggctttctctctttcccaaataatgccttgtagaacctcgtaggattctgaaccgctttcattttccctcttgtccttgcatcctttttgttgaatccagatttgctgcagttaagcccggtaacaagtgcaaaatcatcaatggcaaatcgaattggcttccctgcaaacacccaccacatttcatacttcttatctgtcaccaactgcctagatagaatgtaatgtaagaacattacagaaaactgatgcgtccccatttgcaacagaaatccaaactgcgaaccctccagctgcttcaaatggttttgatctagagcagccttgatgatctcaatccacctaagagtaaagtaattgtttatcctctttcggccctcaggttcagaacctagccgaaacaaacgctttggcaactctacatcccccatggaacagatacactgaaatacaaatgtccacgtatcacttttttgatgctgctacttacacaaatacaaaatatataaatcttagatgtaaatatatgttattaacagactcaaccaatatagcctcagctttccgttactatcaacaacaacaaatggattacatagaagttgagttaaatattaaaccttcataacaccaattagtggaatatcggattaaccagcaaagattcactaactaaagctactcaaatccgagtttatgctattcaatactgcaaataaaactaaaaatgtcattaacacatacaaccaatttgagtagcttccgttactatcaacaaacacaaatggattacattgaagtagagttaaatcctaaaccttcataacaattacaaatgaatatcgtattaaccaagcagattccctacctaaagctactcaaatccgagtttatgctattcaagctcttcaacacaaattaaaaagattttcccaaaagccaaaaaatggcatttcataccttaatttggctgaatcccttcgccgacaccaattgccacagaaattcgagtgttacagtggagacgacggagatataaacacctctactcccgtacaacaaaactcactcaagtactctcaacggaatcaaaaaccctcgattgagaaaagagccaacataagtgttgtacgaaactcggatgcttagataggctcctcctccaattgcagaagatttatgcagtccgattgccagaaatcgaagcctccacagtccccaaatcgaaacccacaaattcaatcttcgtaaactctagaatcgtcactcggattgcacacgcagtctgctcttcgaaactttcccgggtgtcgctttttaaagcccagaattttcagattttcttactgtaacttctctgaatgttcacctctatttgaatttttacagagtaatacatagaagttatcgattgaaaactcagaagaagaagaataagcgcgtgtgctcacgcacgggttaagtttgtcaatattgcataaagttcaatacatattggttgaagtgttagttttgcaattataatttttttgttggctatatttgcaaatttcccatttttttacatgtacaaactaaaaaaaaaaaaatattaaagtgaacaaactgtacatatgggctaaaaactaaaagtcccacaaacattgagattacaaaatacattttcagtccaacatgagccataaagcattgcttaatggagtaaaactcaatttaacagagtggaataaattaaacaaaataagacgtgaaggagcagaagcaagcatatcaacaaaaacgcctttgaaacgcaaacgctacaaaattgcgtctggcgttacagtagattgagatttgaacgtgaaattctccgagtccagaaacattcctctccttccgtcgtcgtcaagaagatcaatttcattgaaatcgaaagagtgtgcttgaatcacagcttatgcagacgctacaccagtcccaacttctccagaatccggccgaggcggcgaacaatcagtctgaatcggacgcgccgccgaaacaggtggctcaggccatggaacgactcaatcaagcggctagggttatcgccgatatccgcctcggcgctgaccgtatccttgaagctatgttcgtggcttcgcaacctcgtcacacagacatgcctcttcagctctttctcagagaagacgcctccatgcgtcaacatcttcaggatcttcgcttaataggtgctgaaccaaaactgaatcattttcattagtattgattgattctctagattagggcttttaaggatcgatcaatgtttattgcttggttcagggaagaaattggaagaatctggagtgttaactgaatcacttaggtcaagaagtaactcttggggtcttcacatgcctttggtttgtccagatggtgcagtcgttgcttatgcttggaaaagacagcttgctggccaagctggtgcttctgctgttgatagaaccaggtatcagattcgttgctaatcattttaaagcatacttagggtttaggttcgagtctgcatattagggctgttagtgaagcttggtggtaccaacttggagtttcatcagctaaccaattctactgaatctcatgcattctccattttctcgcgttgtgtataatgactgtaggttagctctcaaggccttcacggatcagaaaagacgattcttccctcatattgatgatggattaaagatggaaccaagctcaaaaaaacatcgtgcctcccatttgctattagaaaatggaagagaggagccggttgattacaaaacattgccagatatacaatcgcgtttagagaagctggttccgagtgtgaaggtgtctacttatggacgattgaactggcttaaaagagctaactctttacctgggtcaggtagtgatgatcctacagaagcatcgaaacctattttccagagttctagcaagctgagatcagggttacagactgaagttgtcgacaagattgctgttattgagttatcatttccttctctattcagagctatagtctcgttgagtccagcgggttctgttgatccagatgcagttgctttcttctccccagatgaggtcacttccaacctccttgcattaaaatatactgattctcatgtgaaattgtttaagttctcatgttttagcttcatccctttcttacagggaggcagctacttacatgcgagaggcttctcggtttatcatgtttacaaacacataacggtaataaagatgcgattgatattatatatagtttaacaaatttgattcattggggacttgcattaattagatttttcttgcaggaacatgctgctacagccttgcaatatttcctcggctttggtactggaacagctctctactctcttctggtaaagcattttacaagcacacttcagtctctggataacatgaaccttttttgtctggaagttaattaacacctttctcttcttcttatgcagctatggatatgcagttttgaatccgtatttagcaaaccttgcacgtatgcagactctccgtaattcttctaatacatttgtttcccgtggactaacttttcatttctcttctgatgatgcagtaaatgtggaaggctattagcaatggataaaaagtctgcgttaatcttacctcctttacaccgcgcttaccaagaattgcctcttgcattaaacctggacgtttgtgaagcttaccactccagttgctctcaagatgatacctagtactctagtgattagggaggatcaattaaaagaaaggttagaaataagttctaataacattttgtatggatctttagtatctgctcttctccttgatatacctcttgtttgttgttgatgtcccatgttgaggtttagattaactttctttctttctactctctggtaacatgtgaatgttgtcttctttctagagatttgatctttgttcacgagatgactgaacagagacctttttttttaactcggttcacattactctgttgcagtcagcatcaaagtgagaaaaagacagtgggtgttgatttttgcttccgatccagaaatataaaacatgttaaatgcaagatcaataaattaagttattttgcaagatcaaataagcttacggcttctttcatagagattgtacatgtgaaacctgcaactaacgaagcaaataaaagaaaacactaaataaagataacaccagaggaagtggaagaaggtactacatttacactacaacaagacaaccttcttaaaccaaagccaaagccaaacaaacttctcattacttcttgccatctttaactgcaacgaccacaatgctcactgcacattcctctggaaccacggccattgaccgcctaacactgcaaatagtccaaagatacatagctgacattgcccctacggctccacatactgcagccaagaccagagcaccaagcattctccatatacactcactattttctcggccctcttccatttccgtggaaacgtccggcttcaaaccttcatttggtcctaatggcgctggttgcacccatatcggatcaagatgccatatttcaaagctccatgaatggagaaaatgtggcttggaagagttcccattagcagagcttaaacccaccatgacttcaccacctttccaaagcttctccaagtctaccgagaaagagaagaacggatcaaacatctttatcgaaccacgttttctgaaacgaaccctcattctcttagaacttgcctcataatcaatcatacagctcaaaatccctccatcatccatcatcaagtcacccacaaacgaaaggtttctaattttggcagactcaggtctaccaattaagactcttgcacggtttcctctcttggagatatcaaactcaaaagcaacaactgtctcgttctttgcatactctaatagaaaccctaaagcagaggaactgtaatctttcttaccaaacagactaagatccaaagtacttggaaccattacaaaagccaagacatcaccaatctcattgggcatcgaaaacgagaagtaagtcgagaaaataacggagttcctctctttaccttggaatagattgatgggtttcttgtaaaagactcgtccctcggtccgattcactgagtcagtcagctgaatcgaagaactgtcattgaccagcttcgaatctccaaacagagcaacactcttgtcaaaactctgagattttacgaattcatcaaatgaaaacgtgaaatccacacctgcggttccatgtatctcaaagcataaaaggaccagaaaagatagggttttgaatatcgccatagctatactgagactaaaattggttctctctgatttaatgactacagagacgagctcttctctctctcttactcactcactcactcttctccttctaaaaatggaatttctaggatttgagaatgacttccattttttcaagaagtatttaagtttgttgttttgtgtggaactatgcgaagaaagcagaggaagaagttaaatatcatcaacacatgcagagagattgattcgttctcagtcccactcactttctccctcgtagtggttgctgactaaggttaatgccgtttctgatttgtatctcagttttattacattctatcatgtttagcctcatttacttttagaatatgacatttgtgcctactttctaagaaataaaatgactcaacttgtagatctaagaagattctgcttcatacaaattttatcaaagtcatgtataagaagctcttaactttctcgacggatagataaattgcaaattcatcgtccagacattattgaaaaatattaaagcaaccataagaaaacgaaatctttccaaaaaataaaagacagtagtaacataaaactggattggctaaaaccaagaaaattgaggtccaacatactaaaaacaaagcaacacttataatccacgacaaaaaggtaagatcttaaccgacaaaatctactcttcatcgaacaaaccgaaatcacctccatagtcttcttcgtcggactcttccttctcctctaccttagcagcagctggggcaccaccacctgcatcagcagacaccgcagctactgaagcaacagcaaacttgcttggatcctgcattccagagagttaacataaacaaaatcagtactccaaacttccgaaataaaatgaaaaagatgcacagttttaatgcatactaaccttcaagtattccttgaccttctctgcttgagggaaggtgtactcagtggcaacagcaatagccaaggcattcttgtacgcattgatgaacatatgcggtgcagcagcaagggtagggtacgacacagcaagagccaaggaagtgaccatggagataccagaagcaaacttctccacaagttggtcttcagtaagatcaagaacctctgggctgaagactgagccattgtcatagacagactggacaacaagaccatatgagaacggcctgatgccaagcttggctagaagcgcagcctcagaagacccgaccttgtcaccttgcttgataagctcaactggggtgatgatttcgacggtacccttgttaatcttggttgggatgttaagcacctaaaacaatccaaaacacatacatgttcaattaacttcaaattgtcgtcaaacgaatcaaatcaaacattaaatgtaagtttaaaacaaacctggaagaaagatgtttgggatgggtcgagaccagtgttgccaggttggacaaccacatcaattggagccaccaaacccacacgagcaggggcaccaacctgattcataataagaaaagttccattacaatcgaatcacattgaaaaagtatcaacattttaacccaatcatattgcaaaagcatcaacatattacacaatccaatcacgttgagaaagcaacaacattatacataagtcaatcgcattgagaaagcatcaactttttacacaattgatgagctctacttgggatgactgtaatactcataggaacacaggcaatataaacagaaacgtaagcaagaaatgattacactatacatcagataccatcgaaagcaacacaagtaaattcagaacatgtataaactaatgtaagcatgaaatgattcctctatgcatcagatacttactatccgaagctataatcacacatttgtaaataagatatgaaacaagagcaattaacaaaccttgtacttagcaacctcctcgctcacttccttgaggtcacctttggtaaagatc

SEQ ID NO: 402 - DNA, 96232 bp, Arabidopsis thaliana
aagcttgaacaagtcgtcacatatctcaaggtgatacagccatttacagtcaaacgctattaagtggttctgtctagtgtaagcataagctctaatgaaataaaaattatatcatacaaagaccgttgagaatattttcaatattgtagtgcaacatggatgttagataactcattctgaactgtctcaaatgatcatggaatttggtagatttttcttctctttagactgagcttatctgggccttctctgttgagagatcatgacttatgttgcctctggccattgagaattctggagtgttgtgattcaagtcaatttgttttatcctttccgttgaagacttttaccttaatactgtgaatttgtctgctgttttggtttgagaaatacagattttggacctggaagacaaaataaaagaactaaaagttattcatgtcgcaggaacaaaaggaaaggtaagttgctgtttcactttagctaatgcaggtcctaagatttaaaatgtaacgtgaaaaataagtcagtagaaggaatgtagcacttatgtgagatgctgttgtttccaatttcgagcaattagcacttaacagaaaaatcagatcactcgatggttaacaatatatgctgattaatcattatatttgatggtaccatctaatgcatgtctgagcctgcaattccgatttctaaagtctggaattccagtgtcccataattatagcttatgcggtatggaagtaattttgatgactagaatatctataagtagctactgattttcttgggttctggctttgtatttttgtatttcagggttcaacatgtgtcttcagtgaggcaattttacgtaattgtgggtttcgaaccggaatgtttacatctcctcacttgattgatgtgagggaaagattccgaatagatgggtaagttcatcaatatattgatgttcaatgttatatgaacaagcaagagacgaatttgaatgttgtttcgcttttccagcttggatatatctgaggaaaagtttctacagtacttctgggaatgttggaagttattgaaggtaaaaggcccttttcaatatgcagtgccttttgttccagtgcgagatatagtctttaattattattcattgctaactttctgccacaaattaccagaagtcatgctcttcctctttgcattgcttttatagcaatttcccattctgagtctgttctgttgtatttatggaatgagaaggtaaatgttttcgcgttgatctgtagaatgtattggctgtataacctttagtgctgtctgtagaaaaatggttaactacgagtaaaatactcagtctagattagtagcaaacaatgtagatatagatatctaatcgtgagcttcttttttgcaggagaaagctgtagatggtcttaccatgcctcctctttttcagtttctcacagtattggcatttaagatttttgtttgtgaaaaggtatattactattctcatcaagaattcttatacgtttcactaagttcccattgcattgaaacctaatgtgtagctaaaactggatgcttacttcctgttaggttgatgttgctgtcattgaagttggacttgggggaaaacttgactcgacaaatgtggtaagcatcatttaaaaatcttatgtttcccgtcaatctgtcatatttatttaatgttggacatctatgttcattaaaaatgtaaactacagattcaaaaacctgttgtctgtggcattgcttctcttgggatggatcatatggacatattgggtatgccatactatttcattagtcgaacgtaggttctctctcatgcttctaactctagattctcaatgctaattctacataggaaatacgctagctgatattgcctttcataaggctgggattttcaaggtacttttcaaaagattttctttgtctcagaattttatgaatccactatatttgtttcaaagtttcccattggcagcttcatgtagaagaaattctctgatttgctttgttttcttgtatgttaatgaaagcctcaaatccccgccttcacagtaccacaactctctgaagcaatggatgttcttcagaaaacagctaataatctcgaggtaactatagtaggttctatatttcattctagttatgccatgtattcccacggttagttattactacaagttcaaaaaggttgtagttctgataagagtttatcaaatacacatgccagtgtctaggatcaatataatttaccaccagggtttctatctttggttccttggtgtcttggcctcttggattctcagttttggaaataaagcagtttaagttttaaaccttatcgtggtctttttggcgtctgtagcttagttatgcttttataaagaattgaactacaagggcgaaatattgaatgttgtttcgcctgcattacaggttcctctagaagtagtagcgcctcttgaacctaaaaagttggacggagttacgcttggcttgtctggggatcatcagctagtaaatgcaggtcttgctgtttctctttcaagatgctggcttcaaagaaccgggaattggaagaagatatttccaaatgttgggcgtttctcttggtcattaacctttatcaaaacgttgaggacaatttttggtgaatcttgtttgttcttttgggatttttactaacaggaaagcaaggaaactgagattcccgtggcattttgtcgtggtcttgcaacggcacgtcttcatgggagagctcaagttgttcatgatgtagtttcagatccgcaggactcatcagactcgatggaaactccatgcggtgatctgatcttttacttggatggtgctcacagtccagagagcatggaggcttgtggtcgatggttctcttctgcagtcagaggagacaaaagcttatccactgctgtcaatggttacatgagacatggggagtatggtacagacttaaacagagtctccaaacaggtattcaagaccaacaatgatcaatgcaatttctttgttaacacaactcttttgctttactattcaaggtattgcacattgatttgtgtttcaaacttttgatctgactttgtgaagctttcctatttgtcgacagattcttctgttcaactgcatggaagtgagagaccctcaagtcttacttccaaagctggtcaccacttgcgcttcctcaggtaatacaaaacaaactatatactctgtttttctagtttcgtgttaatacttatgcatattggtgaatgaaacactctcaggcactcatttctcaagagcgctttttgtcccgagcatgtctacttacaacaaagtcatttcgggtgcatcagcgattccttcagatacacgtagaaaggatttgacttggcaattcagactacaaagactatgggagaaatcaatccaagggactggtaagcttaagtattgcttctttgtaacttgttgatgtcacgcctaaacttgatcatatgtctggtgactaattaatcagatgcggggcttgaccatacactgaaacccgatggaataaccgccttaccacctcatgatttcctgtgcggagatgcacctcaatgtggtggacctgcagggacaccggtcacttccagtgccgtaatgccttcacttccattgactataaactggctaagagactgcgtacgccgaaacccttcactgaaactagaggtaaggcaaagctatattcattatccacttccaaagacaagaatgaaagtctgatttttgttttcagacattctggaatagaacagaacattaacctctttggtaccggcttatgtttggtttctaatgatgctttgtgcaacaggttctggtcacaggatcgctacatcttgttggagatgtgctcaggttgctaaagagatgattttatttttcaccaacaaatcttcaaaaagactccttaagagtaatcttacagagcttcaattgttctttacttcactgtttttttctcatagttactatttgattctttggtccattttatctaacatgagaagtgagaaccctccacttaagctgtatttttctgctaaattttaatttatatttcctctcatttctcatcatatcccaaattacattttcttttctgtcaaatatgaaagaatcgtatgagctggacactggaaaaaaagataaaatatatgaggaggaaaatggaattaatgtttagtcgaaagttgaaactgaaatagacatgacatgatcacatactcacatgctaacagagaaaaagaaacagaaacagaaagagaataagacgtcactatctctcgagggaagaattcctccacaaatagaaagagttactgaatattctttgaacatgcgctacatgaaagacaacaacaacaacaaaaaactagtagatatatattattactcgaagtcgatgaaaaaaccgtcgttgtttcagatcattattatagtgctaagcataccaacgactacggggaggacggtgggaaatcttcgggtgcgggaaggatcacctttcaagatcgcaatatttgcagacctccacttcggtgaagacacgtggactgattggggtcctggtcaggatgtgaactccgttaacgttatgtccgccgttctcgacgctgaaactccaggtcatcaatcatcatgtcacactgacaagttaccgtacaacaattttctaccattatctctcattttgatatgagtaacgttatttggtgtagaaagagtgataaccacacaataagatgtggtttagctttggatcggtttgttggtttggtttagctacagaaattttgattctattaaaacgccacgtccaaacacaaatattgaccttcaattttcttaaaaatgttgtgagattagctttaactgaaataaccgttttttttggagatatgaacagattttgtggtctatttgggagatgttgtgacggctaacaacatagcaatccaaaacgcaagcttgttttgggacaaagcaatctctcctacaagagacagaggcattccatgggctactctctttggtaaccatgacgatgcttcttttgtttggcctttggattggttgtcttcctccggtattcctccccttcgttgccctgcagcatcagatgatgatggatgcacgttcagaggaactacgcgagtggaactgattcaggaagaaataaagtcatccaatgcactctcatactccatgattagtcctaaggagctatggccaagcgtatctaactatgtccttcttgtggaatcatcggatcattcgaaaccacccgtggcattgctatattttcttgattcgggcggtggttcatacccggaggttatctcaaatgctcaagtggaatggtttaaaaccaagtctaatactcttaatccctatttaaggtatgaaccaaaacattaaagcttttttggtgggaaaaactcgatcattcgctaagtcgatatcgaaagatgtatatttcgggcaggatcccggagttgatattttggcacatacctagtaaagcatacaagaaagtagctccaaggttatggataacaaaaccttgcgttggatcaatcaacaaagagaaagttgttgctcaagaagctgaaaatgggatgatgagagttcttgagaacagatcctccgttaaggtactaattattaaacacgaaattgcttaacacttagatactggtttgatataactttaatgaactatatttttgtgtaagtaggcagtgtttgtaggacacaaccatggactagactggtgctgtccgtacaaagataaactctggctttgctttgcgagacacacaggttatggtggatatggaaattggccaaggggatcaaggattttggagatttctgaaatgccctttcgtattaagacctggattaggatggaagatggatctgtccacagtgaagttaacctaacatatgattagtctatttatcacatatgtcaaactttgtagaagtaatagtgcctatagttgttggtaggtttggtcactgtaaacttgttaagtgacaagaaaaactgctttccataagccaataaatgaactgatgattggttcaagacaaaaggaaagaatgcttgataaaacggttcaaacccattaaggaaaccggaatctctgcagtatacatgatggagaatctctaacaagaacaatgactatgatgatatcatctaatgacaaccagcttttgcacatcttctctgatcctccttttagttagcattccctaactgcttctgtcccttccacgttgtttaatagggacgtcagggttgatgaaaagctcaattggtttttggctttatcgaaacatacacatttgtttggagaactcgaaatacattccctctgtcacatcttgaagagctggttcctcaggattgcaacgacagtatcgagagcctctttattttccaccagatacttctcagctgcgtctttcccttcaatgacctcgccttcaatgaaatagctagttccttctcttaagataactccatgctcacaagccaattctaatacctctcgctccacgtagaaaccatgaccaaagtgaatccccaattcagatttcttctttccgggcgccagtttattcttcaccacttggacgcagacattgagaccacttatctgaggaaacaaagcaatcaaatgataataaagatgttactgcccttcgcagaaattatgcattattttagagattaaggcaaatcaagcttacagtaacacgtacaatggtaacaatgtgcctaactataccttattggcagtctttattagcccggttcttatcattttgagacgtatagctgcatgaaacggtaatgcgtttcctccacaagtcacttcttcggcgtgcgggaaatgcatgttagatttcacatgtgatctgacctggatcaggtaaataagcagagagatattatctttggtaggtgggtcaatacgatccaactaagtgagcaaaagaaagtaaaccgtgatatttcctttacctgattaagaaaaacgatcagtgtctgagaatagccaactgagtaatggatttttctgagcgcctgtgtcattattcttgattgtgtgtctctgtatctttctcctacaggagcatcaagttcacattgaggggcaagagcagcaacctgtagattccacttttaatattaacagatgcagaaagaatatatgaacatattgagatgaaagaatgagaactcacactgtctaccacaattacgtctactgacccactcttggtcagcacatcaacaatatttagcatcttttcagcagaactaggtcgtgatatcagaagctcttctgtgttcacacctattgattctgctagagaaggatccatggcattctctgcatcaagataagcgcaataacctggcacaaacaagtcttttagataaataaaaagctaatggagtgaagaacaaaagcaagtcagaatcaaactgtaacttcacaaaatcgaatcttacttatcgcactagaaacaagaaaggaaaaagtagaagatatgtgtccccaacttaggatggattctagtaacaagtcccaaggtttctgttcaaacaaatgtattgagaatgggattcaagaacagtacctccaagcttttgagcttccttgatgatatgcagagctagagttgtctttccagatgcttcttttccgtaaacctcaaccattcttccctacacaaaaaccaacaaagttctcttgtaaacacacatttagagacctcattaattgcaatacctttagcttggctagtcctatctgagactctaaattaacaacaacctttggcaatcctccaactccaagagctagatcaaggttgagggaacccgtggatatcacagaaactctcctttttctgtaaaaccgctgcaatgacaacttagagtctttatcaaaatcacctgaaagctgtgacaatgctaaatgtagagcagtgtctttctccgctacttttctatcatctggaacttcatcaagttcacaatctgaagcttcaactgaccaaacgaaacacactcataaagacaggatacagagtatggaaatcaaaagacaaaggaaattagtgattacctaaagacgaaagataacgattttcatagccagagcaagccaaaacgcttcttcttccattcagctacaaagcaagataagagtaaacacaagagacatttgtttagtcaggagcttgggcaaatcatcaatgctactctaaaggagataactttattttggttggagtgttgtcctaatttcttcatctgaaaaataaaatctttctttcttatactcaagctaagaattgttgagaaacattagagacgaagagaacctgagataagtaagagaagaaacggaatctctgaatcggactggcccatgagagtcgacccatgccccgttcttcttcaagcggctcctccttcgctgttcagtttcaattccacagttgtgtcttctccttttctactaacgatctccagtttccgccatggtcattgtccttaagaggtaagacctgaaccagaagtggatacataaaaatcgaaaaccgtattaaaccgatcggttcatggctaatggaatctaatttaacggtttgatatgaggaccggaaaagaggtaacaatttaagggaggtgtaactttagtctttttttttttttttttttttttttttttgtgtgtaactttagtcttatcccgaacattttgctcaaataagattttatttttctatataataataaatctgagaagataaatccctaaattaagattgttcatgcgtggagcataacctaaaggtctaagaatgtggagtgcaaattcaataatgaaattgttggttctcttgcttttggtggacgcttcattaatattgaatcgtatcctaagcatgaaaacatatccaacacataattccgaggttttccaaagcagacgcttcattacgtttgacttacgtacactaactggtgataaccagcgaagcggtgtggatcctgcttgcataccaaaatcaaaatgtgatgatagagtgatggaaataggtaatactccagattatcacagtagtaagttcattgatttgttggcacatctttaaacttgtaagctttttataattactttattttgtaggtatatggaggagaccgcgtactctttacagacctaaaaagttcgaccacgagattcatgacgaagaagaattatgaagttgttggtgctattttcttaaattttttggcgattggttttggtgttaattatcatcattttaatgtattagtttgtttttatttgcggaatatcatatgattaattagatggcccgaaacgtctggtacgtaagagtaagaagatatgaaagctaggtggagtcttgtgctattgacaagttctcgacccttgtaaagttgtgctcctccttcataatgccgtagagactaacacacaaactgctatttgggagataaaaacgaaaagaggaaacaacaaggctaagcggtaatgtccaataggatccattcaacttcattaatgtgagataataatatttttttaattaaaaactgttacattatttagtcgtatcccgaatattgtgttcaatcttacgaggaaaacgtcgttaaccctagtccaaagcgtttacgaaaaataaatgggagcttcttcttcgctttataaaaagtactaaataaagactgaaaagatatagaaatccctaaatattgattgttcctgcgtctccgagcataatgtaggtgtttctaacaatgtggagtgtatatgcatgcaacggcgaaattgcacttctccttgcttttttgatggatgcttcactgggtcgacattacgttttaaatgtatcgaaagcctagctagttacataatcacactctttgcagtaataaacccaaagtttttccgacatatcttcttcacaaacatcacatatgaactttgcaccggtgtgttgtagagaagagtgagtggatgttcgtcatcttcccgctccacagtctcaggggcctttgtggacttaaaaaaataaataagtgaaattccaaagggagataattaaaaatcgatttggtatgagaaaaatctaccggtatggtatgagagaaccaaaatcgagcggtcgttaataattagaacgaaaacagaacaaagagagaacgaaaacagaacaaagattgcgaagagaaatgatgatgatcagctcctcctccattacatcatccctttctcttctgtcttcatctcctgagaaattgcccctcataaaccctatccagagatgcccaattacttactccggcttcagaacggcgagcgtgaacagagctatccggcggcagccgcagagtccagccgtgtccgccactgaatctagggtttctctcgtccttgctctcgcctctcaagcttcctctgtctctcaacgccgtaaatgttccgtcttttctcttgccggattttgttttggtttttgtatctgctgaattttcattgtcaatttaattgtagttttggctgatttggcgatggagactgcgaaatatgtgtttcccaagagatttgatagctctactaatcttgaagaagctttcatgtctggttagtttttagcttaatcttctttagctctgtgttattcacttttgtagtaacttaaaacctttgatttttctctctagttccggatctcgagacaatgaactttagagttctatttagaacagacaagtacgagattagacaagttgaggttgttcttaatttctctacgttggtcctattggtcctctctctttaaacatggatggtctaagtttgatgctatgactttgatacagccttattttgtggccgagactataatgccaggggaaactggatttgactcttatggtgcttccaagtcttttaatgttttagctgagtacctctttggtaaggtacttatgaaccattccttatgaatttttgctgtacttttgtttgatttttgaatcttgttttgctttaaatctggatacttgtgttttcaatagaacacaataaaggagaaaatggagatgacgacccctgttgttactcggaaagtccaatctgttggagagaagatggaaatgacaactccagtgataactagcaaggtaaatatatctaatcaatggatcgtggagggtctctttttggaagttcttagcttgtttttacatagatagcattactttggagtagctttgagtgagttggtttcttttgtttgttaccatatctagatgaattttttttctcaacttttattgagagcatcacactttatgatctagatcaatgatagtttgtagtattattttcctattatgtaagtgctaggaacctaggacacctacttgatagttgctcgcaaaaataattgttttctgaagtggtctctggttcatttttatcttgttctcggacctcgtcatttagtatcttatttattttgcatgtatactgtttgcttcaggcaaaagatcaaaaccagtggcggatgtcttttgtcatgccctcaaagtatggttcgaatttgccattaccaaaagatccttcagtcaaaattcagcaagtgccacgaaagattgttgctgttgtcgccttctcaggtaaagatacttgatttcacttccatgtgtgacgagactctagtttgaattatcataaatatcatttcaaactagttccagttttatatgcctgttttctcatgattgcaaacattgaaaacaagtgtttttctctcgatgctcatgaatgtgtgatatagagtacctaaccttgacatttcaaaacacaaaatgttcagtacatgttcatcattgttccgagaagttttatcttttcattaaaatgttcagtgctcgtgaagcatctaacataatcagattgttattgttaccgatgaacaaaatcaactttgtttcaggctatgttaccgatgaagagattgagagacgggagagagaactaaggagagctcttcaaaatgacaagaagttccgagtgagagatggagtatcatttgaagttgcacaggttaatcaacattcataaatggctaaatggattgtcttagactctctactgatactaattaatgaattcatttcctgcagtataatccaccattcactctcccgtttatgcgccgcaacgaggtctctctcgaagttgaaaacaaagaagattagccccatcacaagtcatacatacatgtatatattatatgtatacacagttaaatacttgtgctaaagacaaaacgcgtttacttgaatagttgaaaatgagtagtaattactggtcctggaagccattttcttcacccaccattatgatgcatctttacttcgcttatagcccactagagatgcctactataggctttgaaattaacccaaagaagcactcaggaccttttaacttttggaaaattccgtcctaacaagtttacatttttggggtttagtacaaatttttaaactttctacaaaaagggtttcatgtactaccaacccttggaacagtatttctgggaattacaagttttcttcttttctcttgaacaagcttgtgttatctatctatgtatataagtatatgtcacatatatatctagatataacatcccatgggctaatcagtttcaggaatgctatctaacaaaggtctccagccttctttatgacactcatcatcatcatcacacagatgttgcttagcaagagtcctataaaccatttcatgaacagaacctccttgaagcagcttctccagctcttgcttactcacaaccatcttcactctcacaacaccattagtcttctccttggtgttgtcacaacaatctgttaatctatcttcttcttgttcttctttttccacctctggatttgcaaacctgactttcttcatcgtcttcttcatgtgcttgattgagttagtctcctggggcaatagatagtagagacggccacagagaagcttggcttggggatgaagatgacaattgttggtgagagagtcaaagagagagtagtgaggagagaattgggtgaggatgtgatgaaccttcataggtcctctgtattcaactactttcccatcatttctcattatctttatcactttcttctccattactaaacagttccccatactttttgtttgtttgtttgtttttttctaactttagtttgtgctttcttctgtatatgtgtttagagatttttttgtttcttgagttttggagatttgtggttgcatatttatagaacttaaggttatgtgaatgcccctgcgtttcgggaatattacgagaaatgccattctatcaaatgctcccctaaatgatctttatctcattttttttcattaaaagtgtttatatgtcgtggtggggtgtggtcgggtggtgctctcctaattatgtttttaaaaaaattggatctcctaaactaatttcgattttttcacattaaaaaaaaacgaatttcgatattttcacataaagatctcggaatagttgtgtagacttgtagtggtagtggtataaaggtggtagatgtgattagtgtgatcagaatatatcaagttaaaagatttgatagtaagttaaaatggtaggaaaagttatctaattacaaataaaattgtttgaaatagttaaaatttagtttggctgaattatgtgtctgaatatccccaaagaatggaagtgcatgtcgtgcatcaccgttgcatccaatgtatgtttatgacttatgagttatgtcttttttaaaaaagaatttctacctatattcttgtaggagtatatgattatgtaggtggtacaagatattcaaattgattagattaaaactaagtgtatcaccaaactcttcaacaatacattgtttaacgactcccgatgttcttgttgggaggatatatcttggtctattgaagatttgagctacagtagtgtcattttaaaattagttgaatgaatgattcatttcaaatcgttttaaataataaggatggaggtatgcactttctttagccttaaaattgaatatccaagttgtttcactaatgattcatttcaagtcggttacatttataagaatgcaggtcacataatatctcttcgtttgttaaaagaatcaaaaattaagattaattttacgaacactcatttgtcgcatcgatagagttaaaatccaaaatacgttatgtttataaaaagattgatttaagcattttatcttcttcttctttttttttggacaagattcaagcaattatatctatcattttaactaacaagcatatagttaaaattgaattaatattttattggatttgttagacgaattaacattttgtgtgtaattgcattacaccaaccatctttatactttagtagacatctaaccacactagtttcaactgttacaaaccattcacgatctaaaaatagtattaagtttacgaaaaaaatctatatattgaccaaaaagaaaaggattgtagcggaggcttgcctacatcataaggtggagccactaggaggaccacaaaaggagtccaaatgacttttgataagtggatgtcacctccaattcgaaccacaacttgatttctataatcattcttacattgaatatttcccctttctctttaatcgctaacatgcgcccgcaagtctcactttcctataccattgttttgttagttggaactccacaaaacccaatttcattgtacttctttaattcactcgtttgatacttttcactatacgacatgttatcattatgttttgttaaaatgattagtaataacgcattaccttatagtcttatagataaattcactggcctagagatttgcattacaataccctcatttgtttgcatttacttaagtttcctaatttttgtggttttgaattgttgctcaaagcttatgaagcagaaactgaatttacatatgccacttcaaattatgcttaggtgtcggtttatcttcgtttgttttagtctctcgtttctagataactctaatgtcggatatcatcaacaattcaacatgcatggagttgattctaacaccatttgaaacgaatctagcttataataagtcaaaccaagcgcacaagatcgacaagtaattaagcttatccaaaatttagttttcatagcgtgggtatcaatcctactaaattccaagagagaaaacaaacaaacttatctcatatggaccgttttatatcttatttttgcacagagaaatatggaccgttgaggcatatacatagtctaatctataacaagaaaaccgaacactctatacttatctcgctacttgcccattaaggctatatagcttcaccaaactttctctatccatcactacctcacatatacacatttatacatataaaaccaatttgccctcttgataacgtaatcttatgcaaagttgatatttttgggtagtgtggtccatttcatcaactaagtttaaagtgcttacgatgataaagcgggttcgaataggttccaccaatgaagcatgtttcttttttttgaacaaagaagcatgtttcttattctgtatttttttcatggtaaacgagtaacttttaagtgtggattcatattaatcccgatacatatgatattcttaccaagtgacttaacgtattcaatagagcagagataaaactgagtgggttatcagtaattttattctttgttttactttttctttggtcggcagaaactttggccttccagaaaacagtacctttttttttaccgagtgtggattttaacattttcgttgaccgttgatttagggacactgaaaaggtaatatagagaggtaaagattaagaataaaaactacaatgggtgggtaaggaagaaataggttctttttattattttctttggtaatagtggatgttgatgaatgatgatctaagccaaagattttttttttgtgcaaaaatttaagccaaagataagaaaaaaaatgattactaattagaggattttatttacctttgcttacaatgtagtgcactcccctcgtagtggtggcggcagaaattttttgaacatgatagagatggaaatttgataaatttaatttgttgtaaaatatgatgaatatccaataaaaatatgttatccatatcatatgcatttctatgcatacaaatctcttcttccacatgataactttatatatacatgacaaattttaatttaattctccattccttaaaaagagttatcattattataacactttaggtaggtactactgtatatgtagttgatcatctatacaatgaaaaatagaccgcagaacattagcaatgatttagaatataattcacaattttcaggtgattttggtacggactcaagttgtcgctgcataatatgcatagatatgtaaatcaatcaaaatcaaataagaatacactttctggataaaaattgtaattaccatagtcgtcgcattacatgaaaactccgcaaataaaaattgcatcccacattctaatgaggtcaatatgtaatatgaagagaaaaagagagatttgaaaatatgttaactgggtcaacctctaaacttttaagtatttttctaacttaatcttaatagcaaatcagataaaatacaaaacttactggggcaagtgaccccactcccatctacctagcgccgccactgaccgcaactcgtgctccacgagtctacaaaatcaatgtagtgattgtaaaattgtaaatatacataagagctaggttatatgatgtggcaagcaatcatggatgaacttactcagataacccggagtttgagtaactttcatcaatttatcacatatgtatgtccctcttggtgtggtcagagctacatgatcaattgccggaagatgatattttagattagctcggccaacatcaatttggaacgtaaaagagctttttgcaaggtcgtcatgttcttctctaaacctaggaatcccaccgtccttgctagaagttggtatgattagctggtcatcattatcatcagtttgtggcggtaactccacaatcataaccctatttctgtcgtccgggtatatcgtaaaattactactttgaacacctacagtgctcaataggatttggtcttcccatatccaatctaacacccatggtccttcaatgtcgtgatacttcaagtagttgaagattgtaacgttagccgtgtaaccacctcgagtttcattcatgatatcccaccttatcgtcacatttccgtctggaaaccaatctaagagaaatccaaaaaaaaacgaaaaaaatcaaaacatgtaaaagtaaaatcatggtactggaatcaattctctattacaatattattcaggtagaatcgagaattacaattgggagtaccgaagcaggcttggatagtcacggaattgcaaaatcttaggaggctttctttacaatctaacccaggtataataggtaggtatcgacccaatgaagcctccaccaaaagcaggagaaagagtagtttggcagttgaatatgcactagacatagttcgacacacctgacaataatgctcgttagtttaataaataaatagaagaggatgctctcgcttttcgttagcatttatacccacgttttccttcaaaagattggagctaaatattagggataagtttaaactttaaagtaactgatttttaatatgtaattaatatcttcttattttcgtataaaaatatattattgttaggattcttaaattttgccgttatggattctagtatgttaatggaatctactgttatcttttatataaatcacaaatcacatatctaatcaaattctgccacatagattaattaaagaagttttggtaatgttaaaaaaaatccacaaaaaaaagatattcttaaaaatagaaatcctaaattttctcacataccaaaccacgatgccacgatctttggaagtttagaaccatatcagaagaaaaaaagaaaagaaaaaaaaaaaaatccacttcatctacctctagaaccatacgttgatattatgtagttgagtgttttctttttttctgtcagaataatatattgaagagttacgattgtttttctttttcttgatgaaggtttttctagtcacaatttttcttattattattttatttcttttggtaaaatattgtagtcacgattatcattgaatttatctccttatatcttctttagattctcccctcttaggtaactaataactctatttataattaaccgaagtctcaaactattataaaagatttaaaaatagaaaataaaagatttagcatttaacaaaactttcctcaaatctctctacgaatatttaatactcgaaaaatcttacgattcggttttagaaataaacaaatttattgtcaataatattaacaactcaaaaacattttgataaatctctctataataactaaaaacacaatttcttgaatatttcaaccgagatttcctatctcttttatacttgctaccaaaataccattttgataatcttactctaacaaaattatcttaagcgacaaattaatgactcttttccatccaaagcaagacgaggtctcggtttttgtgaaacattttcacataatagcaagcgttgagctcggctcaatttataagtgtgactgcgagcgttgagctcggattaactgcaagaattattttgtcttttgaatgtagctcgatgctaggtgaactaagctttttgagtcgggactcaatttagagcttgacttcaacaatcaaaaaatgtaaagcacgaatacttatcttgatgggagaagaaatggcgagaggctgagctcagaattgctgttccaaaggtagagttgcattgttcgtctatgaagagtcgttcttatctagtgattaccttgcagcagagacagaaatactgtgataactctttgtcgaattcgacgttaaagtgtaggttggtctttctagaaagctgagcttcggggcttcgaattgatatgcagatcgccatgaaaattcttttggattgctagaaatttgctttctaatttggttgatcgtgcagtgaggatctgcgtttcgctggttgcatctgttgcaaagaaagagtcataaccttcagtgtaaatttctgattgaggcgagattggcttcttttgaaagctacttttcgaggcattccgtggataggttacacaccacgcagttcgtcggaatcttcctggaaattgatttcaaagtcgactggttttgtaacttttgatcagtgtttcgtcttgctgtatctgctggagagaagcgcatgtaactttcggcacatagcttcgattggaacaatattggactatatggagagctgtctgtctgggcaatctgtggatatgtttcccgtctcttggttcgtcgtacaatgtcggaaaattgctcacgaagttggtcgtttgtttaagtggtgtcaatctgaattgtcttggaaaaacgatcataactctcaaaccataacctcaaatcgtgatccgcttttttctgtggcttcgtgtgactgttgctgattattccagaaaatatcgtaattttccgagttgttttgttgctccattggcgatcagaattcatgatgacgaaagcagaggttactttgtgctgcttcagaacttttaacggagggagacatgcgatgctgctcaagttgagatctggaattttggagtctttgtaaacttctttagagctctccacattgttgacttgtcttgtagaaaaagctcaaaatgttagctgttgacaagttgagctaggaaagctgctaggcgacttgttgaagaactccaagctgttgacgagctataaggcgggcaatagcaagctcggaagacggccggcgagataaaagctgggcgaactacgagccagagaaactgcagacgaactgtgagctaggaaaagtgctgactaggtgctagctagacgaactgcgagctagggaagctacagacgaacagggagctaggaaagctgcagacgatctgttagctaggcgaagtgcagacgagctgctagctaggaaagctacagacgaactgggagttagaatggctgcagacgagctgttagctatgcgaagtgcagacgaactgctagctaggaaagttacagacgaactggtagctaaaaaggccgcagacgagctgttagctaggcgaagtgcagacgacctgctagctatacgaactgcgggctaggaaagctccagacgaactgggagctacgaaggctttaggtcggttgacttatgtcgaccactcttatctttcagacttttatatttgaataaaatgtttttgtccttaagaacaagttcatgttttttttttttttttttttttgtgaacctccgtcggttgattacgtattaacaatatcggattcccaatcttgaaattaggttttaaatcgactaaattataagccatatgcaagctttgagctcggctttcgggcggactggttttcacctgacgtcacagccgattttttctgtctaagttcgggttagatgttaagtgcgagactgagctcggctttataaataaaagtattcggcgtgtactgggcgcgagacgtctctcggcttatgcccagtaggcctatgtataatttaaagaggagataagttgagaactaggcagtttttagggaaataatttgagaactaggcagcttttagtgtatagttttgaattgcaatacatttcaataatggtttttttccttggggtttagtaatctatcttggattttagggtatagtttttaattccattgcatttcctaaatgtttttagtattctatcttggctagtgtactagtctagtgtaccgaagtggtgtactgttctcgtgttctcactttgtctcacgaagctcgtcagctcgtccgtctcaagtagctaatcagctcgcccttctcaagaagctcatcagctctcccttcttaagaaactcgttagctcgctcctcttcgtcaagcttctcaactcgttctcttcaccaagtccctcagctcgtcttcaagctatccagctcgtctttaatctctccaactcgcctttaagctcttcaagctcctcagctcgtcctcaagctcctcagctcgtcttcaagctcttcccatcacagcgaccatctcctcgtctagctatcagctcatccctcgactgcgaaactcatctacctcctcgcctagcggaagttcgtccattgactgcatagtccacctatctcgtcgtccagctcgtctagaccttcagcaaacaactcggtttgtccaactcgtctctctaccacggttcatccagctcatcgcacatctgccggctcgtcacctacctgccgacctacctccaacgatggcctagctcacttattctaatatgaactacgtgtggcttgatccctttctaagggtacgtaggcaaccttttacaaggttcagctataaaacgaataaactctattcttcctcggacatcaagatcgtcttccggcctcaagctcgtctttcatctacaatcggctcgttcttactccatttatgctcgttgaagaaatcatcctttgtaatccgtccaattcgcctaagtcgcgggctcgtcattaatagaaagattcttcttccttccctagagatcccattttcgtacttgtgtgattcgtgcatcaacagttggcgcgccaggtagggggatagctcgaagatatctctcaaaactacgaacccgcgacgaaccaaagtgacaacaaacggactacatggagcattcgataccgactcgtcaggctctggaagcaaaacgacaacgtcgatccccgggagagccagtcactcgacctcttcatccgatatcgcatcatgttctccgacctcttcatttccttggggtttagtaatctatcttggattttagggtatagtttttaattccattgcatttcctaaatgtttttagtattctatcttggctagtgtactagtctagtgtaccgaagtggtgtactgttctagtgttctcactttgtgtactatcatagtgtacgcatttggtgtactagtcttgtgtactaatggtgtactgttctagtgttctcacttggtgtactataatagtgtacccatttggtgtactattctagtctacttctagaatgtcaaagtatcaatccaaattataatacaatatatttcaattcaagtgttatgaagcataataataatctagggttatgactttgaattaggaatttatttatttacttggaattctaaattctagtaatctaaggctttagggtatagttttaaacttcattccatatgatatatggttttccttgggtttagtcttctctctttgtcttttagtgtatagttttgaatttcactacatttcaataatgtcttttagtgtatagttttagggtatagtttttaattccattgcatttcctaaatatttttagtataatagtagactagtctagtgcaccaaagtggtgtactgtttttaattcacttggttactaattggtgtacccatttggtgtactattctagtatactattatattctatcttggctagtgtactagtctagtgtactagtctagtgtactagtggtgtactattctagtgttctcacttggtgtactattatagtgtacccatttggtgtactgggtttctctcaaacgtctctcttctcgaactcgttcaccctcgatttgttgtacaccgactgtggctagggttcgtgaaaaaccaagaagagtaaagtaactcaatctcagaataaacacgggctcagaagttatttggataaaaaacgtaatgaaactatcgggctcaaatatttgggctcacttaatacgaattggagttaacgggcctaaaatgagttttaaaacccaatccaatttgtttcgtcgaacccagccggaatgtgtgtttttaaaacacaaggctactattgtatttgacacctcttttggatttttgctacctttttctatctcacatgaatcctattagacaaacccaataaaaagtaccctctcagcatatttccaaaaaaactgtctagttctcaaataattttctaaaaactgcctacttttacaataaacccttgtaaaaactatgatactgcagttaaatcctatggaatgattagacatatgatcatgaaagcgacatatgtgattgagttgtccaccaagaaagaataacagtaactggctcaatatgattttcttttgatttaaatattgttttaaaaagtatatcttcattacgaaaattatgttttggttttggtgtcttaatttttagtttggtttttcatatagagagggacatatctaccaattctaacttgttgatagccgtaaccaagattcaagaatagttacctgccaccacatcttcgcggcgtgtatctcaagcgtcatgatcgttgacgccgtctccaccagatgtttgtcgccgtaagctaaccctaataaagcggcggagtaataagcgtttacggcctcgcttgtgctctcttgattccggccgtcccagaactccgttaaccctccagcccatgagtgtagcttgaaaagatcaaaatttctcaaacgcggataactagaatttgaattattatcatcttttctcccaaacgtcatgaaatccgccaatagactgtacgcttgagctctgtatctctctccccacaaaggatcaaacttagcgagcacggcaatagcgtagagaaagtaaccaatatggtaatgatgattattatatataccgaacccgaaatcagcttgtttccacttcaggatcgaagtgaggaactaagcagcaatgtagaaaatggaagttgcaattccaatgaaggaattaatcctgaaaccagcagtcattggattgaaaacgttgtcaaggtactatatgttttgtcacaactttggagaagagacaaatttcagattttgccagtggatcttacctctcctctgtgtattgttcttcaaggttaggaaaccgtacacagtaactaagcagagagagaagtggagtgaggaagagcatgataggtttcttgaagctatcaagctttatggtcgtgggtggcgtcaaatccaaggtattatttgacttggagcttaaattgagcttagaatctagctgctattagatgtagttctgaagaacctaagtcttgattttgctgcagaacacataggtacaaaaaccgctgtacagatacgaagccatgctcaaaagttcttctccaaggtcttgtttgttcatatgttccataacatcagtagtactgatttggttagtttgtaacctgacagttttttatccattgcagatggctcaggaagctgacagtagaagtgaaggatcggttaaagcgattgtgatcccgcctcctcgtccaaagagaaaaccggcacatccttatcctcggaaatcgcctgttccatatactcagtctcctccaccaaatttgtcagctatggagaaaggaaccaagtctccaacctcagtgttatcatcgtttggttcagaggatcaagtcaatagatgctcttcgcctaattcgtgtaccagtgacatccaatccattggtgcaacttccattgattaaaagaataactacacaacatccaagcaacctttcaaagatgattctgacattggttcaacacccatttcaagcattactcttttcgggaagattgtccttgtcgcggaagaatctcacaaaccatcctcttacaatgatgatgatcttaaacaaatgacgtgtcaggagaatcactactcagggatgctagttgacactaatttatctcttggtgtatgggaaacgttttgtactggttctaatgcatttggctcggttacagaagcatctgagaacttggagaagagtgcagagccgataagttcttcatggaaacggttaagctccttagaaaaacaaggatcttgtaatcctgtaaatgcaagtgggttcaggccatacaagagatgcctatcagaaagagaagtaacatcatcattgacgctggtagcttcagatgaaaagaaaagccaaagagcacgtatatgctagttttagccattgtacagtttggagtcaattttgatgatccgtgaacattgttttagccatttgctgggtgacttggatcatagcattccacgaaccaaatcctaaatccgagttggtaagtggttttacttgtccgccacatgtaatccttgtaatgaagtttctcctgctgtctcacgttaagaagacacttctttttttcttcatatacaaatcagttttaacagtgtatttgtttggccaactattcctagctctgtttcaatcttaggtctggtttatgattattagccttaagaccagtcttaatgttaaaaggtttttacattaagcagattaatatacgagtgaaacttcaaactctgagaattgaaacattgtgcaaagggaaccccctaaatttctgtggacacttgcttaaaaattggagccctcaagtctaattcacttacttaaatattggagccctcaaagtctaatgaaatctatgataaataacaacaattgaagtatatgcaatcaacacaagccttgcttattctatattgaaaagtgtaattctagcttctatctccctgggttcaggtgatgaactgtatcactatcacagaaaagaagcagcaaaaaaatctcagcaatggcgtctgttagatatctcactggtttatgtatgcctatcaaagaacttctctatgagtacagagaaagttgcaaatccagcgcaacctatacacgcagcttttggcccacctgaaacaagaccaatccattaagtcctcaagaacacaatgtatcatgtaagagaaatcaaacctctacgagattacagtttgggaattaggccgttgcatattgataatgaatctctaagatttaaattccatgcacagaagataataggtcttacctcgggcggacattgaaccaccggtaacacatccagctatagcggtgtttacagtgtcatgcttagctcttgcctttttcagagaggtaaaccaaaaaagtcgataataaggttttgaagttatgatacatgagttagtagtggaatttccttgtttttcttggtcaataaacaaggtattaccttttcgacaatgcattctgcagcagagaaaaccaaacccataactgcaaatgtcttacaggaattccaactcctttgccccatttgttttgccgtgaacacaaactgctgcctagccgtcatagtatcatgcgtaataggattatctaatgcccccaagaacaaacccatcatcaacccgagtcctcctcctacaccacaattcacagagaatgtgaccaaatcaattgaatatccttcacatgtctaactgtcatatcaactctacaaccggcgagcatttatattagtagctttacaccttttagagtatttatagaaaatagattcgatttgagatttcacatcatcaattcacctaaccaaatccgactattaagtgcaatctgaaagtgactcaataaccagctcagaagcatatcactattagaaagctaaagactttaccaatttcactattctcaaaccaatcaaagtacctagagcttttcgcatttttggaaaatcagagcaatggagcaatataggtcgagaaagagaggatatttgaactgacccatgactccactagtaacagcgcgaacggcgcagttgttccaaacctcttgagctcggatctcctcgatggttggcatccggatcggttgaatctgggtagagttctcatcagaagccacggggggagaagaagcaccggttgttggttcagcagcactcgaatcagccatttcaaaggttaagagagtaggatccgacaagggacaatgtcatcaaaagcttaaaagaaggggattgtacaaatcagatcaagcgtgttcgttcgcgcgcctatgagataaaattaatcagggtttatcccgaggttctagggtttaagctacagctagctaccactttaggcccattagtctacattttgggcctgtacactcgagcctcactaaggtccaatatgtgtatccatccgattggtaccaacgaagaatgtgccacgttgcatattgcttttggaaagaaaaaacggtgcacgtcttcctacatatgcatgccgcttcaaattccccccaccatatatgttctaatctctttttaaaacaaccaaagacagagatcagaagccgacctcagaggtcgcacaggaaataagccaatttaataaaatcgcattgtattaatcaacgaccaaacgagatcgggagctattacaaagacgtttattccagaataaaatagagttgaacaaagtcggcagccattacaagggcgtttatttggaaataaaaagcaaaagaaaaacgatccaaaagccaccaaggatcatcttctatcggccagatagaacatcagatcgccctgtcagaaacagtgcgattatcctggagaaggcgatctggcatgggccacactagttgcagaccagctttctcccaatcctccgaacgaatctccagtgccctaatcgtttgttcgacctcatccagacgagtgacgacccttcttcgtttcttcttcagcttagcaatcagagcttcgagctcctcgagacgaaaatccacttcgtttcttggttcggaagtactgcagctcgcggcattgatcctgatgcagaaatccgacctgagaaatcaaagcaacgaaattcttaaaaatcatcctgatatcgaaaaaacgaaccaaagcaatccttacttggttaacgaagttctgacactccgtggtatcagcatcagtagcagcaggcccaagatagaacagagaaggcgtcctgaagtccccatcagcaataattgttggattcttctcctttgaggcggcagcagcatctcgatcacaatcctcacaatacgacaaaagaatgtccggcatcggagccagaagctgaaaaccattcttgagccaatggcgaggatgcgactctagcatagccatttttcgagcgatatcagactttcgttcgtcatagtacctcaacatctcgcggtattccttatgccttgactggacacacgacaagaaaccctcggcttcacgtctttccttcgagctcgcctggaataggagagtccagggaactcgaaggttattgaagaacggcatcccacgttcaatcttcctattccaggcctcagcattcgggaaagtcggaacatttttgccaacaaaggaagacgatccaacactctccatcttgcaaataggaggaaaagtccggtgaagcaattgttgatcaacaaagaagtatttatagaggcaaatacaggaatcgaattggaaattttctcaaatgcgatctggaaattctcattttccttttccgagaaacactaatatttgcattttctccaaaactgggaaaatgggaatttacatgattacgggttgacttccctcaatttccttttccaaaaaatgacaaagctcatacatggaaaaaatactattctgcctcggaaacaggcaagatggaaaatcatcgaaaatagaagttaaaattaaaaaaccgccccgaaagtgggtccacggttaaataagagttttgagatcgcccagaaaaattgggtccacgatcgatgtatcaaaataaattacaaagacgacctattcagatcgtctggttcgcctcttcaacgcttacgcgtcgaatatcacttccgctaacaaggtcgacatttgagccgtgctggtccgccaccggagcaacttgagaggtttgcctcgaaaaaccgagctgatccggggacatgttcaggtcatcatccccgagctcgatgacgttcaaagcattgacctcgtcggccgcccttctggttaactccttaaggccgctgagctcggatgccgcaatcttcgcgcctctctgcatcagaatacccactatctcctcagctcctttagcttgattctcagcgtccaccttcggcccgacgaggtcctcttgctccttgagataagccttcactttatcaagacgagcttgggctttctttgtggtacgggcgactttagtagctcggtcattccgcagcctgttgcactccctctccccatgctctttcacggcaaccaacgcgacttgaagatcgctgatctctttctgaagattagcttctcgaccgttgagccgcttgacctcgtcgttcaacgagctcatctctgccttatgaatctcggcagcatctctcaatgctgccatttccttcatgtctttggcatagatggctttggcctggtcagcgcacttcttcaggttatcgaaggcctctctgtcggcgagcttcagcttcaacttgcgatcatatgtcgcaatcagatcgttggccagggcagcggtctggaaaaagaatcatggttaaatccaaaatacaaagatactaggcaacaggaagacgtataacctgcgcgtacctcaagtgatgatctggcaaacttctgatatccctctttcagaaccaggtcgtcgggattagggaagtccgccgctccggggagcatcaagttacgccaaagatgactggcggcctcctgatctctcacaaggaatttctcgccagaatacttgaacgtaaactggtcagaattaagagtctcacctcgtgacaggcgaaacgtcttcggagcagcagcttcatctagaccggcttcagaagccgacctcttcttggattggctagccaatcctttccctttctcctcacgggacctcctggatgccccgagctccgcaaccttctcacccttgtcttgatcaaggatggttaggcccgtgttgacctcttcgctttctggcgcggcggcataaacgacgacggagcggtcgccggtaacatttcgaacttcaggctcgacaacctgaacggattgactttgctcgcactcggcgatctcttgagctggaatgacctcggccccttcaagacacgtcttgtcttgagaatccggattgcccgtctcttgagagacctgatcaacaccggaagggccagcactaacgggaggatttagtgcagccgcctctccgtccaaaggctgcgtctcttcgatggaagccgggggaggtggcatattcaaaagcccggcagcaaagctaacgaaggatttccggaccttccccattattctgttgacgcgcgacctcgtgatgtctttccacgcgcgacgccgagctcggaatattgcctctaaaaccccttcgaactcaacgggaaactccggactaggtctgtaccgatctgcaacaaaagaaaaggctatgagaatctagtcaagatcgacatatctttaccctatctgtttaaaaggtctaccaggaaactccgtccacgtccttttcctccccgagaacggacgctcatacgactcgaggtcgaccctgacgtagaagtaatattcttcccagttcttgaagttactgactttgggaccgggaagaaagttatgctttgggcggttgttcacaacccaatagccgggcgacctgacagctttcaacgtcgtcatttcctcgaaacaacgaacgtttaccaggtaaccttcttcagcgccgaaggtcaaagcggcaacaaaattgcagatcgccgccggagtaagctgggagaacgccatacgacggcgattcagaaaggagatgatcagagacggaatcggaaaccagaggtgacactgtctgaagtaggcttcatacatacaaacataccctcgagggggattccatgggcgctcctcctctccgggaatcatgcaagtgagcgggcgatctccatagccacatagggcgaatacttccgcgacagactcggttgttgaaagggtctttttcgcagtgatctcggtgttccagctaacaactgggtcgaggtcaaattcaacataatcctcgtgaagtaatctcgcattaacctcagcctctgtatactgcggctgcgtgttataagcatcctctaggtcgatgagtgggtcgaactgagataagaaatccaccggatcttcaggagcagcgagatgtccaccggaaccttcccgatctggctcatcaagcaacgtcggaatctcgatccggttcgatcgactagactgagcttcgtcgttcggattcccggttagccgagaagtctggcgaactaatggcatttcgctctcagaggaagaagacggagaaacaagaacaaccttacccattgccggaaaaatcgattaagaatcgagagtacaaaataagtcgcaaaggagagaacgagagctacctttgattcttcttgcaagcggcggaaaatgacttcccgagggtttagtcgaatataaataaaggcgaatgggcggcaaacctacgaggtcatcattaaacctacgggacgcttcgtttcccgagcttcacgcgcgcgtacagacgcggtgatttgacacgtgtcagatacgttcgaaatacgaatcgattcggaaatctaatgatcaattcacgctttccaagatttaaatcgaatattcaatttctaagttcggaaatttcgaattaagcaactcggattcgccgaactggggggggactaattgttggtgcaggaattagcacctccgacaataccggtttaaaccgaggaataacgtgaataaaatcgagaattcgattgaaccgggaaatcccggctggcctgttaatgggcctgagtcatgagctcgccacatgttctaacctgatcaaacactgatagagaaataattcaacaaatgaaggaaattatgggagatggaaattagactgatcatgtgatatctacttgctcaactttatagatttgcaacattactttattattagatagcattttccgagtgctagaatacccgtttttatgtagtgtctagttgtatgagatggagtctttggatgattgcgaaatgtgtttaatatatatagtccaagataggtgtagccaaactattggactatctttttccactcaaaattaaaggtcttcaaatatgtgtgttggtgcaggaatttgtggttctttttttgtatgaaataatggttgaggtgcacggaaagaagctcaaaacccttgaggtaataaggttcttttacagctaccattctgacgtgcttttatatattaattcttcactacattagctttttttttctaggtaatttgtctaaaaccacttgtttcgaccaggttattatgcttattttgatgtcaagaatgtcatgtactcatcttttgtatcccacattctaatgaggtcaatatgtaatatgaagagaaaaagagagatttgaaaatatgtagagatttaatctctctacgaatatttaatactcgaaaaatcttacgattcggttttagaaataaacaaatttattgtcaataatattaacaactcaaaaacattttgataaatctctctataataactaaaaacacaatttcttgaatatttcaaccgagatttcctatctcttttatacttgctaccaaaataccattttgataatcttactctaacaaaattatcttaagcgacaaattaatgactcttttccatccaaatcaattattttctttttatattcaagatttcgagatttataaaaaattgaactatgttattgctgatgtgtgaactttaaatgttcaaataaaatgatgttcagccaaactttcagcaaatagcatctagctcctccagagacatctttttttttttagcaactttgatcgttacaaaatctaaaggtcttaattgttacaaatctataacggttacacgtggtagaggaatggagatggctccaccttctttcgaaacactaaagaaccggttcggtctgagattaactgaactgatcacttattaaaaccgggtcaagttttttttgacttttggtcgacattattttatttttataagtcctctctcacgaaaccagttaattattggtgcgtctctcgaattagggttctaggatctctgctcttaaaactcttatcgccgctaaaactctctacccatcgcagagcctctctaaaggttatcttcatgatctcactcaatacatatgtttcgttactatatgtttttgcttctgattgtcgttattctgtaatcgtttagagtcgtttatggtttcccccattttgtctgtaatgtccatgctctgtttctttacagtttcctctccggcttgttagatatcagtttagttcctgatttactgagaaaccaagcttttgagcttaagtatgttagggttctgacgttgattgagaaatattataaactggttttcaagtttatttctttctggaatttcttttgtagtctgattataaggtacactgctagatatactggataggttacagtctcttactacttatccttgtctctgttctttggaatctatctgtaggattctctctttcttgttagatttatgagcctagtttctcactcagttaaatgaaacctgatatatacaatcgtcttctagcttcttaactcatcaggtgttgcaaatttgtaagtgctgtttggttctgcattttgcaattgatcattaattgagaagttgttaaaaatcattagatgatgtgatctttaagtttttttgcttttactgattagtgtttttgtagtgttttctctgctttgtttgcatctgttgttctccagagctgtgattggtttataaaggttatacagtcttgattcaaatgtgaacaattctctttttctaaggattttcacttcttttgtaaaatttggtctctgaatgtttttgttttgttgaatcagaatggattctcagatcaagcacgctgttgtagtgaaagtgatgggaaggactggatcaaggggtcaagtgactcaggttagagtgaagttcactgactcggaccgttacatcatgaggaacgttaaaggacctgtcagagagggagatattctcaccttgctggagtccgagagagaagctagaagacttcgttgattctctttgcaaattgtttttggttgctttgaagaacaaatgttatatcgtttggataattaaattcttattatgatgttaaaaaatttaattatcaaagattgatgctttagactctaaatctataatatattaaaaatcatttctttatcttcactttgtttttttttttttttttttttttttttgaactaatatcttcactttgttatatcaaagaaataagtcatgtttcacactctgcctaaacctttaccaccgaaaaaatgatgttcatgtgcctctctaatcatgccttggagataacaaaaagcttaagcaacaaattcatcattttgaatatcatggcatgcgcacacagcacgccttatacgggcccctgcttcagcccaagacatagatttggttatgcctataccaaaattacattataaaccgggattgacactaggatccgaaaccttggactccagttatatttccatttttatgcacaattgtattaatttgtaactatgaattacatagacgaatagtaaattcataagagatgtgtcaatcaagccacaaaaggggtttatcagtcaatgtaccggcctaaccactcccataaccaaaaccacatatccaaacgtggtttttcatttggtacaaaaacccacaccttaatttcacagacgaaattttggttgataaaaagtaaccatcttaaccagtctctcatttacccccaccagatatacatatgcttatttaaaccggatgtaacacaactcttcttcacatggacctcaagtaaaatggaagcaaacactttgtttcttctaaaagctctttgtcttctttgttttaatgtatgcttcacattagcttccgaccctgatcccatccaagacttctgcataccaaaacctgtgacatctccttaccatgaccatcacttctccaccaatctcccttgcaaaaactcctccgaagtaaccaccgaagattttgtcttttccggtctaaaaactgccggaaacttcacggagacggggttcgccaccgtcccagtaggcccagaaaacttccccggccttaatacattaggcatctcgtttgtccgggctgatctcaaacccggatccattaacccaccacattaccatccgcgggcgacggaagtagcccacttggttaaaggacgggtttactctggttttgtggactcgaacaataaggtttacgctaaagtgatggaagaaggagaaatgatggtttacccaaaagggcttgtacattttcagatgaacgtcggagatgttacggccacgattgtcggcggacttaatagccaaaaccctggtattcagaagataccgtccgtggtttttgggtcagggatcaatgaggagttgcttatgaaagcttttgggttgagtcttaagcagattggtacgttgaagaaaagatttgatcctgtcatgtctaatgaacattgatgttttctcttaaagtcttatcgagattattacatcgaagttatcttttatgtgatggtagttcttgatcataatgttatttatatattttgacccaaacaatggtcatctttagctagacaatgtttctttctacatgaattattatcacttatccacacttcacatttagaatcctgaattattatcactaaacctacataattttggcaacgtcacaagctttgaaaatttgacaatatcttctccaatccacaaaatatatcaaaatcaatgccagttcttctttgctataaggctctaaaggctgcaaacaaatctccaatttgtcgtgacactagctaatttgatcgctgtgtactcttgagtatgtgagaaaaagaccagagactttgacactagttaacttggaagctacatttccagcaatagaagaaacttgctatctgagcataatgaaacgctgcgttttaactctcatttattctttggggttaaactcatcgttttaatcacacaacagagaaaaggaattgttaaagccggtccggtattaataattatcgagctttgcagtttcggttcacttgtttaataccgtaccgacaatttcggtttaattagatttctatatactcaatcaatatctctattccctccacattcacaaccttttcatggatcagccacggcaaagctcgacggcgtctcagccaccggaaacacctcctcagccgtcggattcgaaaccatcgactttaacacagattcaaccaacgccttccacaaatccgagtccctcctccgttgtttcctctattccctcttccccagctccacaatcaccatcgctcaatccaaaccctaatcctcctcaatacacgcgtccggtgacatctccggcgacgcaacagcagcaacatctctcccagcctttagtacggccgcctccgcaggcgtactctagaccatggcaacaacactcctcttacactcacttctcctccgcttcgtcgccattgttatcttcctcatcagcgccagcctcttcgtcttcgtctttacctattagtgggcaacaaagaggtggtatggcgattggcgttccggcttccccaattccgagtccttctcctacaccttctcaacattcgccttctgcttttcccggctcttttgggcaacaatacggcggattaggtcgtggaactgttggaatgtcagaagctacgtccaatacaagttcccctcaggtggattttgttctctcatatgtgccacatttcaaagaattgtgctctgttacaaaaaaaataccaacttttttctgtatgtgtgtgttcaggttagaatgatgcaaggaactcagggaattgggatgatgggaacacttggctcaggttcccaaataaggccgagtgggatgactcagcaccaacagagaccaactcaatcgtctctaaggccagcttcctccacaagtacccaatctcctgttgctcaagtatgtattttttacccttctggcctctgtatcttgacataggaactccagctttgtgactcctttgttaacaacaactttgtttgcacactttaattccttatattttacttttggcagaactttcaaggacatagccttatgagaccttcacctattagctctcctaatgtccaatctactggtgcatcacaacaaagcttgcaagctatcaatcaaccttggttatcatctactccccaagggaagccgcctttgccacctccttcgtatagaccacaagtaaattctccctctatgcaacaaagacctcatattcctcagcaacatatttctacgtcagcagcaactccacagcctcagcaacaacaatctcaacaacaacatcagcctcaagagcaacttcaacaattgagatctccgcagcagcctttagctcacccacatcaaccaacccgggtccaaggtttggtaaatcagaaagttacttctccggtaatgccgagccagcctcctgtggctcaaccaggaaaccatgctaaaacagtttctgcagagaccgagccgtctgatgatcgtatcctggggaaacgaagcatccatgagctacttcaacaggtatccactgacctctcttcatattctcaactttgggtagccattttgcatattgaccagtattctcattctcacgcttgattcttacttaatgtgtgattgatttcttctacttggatagatctcttacagataaaggggaatgtatttgataaaaataaaatagaagagatattgagttatttgctaataatacctcccatagaaagccaaaaagcatgtatgatgactattgacagattcagtaataacatatatcgatagttttaggggctactttgatggtgttcaacactgaactctctgcatgatatccattgatttttttctctaaatttaaaatgccttgtctatccacagattgacccgtcagagaaattggatccagaggttgaagacatcctttctgatattgctgaagattttgtggagtcagtaagtagcccacaccgcattggttaagagtcaaacatttctgtcctgtgatgagttttttttttctaactcctgctcgttgtgtttcctttaacccagatcacaacttttggctgttctttagccaagcatagaaagtcagatattctagaggctaaggacatcttgctccatgttggttcgttctgatcaatattatctacctgcccgttttctttcaatttctcattccaattacaatgagtaatttctttttggtatcttctccttaaatgtagaaagaaactggaatattaggcctcctggttttagcagtgatgagttcaagacatttcggaagccagtaagaattagagatctgcattttatcaattcgtcttatttacaaaatagttcctaacatctttggttgtttccttggataatgttttgcagttgacaacagatattcacaaagagcgacttgcggctgtaagttttaacacatgattttaaacatcctaatagtatagattatggttctgagtagaagagaaacttatatattgaagattttcttgttgattttgtatatacattgtggattttgaagataaagaagtcggtcacggcaacagaagcagcaaacgccaggaatcagtttgggcatgggactgctaatgcaagaggcggtcaggcaaagacaccttctaatcccatgggctctacaactttcaatcactgatgtattagatcaaccctccaatcgtgtttggtaggaattttccattaaaaaggtacgaaatttgtatcacccattttgtaccctatctagatctcacagtccaagataactacaggcatggaggctaggctagatcttaattttaaccattagtaaagtatcttaccacctcatgggattgaattgattcaatgttttgcaaaacggccaaaagtgtatgaattgagtgatgagacacagttataaagcggttacaaaaccggactagccggtataatccattaaacagattcttctcatacagttgaatcttccatagctttgatcaattttatagttttttactgaatgtacacagaaaatcttggtacaatgttggcttcattagtccttttagccttcaactatcttcactggcgtcctgcagaataaaaccgaaaagaaagctttcagggcacttttttcgatcaaatttacccagtgtattagttgattgatttcacatacccgaaaggactctgcttgattgataacagctcaatgtcaagctgcaaaagaaagataacataaatgaacaccactttagaagccaacaaaaatttcaatccattcaacttggttacctctatcgtagcgtttggaggaatctcttgcactcctttcttcccgtaagccagctcgggaggaacaatcaccaatctctgtatataaacctcatagggtcatcaaaacaagactttgagtggcctgactttgtgaagcctttcggtttcaaaaactaacctgaccgcctacacgcatcccttcaacaccaagatcaagtcctttcagaacattgcctctctctgattgaccaacgtcaaacccataaggctgcaaaaattcattattatcagtaaaggatccttgcatattcaagtacagtaatggactctgtaagattgccttataccgttccacctccaacaccaagtccttgtcgacttgtcatgaacgttatccctttccattttgcaacatagtgaacctgcgacacaacatttgggttaagcatcaacgcttgttaaaactgttagcatttacatgtccaaagtaaaccaggaaacgtattcacaaccgtactgcgacccgagatcctttcacagcctctgctccattgccaacctttatatcatagtacctgccacaatataaacagaaaccaaacttgtgattattgcgagaaagacttgatttttcaatcctgttttgcggtatgagtactgtatcgaattcaaacaaaagatgatgcattggattacggacttgagaccattggggagagtcgtgaaatcgctttccggtaacttggatgcacgtagctgcagagaattgtatgtaagagattgagttttgagtcaagaacacaatgtatgcatagatatatatattgcttacagctcttctactggtgcttactgcctcggctgaaccagttgacaaaatcccagaagctgttttgaatcagataacaacattttctaaggattttgatacactgagcttaagtggagatgtgaagaactaatagagaatgatctaacctgtagcgagaagacatccaagtaagacccttctcccttcacaactcaccggcgccggaggcaggacagtctctgttctgatgaccttttcgcagccgggagaaggtaacgagcaccggtacggtttggattgcctttttcctgcaaattataacaaatccaaaaaaaaaacaatttttgcttaatcgatgtctcgatattggttcaaaacatacaagtaattgacagagagagataacagatgtgtgtacttgagggaaagggaatggaggaagacaaagagtgatggagagggtgaacaagtttcattgttaagatcattctttcaatgtttttgtgttagttcacagattcttgttgtctaaaacaaagaaactgactagttcttgtttgccttccttcagagtgtgcccttaattgtgtgtgagacgaagaagagagtaagtgataaaactggaattctcatccacaagttgtagatttcatgattctctcaagtcaccaccaaacttcttgtcgtagaccatataaataaaaaatatttgttttgctaaaacttagaaaagatcagtttttattttccaatatacatgatgatgaatgatccaccaacaccaagtgcgtccataatcgttattaattaatctgcaatacattagggctaatcacggaataatagttttttgtgttgggtttgtaatttatgtgtccggtgaaacctaaatacagacaaaaaaagtgctggttagtgtttggtgagaatcggtaataaaaggtttaaaaaaccaaaccggtcacgtagttttgtttgttgtgtttattaagagccgccaccagcttcttcctctctgtttaactctctctaaacccatgaattccgttcagcttccgacggcgcaatcctctctccgtagccacattcaccgtccatcaaaaccagtggtcggattcactcacttctcctcccgttctcggatcgcagtggcggttctgtcccgagatgaaacatctatgactccaccgcctccaaagcttcctttaccacgtcttaaggtctctccgaattcgttgcaataccctgccggttacctcggtgctgtaccagaacgtacgaacgaggctgagaacggaagcatcgcggaagctatggagtatttgacgaatatactgtccactaaggtttacgacatcgccattgagtcaccactccaattggctaagaagctatctaagagattaggtgttcgtatgtatcttaaaagagaagacttgcaacctgtaagtaatgaagcttctccctttatacattttggttgattttttaggtgaattatgtatggaattgagactacatctgaggttttatgtgttgttgtactgagtggtgactggaattgttttaggtattctcgtttaagcttcgtggagcttacaatatgatggtgaaacttccagcagatcaattggcaaaaggagttatctgctcttcagctggaaaccatgctcaaggagttgctttatctgctagtaaactcggctgcactgctgtgattgttatgcctgttacgactcctgagataaaggtattttccatttttaagctttctcatgtcttgaagttagtatctgatggtgttctgggattgaaaacagtggcaagctgtagagaatttgggtgcaacggttgttcttttcggagattcgtatgatcaagcacaagcacatgctaagatacgagctgaagaagagggtctgacgtttatacctccttttgatcaccctgatgttattgctggacaagggactgttgggatggagatcactcgtcaggctaagggtccattgcatgctatatttgtgccagttggtggtggtggtttaatagctggtattgctgcttatgtgaagagggtttctcccgaggtactctttttgctgtgactgctttggcaatgtcaccttctgttctgttgttgttaataacagctacttgtgacaaaatccagaattttaattaagaaatgagttccttcagcttctgtttcttattgtgacttttgggttatgcaggtgaagatcattggtgtagaaccagctgacgcaaatgcaatggctttgtcgctgcatcacggtgagagggtgatattggaccaggttgggggatttgcagatggtgtagcagttaaagaagttggtgaagagacttttcgtataagcagaaatctaatggatggtgttgttcttgtcactcgtgatgctatttgtgcatcaataaaggtatggtactatccttgatacgttatcccttgtcagacggtgtttggcatatgcatactgaattgtagataatcagatacttgtctctacaggatatgtttgaggagaaacggaacatattggaaccagcaggggctcttgcactcgctggagctgaggcatactgtaaatattatggcctaaaggacgtgaatgtcgtagccataaccagtggcgctaacatgaactttgacaagctaaggattgtgacagaactcgccaatgtcggtaggcaacaggaagctgttcttgctactctcatgccggaaaaacctggaagctttaagcaattttgtgagctggtgtgtgtttggtattatagcatatagtagttaatcacattacagagtgtatgtaagacaaaacattaatgggtgcaggttggaccaatgaacataagcgagttcaaatatagatgtagctcggaaaaggaggctgttgtactatacaggtaaggccattcctgaaaaattccttccttcccgagtagtttattcatcctctaatctgcaaaattttgtaaattgttgtatagtgtcggagttcacacagctggagagctcaaagcactacagaagagaatggaatcttctcaactcaaaactgtcaatctcactaccagtgacttagtgaaagatcacctgcgttacttggtgcgtccttgattgatttctctctgtgcttatttctcctttaggattactagatttccaattcattcccattggttgatgcaaagttgtcatgtgaatcacactttatacatatcagatgggaggaagatctactgttggagacgaggttctatgccgattcacctttcccgagagacctggtgctctaatgaacttcttggactctttcagtccacggtggaacatcacccttttccattaccgtggacaggtttgtttcccatttcaccataaaaatgttttaatggaacttcgagtctcctccttactatacaatcttccttctttcaaaaaagggtgagacgggcgcgaatgtgctggtcgggatccaagtccccgagcaagaaatggaggaatttaaaaaccgagctaaagctcttggatacgactacttcttagtaagtgatgacgactattttaagcttctgatgcactgagtttgaagctgtggtggataatccaaatctcaggaagaagaagaacccatgagagtcttcctcgtgatcatggttgttcttgagattctttagtctgttttctctcgggtctgtgtctgtcggatgagcgttttagccactgtagttcaatgagtaacctctatttgctacgaactctcattcctagatcgtgggttaccttttggtttctccaagcaatttgaggctagcctccaataaaaaatagtatttctagtatttgaaaaaacgctactttcgtggtatagagaaagataaagagagagagagagagagagagagagagagagagagagagagagagagagagagagagagagatgctcttgatattgctcttgatacaactctattattattgctcttaatccataatgaaagtgctttatgaattgtaattatatgatgcttaattatatgatggttaattggtaactgattttcaacgagaaaaagtgtttgtccctgtatctagctttctaactcggtttacaagcctaattttgttctgttgtgtaccaaatcgatcatttttggttgtctcagtttaagattggtctgactctcagtttaaggctggcaaaaaagtcacaatcattacgcggttaaacagttactatatttggttgtttaatcgatgttttaaaccgtttttcaataatgattgatatttgttttattttattgtatgcagatttcagatttgtatgatataaataaaaaagttgtgaaatcaaaaaagcagatactgtttttcatttatttgtgaaaaaatttaagaaaaaaatcttatgaaaagttaggttggatttttattattggcagaaaggtaaaaacagtggccaaaaaaaggcagctccattggttttgccaaaaccagccccttggtttaggcttgatttgtaatcccaaaaaggaaacaaaactttaaaaaccacaaaaccatgggcagttttcagatcatccctttgacggctcccaaaaccactgctctcctctcttctctgtatattactctctttctcttcctttgactccaatcccgaaaccacttcaccaaaaaacatcttcaacacaaactaaacaaaacttaaaagtaagaactcgaagatactgtacttacaaattcctgtcggaattctcttacttcgtcggaaattcgaaatctgggtttgtgggattccgtgttgatttatctaccattgtttccaagtttcaattttttatccaatttagggttcagtgtttgatggaatcgaatgtgatgttctctgggtttagtccaagaatgttgagcttagaaatgccgcaaaatccaccaaatccccaaaattcaattcagttccagcatcctcatccttacaccacctccggcgaccaacaaactcagccgccgataaaatccttatacccatacgcctcaaaacccaaacaaatgtcacccattagcggtggcggttgcgacgacgaggatcgcgggtcgggttccggatccggttgcaaccctgaagacagcgcgggaactgacgggaagaggaaattgtcacaatggcatagaatgaaatggacggatacaatggttaggcttttgatcatggcggttttctacatcggtgacgaagctggtttaaacgatccagtcgacgccaagaaaaagaccggcggtggcggtggcggcggaggaggaggagggatgttgcagaagaaagggaagtggaaatcagtgtcgagagctatggtggagaaaggtttctctgtgtcaccacaacaatgtgaagacaagttcaatgatttgaacaagaggtacaagagagttaacgatattcttggtaaaggaatcgcttgtcgtgtcgttgagaatcaaggattgttagagagtatggatcatttgactccgaagttgaaagatgaagtcaagaagttgcttaattctaagcatcttttctttagagagatgtgtgcttatcataatagttgtggtcatcttggtggtcatgaccaacaaccaccgcaacagaatcctatttcgattccgattccgagtcagcagcagaactgttttcacgcggcggaagcagggaaaatggcgagaattgcggagagggtggaggtggaggaggaagtagagtctgatatggcggaggattcggagtcagagatggaggaatcagaggaagaagagacgaggaagaagcggaggatatcgacggcggtgaagaggttgagggaagaagcggcaagtgtagtggaagatgttgggaagagtgtgtgggagaagaaagagtggataaggagaaagatgttggagattgaggagaagaagattgggtatgagtgggaaggagtggagatggagaagcagagagtgaagtggatgagatataggagcaagaaagagagagagatggagaaggctaagcttgacaatcagagacggaggcttgagacggagaggatgattctcatgttacggcggagtgaaattgagttgaatgagttacagtcttcgggtacacgggttgacccgagttccgctaaggggtgatgctgattagtatttaggattagagattttttacaactttgtagtttctaatgttaggattctcacgttttagtgacattaggcagtaaattaaatcttaaaagtatgtactattgtagacaaaaggtctttaatcagcaaattgattaagcatgtctacttttgtagtttcaattttcgaataaggattctctcacgctgtcaatatttaagtggttaattggtaaaagtgagaagaaattaatcaatcgtacaaaggttaacacacatactaagggaaaaaaaaaatgacacacccggtgggactcgaacccacaatcgtttgattagaagtcaaacgccttatccattaggccacgggtgctctgcttgcactagagtattgagaaaacattaagaaacataattacaatcagtaaaactacccacggcccacgggcgatcctcgtttatttaaagaatatatgtttctctatttaataatttacccttcaaagcatcacaatggagagtttttcttctatttttaaccaactagagttttgtgtacaagtagttattaaagatataattcaagaactgttatgatatttgtaagaagaagagattttctattataaatacttgagtgaaagtttaggtaggttacacaatgtcaataatgtgacaaagattatttgagatgatagaacacaaaaaaatatcataccataccactatattccatttccatctagtgtttgagcagatattctgctttgtacatgtttcttgcacctacaataagattcaaaagtttaattagataccattggaactatagcgatagttgcagttttctctaaagttttcctataacatattttcggacatatggtaggagcatctggaagattatgaggatcaacaaatagcggaaaacaaattactgtatacacattgctttcaaaaaccaaacaatcttcgtcaaatgaattttgtaacttttgctgaatatgataccaagtggagtccaatgacaaacaatctccggtatgaatttagtgtcgtacgtgaagtatatataagttacaaatcatgtctttagaacaaatgatggaaagtgatatatcatatatacagtgagacacgatgcgatcaatcaaacgaccaaattaaaaaaaaaaattagtaacataattatgactcgttgttatatctaaaaatgacaggaaaacattggactaaaccatttttttcagttttaattgttgtaacacctgtttccaacgttttatattgatagtattaattattttcttcgttcacccgttacatcaattgaaaattgaattgttatcatcaaaggttttataattttataaattttaatcttacaaagacaaaatcattatgggaatatatatctgtgaaagaattttgataatatgtattttgttggaaagctgaaaaatatgaggtaacgtaggttattgactgtaacggaagcgaatttaactatgtttcggtttggattaaccaaaaccgaatagaataacgcaatttaactttggttcggtttggtttttgtgaattaacttttttttattccacccttaccacttgcctaacggagccgttgtgacggcccatccacttttgcgctagttcacgccttgacgccttctccttccgtttcttcagcctctcgccgctaattaacgccgtctctggttgctaccaccgccgtaaccctaacggcatttttaatggcgtcgtgtgatgacgatttctctctacttggagacgatcagtcaaaccctaatcaacatcaccaccaccaccaagttcttcatcacacgccctacgctcctagacgattcaacccgaaaccatcgaatcagatccttttaccgcatcaccagaggaacggcgacgaggacgacgagaacgatgtcgttgtagaagcgtcttctgctttccacggtcacggtgttaatcctttcacggcggacgaaaattcgaatccgtatgatgataataacgcagctgtagacgaagacgaagacgaagatctcggtgccaacagatctagaatcggaggtgttcgtgttgagaagaggcagagtcaggaggagctaagtgacggaggaacaacaaatggcggtgagattactccctacggtagcttcaagagaccgaggacttcgtcttcctcagctggtgagtataggaaggatagagaagagtggagtgatgcggcgattgcgtgtttgttagatgcgtattcggataagttcacacagcttaatcgagggaatctccggggaagagattgggaagaggttgcttcatcggtgagtgagaggtgtgaaaagctgagtaagagtgtagaacagtgtaagaacaagattgataatctcaagaagaggtataagcttgaaaggcatagaatgagcagtggtggaacagcagctagtcactggccttggtttaagaagatggaagatattgtgggcaattcattagccttgaaaggcgcgtctgatgaagatagaagcggaagctcaatggggaatactgtgaagccagctagaaggtaatgcagaaacgatcactagcaactcttttgtattttgtgctcttgtgaaagtgaaagtttttggttttgtatttcttgtttcaggtatcctctggtaacatataacccaggagttcagattaataacgtcaaatcaaaggctacatcaaaccctagatggcgaagagtggttctaaaaatcagtggtgcagctcttgcctgcaccggtcctaataacattgatccaaaggtttcctccagaatgtgtaatcttttgttgattcatgcattttctctatccgacctcagcatcaaattctcttttgattatttaggtaatcaatctgattgcaagagaagttgcaatggcttgtcgtcttggtgtagaggtaacacttagttctagattgttagcgttttatcctttttcagttaaatggtattcatagtttggttcttccaggtagcgatagttgttgggagtcggaactttttttgtggcagcacatgggtaactgccactggtttggatagaaccactgcatatcatataaggttggtcaaaatatttcagttgataaaatgtttgaattgtgctttgtataaagcatgatggctgtagtatgataatcgaactggctggtgcaaacactgtatgagaattttatctgctcatgatgagttatatttccatatttgatttatcgtgctctgaagttctcacagatgattttttttttcatcatttcaaatggtctcacatgtcatctttgccaaaacatccatgcacttagcaacaaaatagtattgccttctatgttctgttttgctggagataggttgttcagctcaccgaatttctgttatgtaacagtatgatggcgtctgtgatgaactctgctttacttcaatcgtccctggagaaaataggggtgcaggcacggttacaaactgcaatatcggttcagggtgtcggggagccttacaatcgtcaacgagccacccggcatctagataagggaagagtggtaatatttggtggcatcggtgccacgcttggaaatccacttttatcatctgatgcatctgcagcccttcgagctatagacagtacaactctcttacttcctcttagtgttgttctctttccattagtaactggtcctaagtggtaacctaagatctcttgttatcagtcaatgcggaggcagtggtgaaaggaacaaacgttgatggtgtttatgactgtcattcacaagatagtaacgtgacatttgagcacatatcatttcaagatttggcttctagaggtcttacgtcaatggatacaatggcccttaacttttgtgaagagaacagcattccaggtcgagattcttcttctctctcttatcatgtttagctaatccgttttagattacttagatctggctgtgagataaatggttaaacttagtgacctagacagaattatacaaatggtttactcgagatgggacctctagaatcctgatttccatcagtggataatagatcaatacccttatacttgtcccgcaatgagtgcttagcacctgatgatagaatcgaacgttgaatgtaaatgacctgattccttgtcctctggattaaaaaaaaacagttgtggtatttaactttctggaagctgggaacatcacaaaagctttgtgcggagaacaagtgggtactttgatcgatagaagcggaaggggcgtgagttagtagtatatgtgtgaattcataacactttgtaaacacgttgttttttccgtaagtaattatatttcatagatgagttgacaagaaaaaggagagttgctccattcacaagtgaagacgttgtaatattgaagatgttgacacgtttgagagattttctttctccatcttcgttgactgacttcttctttctgaatgattgtatttacgattttgtttgtaatgctttaatactattagagcaaatgtcaaaatctattgctgagtatcaaaataatccgatcatgatgtgaacaaacatgtaatgtatggggaccgaacagtataaaaatacacaaaggcccaattagagtaacaccctcgaatggataattacttgacagactcaaataaaaaaatgagaagtttccgtaagctacgagaaagacaaggtagtcgctagaaacttcaattcatcagatatttttgtcccctatcttcttatcccctcacgcacctcttacacacactcttatataaagaaaacactctttgctcattctaattaaacgcaaacgtacaagtagtgaagtatcacgactttgatttatttctgtatatctaagatgcaggcggtatcagttgatgaaaccaaaaacacggtggtgctacgggcggagcacaagaatgaagaaggccggaaatctgttgataagttcgaagtgaagacacgtaatccggagacgatcaagagcgttgagcggaagcttatggagaaaggtgttcaacggatggatcgtcatccttccgatgggattcctctcaggcgaccaccatcgaagtcaggtcacggcgggaagtacacgtgggaaggacctgatcggatggaggattacgagatgcagccggatccaccggcgatggatgaaggagatcctaattacgacgaggaacaggtgaagaagagtggtgatgacgtggcggttgagcttgtgaaaggagaggttgaggtggctaaggaggctccggctggtgttgctagggttgaggttgatcctcgcttggtcggtcgttgagagtttgatagaggaggaagaaaaatgttggggcgaatgtgagaaagagggagaaatgtggggttggatttttaatttcgagttaatgttttagtgtaaaatgacttttcactatttctgtaaaaaataataattgatctgctagcattgaaatccaccattcggtggtcttttttcattatccaacataactctttttattacttattgttgtcatgtgctgtgtacttgcatggaagacaattagccagaggacacaatgtgtgagttaaatttcaatttcgagttgtgtatagttaaacagtatttatttgtgtgataataattaaatagagttgtggataatgcccgtaatggaacatggtaacaaaatggcatttaattatttatgatgacaagaagtttggtctgttctattaaatatctttgtaggatatgaacgccaagtgtcgtcttgagttctttatcaaatactaaaaaactctcgtctcgagttctttatccatacttctcaagtcccgagatttagtattgattagacacgacaattaaaggaaaactaaaatctttgagaaattatataaaacaaaagcaaaactgcaggctgtggggttcgaacccacgcgcacttatgtgcagaagaacttaagtcttcccccttaacctctcgggcaaacctgcgctgctgtttaaatattccatttttaagtttatttagtaatcgtatttctgtggtctgtgaaaattgagctactttcggcccaacgaaaaacttgcatatttaaacatataggcccagttacaactaaatcaaaagtatttatttttggatttacttaaatgtagtctttcatcctaacttctcacaaagacatatataaaattcatgcactctccttttatctagttggatcaatctcaagtaatttactgggaagaaataagaaacagctgctctctgttaggccttagtgttataccttaacaaattattaatgggctattagatattattttaggcccaattgaatcaagtactaatgcagatttaaggggggtgtattgacggcgttaaaacggtttctcaacggaatcgtacgtagtcacacgtgattttattgtttaccccggattggtcatgcgttccttcttttccacttgcgcggaccactcaatgacactctcttcttttgtagcagtggcccgacaccagaatgcagcatttaatctctcaaattaccattttgctcctacctcttttaccccttttggtattttgtgtcttttttctttctatttcgtgtgaaaaaggatctcttccttaatcgtattatttcttccgatatctacttttattctgttttctatttttggtaggttacatcttttttataaagaaaatatgagctaacacgacattagtgttgttaaccaaagaattggaaaaaagttataagagagataataagattctcttacagagactcacttcagtgaaaaaggaagaagcaagtggttcccttaagggaaaaaaaagtcacgtacgttcatatacaactttaatacgtactgtgtaactcaatagatcgtgcagtaatattcagtcgtattagtaagaaggaatttatttgctaagtaaactcaagcctcctttttctcttttttttctttttagtaaaaattaggctagtgttttttttgactcagcaacactctgcttaaatttaggagtaatttgacctattcctacgagtttctaagtgaattctgttggggtcaaagaagcaactagttgaattagtggaaaatcgtttcctttctttacgcatagttcacgttggacactcagtctcaatgctttcacgtttcacgtagcaacaacatatattcatcagtttgtgatcgtgccatcgtggataagttgcaattcagtgaaactctgcaccactttgtgcaattatttggccgtctaatctatttgtgagaattttacaatctaattgttctattatttcatttacttgtcatcaatttattatatttgtagccaatgaacgttgtaattaaagaaccaaaataaattaatatcttgaaatttgtaacagtcactagaagctgatttcttattaattgtatcactaaagtattattaaaaacggttacaaattatgataattatatatttaataaatttcgtgtgtcacatttcttttaaactacaattatgaatatctaaaactcattcatgcatatcttaaaatttgaattcaaaactttcttatcttatctttaggttcttaattaacagtcactaaaaatagtcaaagttttgaagtttatgaaaaaagataagagtataattaatggatacgcctcgtaacaaattcttgtaaagtatagataatatacatttgttaaatatgacacgtgtttattttttttttaaatatgatcaaaatatattttaactacctagatggtatgtatgtctccaattttgaataacaagtcaattgttattagaaatgtcataatataaagaagggaattaaatttgcaaagaaaaagtgaaaaacaaaggatttgtattttggagaaaattaaggactggatttgcaaaaacgaaaaagtaacttcatgtatattgtcttccttatagtctctataaactattatctcaaattttgtctggactctgaaactcacaagacttgactctggcttacttggcttcatctttttctctctggtaatctctcctgcaacttcaagctttcattttcaaataaatgtaatcaaatctgttattttcactcaagaactaattgagttctctatccctttcaattgaaattgacattaaaatgaaaagattttgaggaggtttcacctaccacaaccgaatcacttctttctccaaatattgtttctttcagtggccaagaatcacaatcaatttttgtatcttccacaggtaaattaattgtgattgaacagagaagaggacaagtgatcttggttcaaaagaaatggaagtggaaggtgaagtgagagagaaagaagctagggttaaagggagacaaccagagacagaagttctacatggtctgccacaagaacagtcaatatttaataacatgcaacacaaccatcagcctgactcagacaggttttgtgactcaaccgaatttactctgttcttctcccggaatttccatattttctggtgattctgttttgttaaattctgcaaaaggaagaaaataaatcaaacatttttcacttcttcaaaacatgagtaaatgcaaaaactgagatatgtaaacacacagcaattttttgatgaactggttttggctgtgtgatctttgtgtctatgcaattacgttttagttattttctactttataaggagagatgttaactgaaactgttattgatcatacaggaggaggcttagtcttgaaaacttacctggactatacaacatgtcttgtacacaactcttggctctggccaatgccacagtcgccacaggttcatcaattggtgcatcatcatcatcgttaagctctcagcatccaacggattcttggattaatagctggaagatggactctaatccgtggactttgagtaaaatgcaaaaacaacaatgtgagtaaaatttgttcctgaatttgtaggatcttttaagagaaagtaagcgtttatgtgtagattaagtcagactgaaatcgattatctcataataagttctcagtgatctctcaaatcatgaattttatgtttacctgatatcaacttcttgtcttggtgaaccacagatgatgtgtcaactccgcagaagtttctttgtgaccttaatcttacacctgaagagttggtgagcaccagtacgcaacgaacagaacctgagtctcctcaaataactttaaagacaccaggaaaaagtctgtctgaaactgatcatgagcctcacgaccgtatcaagaagtctgttcttggaactggatctcctgcagcagtaaagaaaagaaagatagcaagaaatgatgagaaatctcagctggaaacaccaacactaaagagaaaaaagatcaggccaaaggttgtccgtgaaggcaaaacaaaaaaagcatcatctaaagcagggattaaaaaatcctctattgctgctactgctactaaaacttctgaagagagcaattatgttcggccaaaaagattaacgagaagatctatacgattcgactttgaccttcaagaagaagatgaggaattttgtggaatcgatttcacatcagcaggtcacgtagagggttcttcaggtgaagaaaatctaaccgatacaacactgggaatgtttggtcacgtcccaaagggaagaagagggcaaagaagatccaatggctttaaaaaaaccgacaatgattgcctcagttctatgttgtctcttgtcaataccggaccaggaagtttcatggaatcagaagaagatcgtccgagtgattcacaaatttctctgggaagacagagatccattatggcaaccagaccgcgtaacttccgatcgttaaagaaacttttacaaaggattataccaagcaaacgtgatagaaaaggatgtaagcttcctcgtggacttccgaagcttaccgtcgcatccaagttgcaactaaaagtgtttagaaagaagcggagtcaaagaaaccgtgtagcaagccagttcaatgcaaggatattggacttgcagtggcgacgccaaaatccaacaggtgataaacacacaagcaactttcatctataatatttttcttagatttctatcttttgaattaatactagttttacaaaatgcaggtacatcgctagctgatatatgggaaagaagtttgactattgatgctatcactaagttgtttgaagaattagacatcaacaaagagggtctttgccttccacataatagagaaactgcacttattctatacaaaaagtcgtatgaagagcaaaaggcaatagtgaagtatagcaagaagcagaaaccgaaagtacaattggatcctgaaacgagtcgagtgtggaaactcttaatgtcaagtatcgactgtgacggtgttgatggatcagatgaggaaaaacgtaaatggtgggaagaggagaggaacatgttccatggacgtgcaaactcgttcattgcgcgaatgcgtgttgtccaaggtattatttattgctttagttatgacattgttgtgtggctttataccttagatctttctttctttcttttttgtatccaaagcaacatggtcttaaatcaagcttatcactgcaggcaatagaactttctcaccttggaaagggtcagtagtggattcagtagtgggagttttcctaacccagaatgtcgcagaccattcatcaaggtatatgcattcaagagatttctaataagtagaagatatatgcaacagagtggtttagaaattataacttgttcacttttgcagttctgcatatatggatttagctgctgagtttcctgtcgagtggaacttcaacaagggatcatgtcatgaagagtggggaagttcagtaactcaagaaacaatactgaatttggatccaagaactggagtttcaactccaagaattcgcaatccaactcgcgtcatcatagaggagattgatgatgatgagaacgacattgatgctgtttgtagtcaggaatcctctaaaacaagtgacagttccataacttctgcagaccaatcaaaaacgatgctgctggatccatttaacacagttttgatgaacgagcaagttgattcccaaatggtaaaaggcaaaggtcatataccatacacggatgatcttaatgacttgtcccaggggatttcgatggtctcatctgcttctactcattgtgagttgaacctaaatgaagtaccacctgaagtagagttgtgcagccatcaacaagacccggagagtaccattcagacacaagaccagcaagagagcacaagaacggaggatgtgaagaagaataggaaaaaaccaactacctccaaaccaaagaaaaagtcaaaggaatcagcaaagagcacgcaaaagaaaagcgttgactgggatagtttgagaaaggaagcagaaagtggtggccgaaagagagagagaacagaaagaacaatggacacagttgattgggatgcacttcgatgtacagacgtacacaagatcgctaatataatcatcaaacgagggatgaacaacatgcttgccgaaagaatcaaggtttgactaatcacagtgctatatatacctcatttatacattctaacaaggtgaatttttttgactctggaaattggacaggccttcttaaacagactagttaaaaaacatggaagcattgacttagagtggctaagagatgttcctcctgataaagccaagtaagaaaattatttacaaatcttgagattatatgtagcctctggttaaagaatatatctcagtaaatggaatcgatagtaattgagatacatataaatgagagatacttgatagtgactactaatggttgcagggagtatctactaagcataaacggattaggattgaagagtgtggagtgtgttagacttttgtcactacatcagattgcattccctgtaagtcaatgaaggatactgaatactcagaccctaatgaatgtggaacagatacattaatagttacgtatttttacaaatgcaggttgacacgaatgtcggacgcatagctgtaagactaggatgggttcccttacagccattgcccgacgagctgcaaatgcatcttttagagttgtaagaaaaaaaaattaaagatcattcttcaatcatgaaagggaacatgagaaatttacagtagttccctttaattctattcaggtacccagttctagagtcagttcaaaagtacctctggccacgcctctgcaagcttgaccaaaaaaccttgtaagtaaattacattagcatcaaccattactctagacccttaaacttctctaactaactctaactgtatcatacaattctaggtacgagctgcattaccacatgataacatttggaaaggtacctcaaacaaatttcaagtgtttgtggaatgaaaacatcttaaagtggcttttcctattttgcaggtcttttgcacaaaagtaaaacccaattgcaatgcatgtccaatgaaggcggagtgtcgacattactctagtgcacgtgcaaggttaaaccccacaaaattctttgttattgccattaacatgaaaaaaaaaacactagcttaaagagaaagagatctgctcaaaatagtcattttaatggttgtatgttctaaatgcttgtgttatatcgcagcgcacggcttgctttaccagaaccagaggagagtgacagaacaagtgtaatgatccatgagaggagatctaaacgcaagcctgttgtggttaattttcgaccatccttatttctttatcaagaaaaagagcaagaagcacaaagatcccaaaactgtgaaccaatcattgaggaaccagcatcaccagaaccagagtatatagaacatgatattgaagactatcctcgggacaaaaacaacgttggaacatcagaggatccttgggaaaataaggacgtaattcctaccatcatcctcaacaaggaagctggtacatcacatgatttggtggtcaacaaggaagctggtacgtcacatgatttggtggtactaagcacatatgcagcagcaatacctagacgtaaactcaagatcaaggaaaagctacgcacagagcaccacgtgtgagttgccactttcaattttttcttctattataccctaaaccgtaaaatttgagactttcctcagcatttatctcatactaattctcttttacagatttgagctccctgatcaccattccattctagaaggggttagtaactcttgcaaaatgatttagcaagaatttttctacttattcccgccttaaaaactgtttgattatctttttttacagtttgagaggcgagaagctgaggatatagtcccttacttgttagccatttggacgccaggtaagaagaaataggcacacaataaaatctgattatgatttttcttttcaagaataccgctatatttttacgagttttcatccttagatgtatatgactaatgtctaacaagtgattgtaatatttttccataccaggtgaaaccgtgaattccattcaaccgccaaaacaaagatgtgctttatttgaaagcaataatacattatgcaacgaaaacaaatgttttcaatgcaacaagacacgggaagaggaatcacagactgtacgaggaactatattggtaagattctggtggacaattttcaagagaatatctctaagtagaaatataaggaaggtataaaaatgactaatttgtttgttaacagataccttgcagaacagcaatgagaggtggattccctttgaatggcacatacttccaaactaatgaggtaattttcccaaaaatgaatttaacttaaacaaatgatcaaaagcaacattctcgtcaaagctcgatttggactatacttgtgcaggtttttgctgaccatgactctagcataaaccctatcgacgtcccaacagaactgatatgggatctaaaaagaagagtcgcatacttaggatcctctgtatcctcgatttgtaaaggtaaattttcaaaacaaaactgtcgatttatgcatgtgtttggatatataaatccaaggtcttgtctcaatatgtttttctcatttttttaggtttatcagtggaagccataaaatacaatttccaggaaggtatgctaatatgtcttacactgaaaacacctttagtatcaaacattgaattcatgaaaagaacaaacaatagtatcaaaatcagtcacgatgtttttgctttggcgatgtaagatgttgataggaaagtatagaagatatagcttaagttggttaatactgtttttatagagctttgaggtggggtttgactagcattgtaatatatatgcaggatatgtctgtgtaaggggattcgacagggagaatcgtaagccaaagagtctagtgaaaagactgcattgttctcacgtagcaatcagaactaaagagaagacagaggaatgaaaccttccagattgcattaacatgttagacatatttgattcattggtttagggtttacatcaccaaggtcatagaggatcttagcttttcattaacttttaaattcatgcaactctttttaggtgtttctttttgttccttgccatagttttgggcaatggatggatgttctttgcaaactcaggttttttgtagtcattaacagaaatttgcagcactaattcatctttcctattatctatcaaagctctcagtgtttctccataacttgatgagatttagtcactctcaagctaattcagtctggtcctaatttcaatcagatttggtaaaggaacaactgcaattgctaagtacaaatcgatccagatttcaaacaagttccaggtttaatccaaatcatcacattcaatcaaagaccaaactagaattcaaaacatataatctctgattcagattcaagaaagacaaagcatgagacatcattctgcaagttaaccaattccggttattctcgaatcctactgaattaagcatcaatcatctaaaggaacttcataagaaaatagatttcagattgagattgagcaaaacatatgataccttcttttcgaaatccatgcacacaaaagtgattgagcggtgaaaacgttctggagacttggggaaccgagattttgccgcctcagcttttaaatccttgttttgtttttgcttgaattatatattgtttcatgatgggctgtgaattcacatcccatttataaacatgaagggctaaatcacaaagcccatagctcttaaaaaagagtcacgtgttcataaatggatggatggtaaaaatgtctattggcctcctttatcttctttgaatcacgactatttggatactttaaaacaatggtatcagattgcttttcacatgttaatcattgatcccgtctcacttttcttctaggtatttttttctttgttaaagggcttttataatcttgtagatatataagaacatgagtcatacaacaattagggtccaatattgaacatgatacatgtaacatttagcatccgctctagttttctctttgatttgggaaaaatcatgggaactcccgattaccgagcgtttcactgccgttgaagcggcaagaaatcaaaatagagaaagaaaaacatacttacaggtcaatatataggtcatatatgtagatttcattatttatgaatggaaatattgagtggatgatatgtcaagtcataggtggacagagtaggggacaatctcactacttcatcgtaaaatcataccagtttctctatttatcattattttaaaattattgtctcttcccatctctcagtttctgtccctcaatttgcaaacccttgatcaactaataactatatatctatatatacatttttgcagccactttgtgaaataaatcttcatgttgagatttatttatagtggttgtcactggcatttaataattgtttttgataattagaaaataaatcttcgaattaaatgtttgcatttaactaccttcccaaaatctctctgcattaactatacgattagttactaaaataaaacttccaaaatatttaatatcatttaaatactacaaaattatcatttttgatattgcttttttttttatgactataacaattcgattataagcagcaaaccgtagagatatttgatagcaattaattactacaaaattataaaatatttagacaatgattcataaacatatcataaataagatcaacattaatcaaataaataagtttttttacgggacgggttggcgggacgggtttggcaggacgttatttaataacaattgtaaactataaaatgaaaatattttatagatagataaaatttgtaaatttttatatatactaactttaagaaaataaattgtccccgcgatatagcgcaggttaaaatctagtttaattattatttattatgataacagcatgaatgtataatactattaatgggtcaatctgctttgaaatttgaccaatcactggcatttatataagtcataacgaaaaatcatcaaaaaaaaaaaaaaaaattggtatcttcatttttttcttggaaattaacatgtattaactttcttatcaggactagcggttgatactttcatagtatgtacgtaaagtgtagcagaagaaataaataaatggtcgctctcaaaatattttgtgtattaaaaattcagatcatcatatatagatagatgcatctctccttaatcggtttgaattttctatatcaaattttgtttcgtatatccacaaatgtagagctttcagctcataatttctacagatccaatattcatgttaatttagcataaacgtgataacttgaaagttttcaaattatgtgtgtggtgttagctagtaatactggactggcccatgcaagtgaaataaatttgtgacgacaaaatcagaatgtagcagtataatagatagataatgcatgggaatgggaagtgtattgactcgtctctctaagaactaggaattaaaggcaaatagttactctctttctctcctctggtctcaaaatttactcttcttcaaaaaggaacaatatggacggagcaagctttgggaatatcccaaataacatatttacccttcttcacatgggtttcttgtatgtgagtattttcgtatatgttaattgtctctcgaatcttaaataaaagggatttcgaaagctaattaaaatacatctaactttatatgaaaaaatatgatgtaccggaagagttgcagcagtttttaaggataatttaacaaaacgacaacacgtgagtccttttctacgttcacacacgcataaactacatatgcggcaggagtacgtaaggtaagatataattaaagaaggtctaattaaacaatacaaattctagtttacaaaccaattaaacatatatattaatcttattctcaattgttaataattcctcctaatcgttaaccacgcacgacatcgtttctaagttctcttattcttcattttgagaatgaaaaatgtagcttactgatgattattttctttcctttgcttcaaaccataaccctcccacaagttctgatctccttctccttcaagcaatggaaagcactttgtactagctgccatggcattgctgcagctcggagttcctgcgttcttggagtttgaaggtgagtaaccttcatgatggcattggtcatcatctcgacaaaaatcattaatcttagtttcttgattgttgtatatcatcatattctctttggttcttggatgattccctccgtggcttgaccatttctccttccttttcttattcatttgttttttatccatcttgcccttatttccttcatcagcaaattcattatcagccatcattttatcgcttccattcccattaatcctctctgtaggagacgaagaatccggccttatcaatgcccttcccgtcaagtactgcaaggcattaatcaccgcaacatcccgagcttcaatcctctccctctcttttgtccaaaacgaacgttccttatcgatcctttccgcttcaatccttctccattcctcttctctcagcatcctttgatgttctttgtcttccacaatcttcatcaacttctcaagccaaaaatcttgcttctctatcaacctctccatatgaacaccaatgaattccttgatcttttccttccaatgcatcccctctcttttagtagtttcgtttccttcagaggaagaagttagatccaaatcggaggaggagttgaaattgttagaaatgctaaggctttgactttgagtattggtattggtcatcaagggattctgatgatgagggacgatgttatgaatgttagaagcgcggaaattactatgaagagcattggtcattatgaactgcgtgttgttatagcaagaaaccgagtctttggattcgccgtatatcgcttcaagctgccggaaaaatctatagtttttaccatcttgtcgccgaccggatttgccttcttttgtttttttatagtacttgtagagattctcgaacttctctctacacttcttgccactcctagtgtatccatgttcctccgacataatcctaaacatatgaggtatataccaacaaaggaatgaaaaatgcatcactttcatgatttcatcattaattcataatttgcataataatgcaccacaatattgaatttatgaataaagcagagattatcaacgacaaaaagtcaaactaagtcaaagaatagatgtttcttatttgatggttatatatactctttttgttctttaaaaacacatgaagaaatcttaacagaaactcctaatgtctggtcattcactctctcgaccaaaacaaaactagtaccacagatctgcctatactttaaagtaattttgtttttaactaacttgaatttaagaaaaccaaggggttgatgatgtcatattctccttattaataaaaaaaaaaaatattttaacgtgaaaggtctaatctataacaaaacaattatgattccaaatcaaaaataaaacccataatcgattgtcttttttctcttccaagttctgatttttatcttaacttttcctctccggaataagggcaaaaaagacaaggaaaggggattttgggaaaataaagctggaaaaaattagggttaaaaaatgagacctagaaacttcatcccagagaggacccttttgattagcttctttgaacttgtgatcaagacgagatctgacctccaacaacatcaacgtctcttgcctcggccacctccctgttcctccgccgtccgtaaagccactaaacccaccaacacagccaccactctggatcgttgtaatagtgttactgttgtttccagccaccgtaagcccttgtattccacgtggcaataaacttatctcatggtcggtgaaatgaagacgatggtgctggtccggcgctgaaacgaggttgaagccgaagagatcagaggagaattgagaagatggttgttctataccgtactgtggatggttttgatgatcctccatttggtttgattcggtagaagagaagagttcaagtcagagagtgtgaggccaaaatattgaaaaaccaaagcaaatgttcgagcgtttttgatttccaacgatagaaggtttatactttatactactagaaaaatagaaataaatactaaataatttaattaacaaaaccaaaacaatagaaaaggttgaatagagggatcgagtgagagagcgatagaggcggatcgtgtcgtcaatgtaaaaggaaagttgaatttaagctacagtgacgatggtcccatgcatgactgtattatataaactcttaaatcttctggggtatgtgtagataacatattttcttgaactatatatattcacagtaaaaaacaaaaaagggctgtactgatgaatatttactttgactatgttttcttagttgagtttgagattacctcagaacatatatttgcaaactggttttaatgatgcagtagtaaaacgcaccatacaatatatgacaaaatgttatcaatgtttacatttgactataaagtgatttttaaaaaaaatagttgtaatatatgttttttttaatctcaaaatttggcaatttgtttatttatttttcttacaatttacgccaatactacttccacatttaccttatagtttataagactggtaattaatgtatatggaaaatgttatggacatcaaaagtttgatgacgtacttgattatccatagtgaccaaaacactttcaccgcgtctatttgatcatctttaaacgtgaaggttaccatattaagaaaataataagtttacttgtttctctttctgtatatgtctgttttgattcgcaaatcacatcctactacacataattataataatgttacgtttagaagtagcggtgtgatagagggaaggagtacatgacaaagaagacgaggagaatccaaaagctcaagactccaaaatttagagaccatacaaacaagacgctcgatgaacggaaatgcttggtcaagactcaagatgctgcgtaagcattcacaaaacaaacattgtttcatatttgacgttcaagaaccacaacgcgcgttttgtgatttttaattctctctaattaggcaaccaacatcgtcattttgtttgacgcgcctttaggatgaaaatatgtgtatttgtttttgcagtttaggttgtagcttctaaaagtagaagattctctaagtttcttgttataaagaaaaataaattcttaattaagatttctttaatatatataactcggataatttggaccgaagcccaactaatatcgaggtgtacaaacttattgggtacaagcgcaccctggaaacactcagagggaagcccaaagctaattagcatatatataggacatgttttgtagtggaccaatcatgattagcataaggattttttacctaattaagttgaatggataacattttagctgaagcgccgagctaattagccaatacacacatttcatagtaaccaagtaggattacatttttagccgataagcgtgttttgtagccgaaccgattaggataggtttactctggattctttgcctaattttgatgcatatcttgagattttctttatatggtttcccatttagtagcttcaagcaagcttatgtctagcacactctaatacactagtacctttaactttgctttgtgtttgctccctttcgacagtcttgagagatggatactagcattctagctgtgacgaccaatcctaaggtttacatatatccatcttttgattttcactacgaaatacaattctatcttgaaattgtctcaaaacctttggttaattattctccaggggaaaaactatgctcttgctgtttgttggcttcttggcgttggatgccttttagcatggaacagtatgctcacaattgtggattattacgcttatttgttccccgtaaggccaaaacgtttttgcttttatgaaaatacatatgttgcctttctgcctataatcaacttgtcacttacctcgtcttgattgtttgtttttaacttcctagtggtatcatccatcgagaatccttaccataatttatcagtcattttctattggagcacttagtgttcttgttcacaaagaggcaagactcaataccagacgtcgaaatttgtttggatatagtcttttttcccttggttctcttgctgtcctagtggtgagttacatactctttcaatgtctttattttttttcttggatttttcactacaatcataagcttattggtttacaattttgacattatgatattcttgctgatactagtttatctaaaaaattgctatgaggcagttaaatttagctacttcggggagaggagggattggctctttcattggagtatgtgtcattagtgcggcgtttggtctagcggatgcacatgtttatggtggaatgatcggagatctttctatgatgacacccgagtttcttcaggtaacaacagtcccaattgttaatcaatttgtagaaaaaaaacacaaaatcaatttttagtattttagacaaaatttattttgtttatggtaaacgtaatttctttttgttttggagttatacatttgcactttacaaatatatttatgaaaacattttatttgtttaatatgtgattttattggctcaaaatgctagtattataacttttgttaatcttttggccatcaatattagtcgtttctagctggcttagctgcttcaggagcattaacctctggactgaggctggtcataaaagcagcattcaaaaactcaagggatggccttcgcaaaggagctagtacgtttttatacctatattcttttaaaatacaagttcattatttcaattttgacctttaaaatcatctagttataacatttttttgccaatatttaatttgcagctttattctttgccatgtctgcgtcgttcgagttggtttgcgttctgttatatgcatatgtatttcccaggataccggtcgtgaagtactatcgcgcaaaggctatcattcaaggatcgcgaactgtatgggccgaccttgcagctggaggcatccaagtgcaaccaataacccaggtacatcattgtcaaattatgggtggatgaaaaaccttaatcgaaagaaccaaaatgtttaaaccaacaccagaatttatttataagtttattagtttaactacaatagtaattaaatcatcattttatttatattttaattagttgtctttttaaactgaaactaaatcgaaccaaaccaaacaaaatcaaaaaaaatatttggttctctttttttttttgtcaaataactttatttagtttcagtttctaagtttatatggttattcaaaatttcaaaccaaaaaatgaaaagaaacttaatcgtaaaccggattgtctcatccctacatttagtagaactaaactggattttcttacgtatgatggttaaaacacctatatttgaatgcaggacgaggaagccttaagatatgatcatcggctaaacaaaggagacttgatgttactgtactcagatcttgcggttaccttgttcttagtgtatctactgacgtttagcattttccctggatttctatcggaggatacgggaaaatacagtttaggcgactggtaagaccaaaatgctaatttactcatgactatttttggaaaattgatagctaagaaaaaacggtttaaaacaggtatgcactagtgttgatagcagtgttcaacgtgtcggatttggttgggagatacgttcccatggtcaagaagttgaagatgaagtcgaggaaatgtctcttgataacgtcattgggacgtctcttgttgattccagctttcaacatcacaggcatatatggaagccaaggctggatgattttcttgatgtccgttttgggattaagcaatggatatttgactgtttgtgtcataacatcagccccatatgatttattggtatttcaaattctccctttatttatttattttaactttttcgtgaagacgatattagtttagaaatgatgaaaactggttttaggcaccggagcaaaatgcactaggaaacttgttggtgttatatatttgtggagggatgtttgcaggagtcgcttgtgattggctttggttagttggtaaagattggtaagtagtgttgcctattgtttgaccagataaatgtaacttctaaagatctcgaaagataagtagagaccaaaatatgcacctttcattttaatcatgtaagacatttgtctctttcaataaagtccatcttgacattatcttttgataagtcatctttttagtacaactccgtcttatatcaacgtttttaaatttcacatatttcatgagctaacatatgtctattccgcattccataagagagaagcaaaagtgtttttcttaatagaaacagctagtagtattaaaaaaaaattatttttcaacttgtagtattaatactacaaaaaatattattaagacaaattgtagtattaatactatatagtctactatattattcttagaaaaaatgtggtggacgatgatgataaagagtgagtgatgttgcatacctcatcaaagcaacatgagtctttaatttaagcatgcgattttaaaatatataatcaaattttgtttacaagtctcaaaaaaattaaaaaaacaaataataataatatataataccataaaacatgggatacatatttggagtggatttggaattttatgccacatgaataatcattatatcaggagatgctaatcaaatgaaaataaaggctgcacaaaacaataaaggaattttttttgtttcttttacgatgatatctatgtctcccattgcaatagccacatcatcattgattatttgatcattaatgtcttattattgcaccctccatcaaataatgaacaaaacgtctggtttataattatagtatggtttatataattttctcattaatcatatgatttatatttgatattaatatcagataaatggttacatgtcaaaatgttgaggacatatttaatgataaacaaataaaggtttgccttctggatattatttttatgaatttccttcctcatgaaacaatcatttttctctaacggtcattttggaataaaaccaaattcggaaaaggtcgacatatagatcacatctgatctcgtgatgccatcttttttaacttaacctaccgatcgatcgcacaagttacacaatgttctattaatctttatagctttcccagcgcacatgatataaacaaatttccacttttcttaatacctaacattttgtacattatgctacaaatgtcagaacaatagttttaaagagagataagtaaaaaatcaattgaaaggacaataaagagagaaagatagttcagagaaaagaagaagaagcgtttagttacaaacctgtcttgatgagtattttttgaagttacttcctaaaaaaaccacattacacttataaattctccaagaacccctaacaaagataataattgtagtagtaatataacacacgacgattataaaatataaattacattcaccaccaccaaacctaaacgtagagttaaaacactcagagaatgatctctggcccaagaagttcttgtactgtcttggattcaaagtcagtgtatagaatctatgttcttgcttagctcttccagcttcttcattctcatcttttcgctttctcccaccaactgcgaatcattcgaatcggaaaccgttaagtcaagaacgcaattcaagttaagaacacataacaaaatgaatatattcgacacagatcagagtggactggtttgatgaatatgttcagtttacagacaaattatgttagaaaatggcaagaacgatcgatgtaactcatacaaaaagaagacacttagatagagtttgaaggaactgattccgctaactatggagatgactcacacatagctttaagcaaacacacagaccggtccaagaactcaacatcaaaatctactaaacactgaatccgcaagatcacaaatatgcctaaaactatcggtgtttgatgcatgtctctcagaacagagctacaagacaataattagcttaatgtgtttatccacacaagcaagggtaatgtgaaaaaataaaggacaacacaaccaaaaatcagagagaagcagtacaataactagaccagttaactcaatcattcaaactcaacgaaaagagacttgagcatttgttgactaacctccattagcctggtgattagctgcaccttctccctgttcttttcgttgaatgcttcaagagcttctttgtactctcgttcctgcaagttgcgtaaataaaccagcttagcatctgaatcctcaacaaaacatattttaaacacaggtcaatggatttgattatgttttagccttacctttttctgaactgtatggcccaatggctttaattctttgttgacagaatcaatcttcttcctaaccatagcaacttctttcctcatgggatcagctaatccttcaagttcctgaaatgcagtttaaccactgagcttcttagtcatcaacataacatcacccaggaaaagcaaattgttcttttcatagaaaggaaagagctttgatccacagagctaatctctatcaagtagtgctataaatgtagaaactttcactgttctgcccataaattgaggggaaaaagtactaaaaccagagactaagaccagattcataaactttaacatcacccagaagaagcaaatggttcttttcacaaaaaacttaatccaaatagcttatttttagcaaatccaggtttacttgctattgatcatttaaaatcctaaaacaaacacaaaagccccaaaattttctccccaaatggcataaaccacacaaaaaccaaaggaaaattataaaagaatttgttcaatgcaattgtcagatcttgaaatttccaacagttgggtcctacaatttccccttaaacatgaattaaatccacattctatacaatataaaaaccccaaatgttcaatttcacatcccaatccaaaaaatttccataacaaaaaccaaaattgaagcacaattctccaaaaaaaaaacaatcttttttttatatatgaaataaccaatatagatacatacctcacggatcaaagcaagacgcttagtctcttcttcgacacgaccaagctgagcttgaaccctttccctaatctccatcttcttcttctcgatctcttcttctttcgctctaaacgcagataacgcagttctagacatctcctcatcttccttcgacatttggctgctgaaactcatacttcccgacaactgagctcccaattgtcggctatgcaccgccggagccaccgtcgtcggctgcgacgtctctattgcctgcatctccttcatcttcactgaaatctcctctctttgactctctcgttactgatctctctctctctctctctctctctctctgggtctagattcttctgtggtagagaaaatagctaactgagctttctttttgaaacccagaaatagtgctctgatatgaacatttatataaagataattacacattttccagaaacaaaaatatattaaatgctattttattcgtataacgggaactttttaataataattaaaatatattgaaacgtatattaaaaagagataacaggcaaaaaaaaaaaggttattaggtgaaattacctaactgccaccaacaaccgataaaaagatacagtgagggttttaaagaaaaaatcaaaaataaaaagtaggaataaagggaagagaatctgattattgtaaccgttggatctttttattatctgatgaaggaagcaaaacgggtgacccgtagaatccggtgacagctcgttaacaactcagctgtcccgtctaaaccgtcaattccgaaccaaacttaaccggtaatttaattctggttttccattggtccattaacatttaccaatcgtcgtgatttttttttctctctctttaatgacttgaattaggtattccattgctgagcatacacactattgagttatttttcatttattagaaccacattacataattgttgacaaagaaagaaactatggtccacggttatataacttatattgaagaaaattgagaaaatgagaataataaaatgatcttctaataataaatatactatgagaatatatatcccaatattctttactagtataaattttaaagtattatactaattgtgatccaacagaaaaataataataagagaggtaaatcttataggtttttcgacgtgtatccgataaaagtggtcaaacttaatttactttggtaaatttagaggtactcaagtaagcgttttgctaatgaatttgttattctctttcgataaaagaaagttatcaatagaaaaaagagagaggagaaacgtaaaaacgaaggtaaagagcagtagcccactcagccaacggcttcaactacgggccttcgaagcaagaatatttcttttttttcttcactttttttttttccttttctctcttaatggaatttacttttatttcaatgtagtatactataaattattcctctaagctagccatcatatcaactcgatgtataactagtcacattgttttaatggtggggtataaatcttgtcctcattagccattttgaaattttgtttgtcccacaaattagtatatacaaaactatacttacttagtagatcttttttcaattaatggatgagctttggcaagctaaggttttgttgttttaattagctagggttagaaagatagattacctactaatcgacataaaaccaatatattgttttacaagtctctaatgtcttgtatgtagtctaataatcaaaaacagatttcaagtgtgagttagtattatacggtttggttgattgagctcgacctgaattttttttatttgtgatcaaactgagctaaggtccgttaacttccttaaggaataaacttgttcgaagcaaagccaaatcgtagagattagaatgtacggtggggattgagccgatcaaagacatagaaagagggtgatccttccttactcgacgtgtgcttctctgccacaaaggacccactaaaccggtgtttgtgttatcgcgtgcaccagattatcatttggagcccatactttttctttaattattcttttatggatcccaacttgtccttgttttctaagtaaattatattaaaattatgtaacattctgaatatctacaacggaataagtgtaactgatgatgtgtttatctaacaacttaaaccagattttttgtaagttaaatgatcgcaaaatggttagtttttaatgttcaaataagaaacaaaacttaaatcgaatagtgtgttgaaagcgtttgccaccaatcgaatacgtcttccatgcttcaccgtttaaactttactttctattaagaaattttgcacaaaattttattgattctcttaataatataactcttaattgtgatgattatgaacgtgattgaggaagaggatatcgactttatacctaattgccagcatcagcacttacttaggatttaatggtctcatgaaaaatgatttgctgtctctcatcaaacctcatattttccattaaatcaatgatatgtcgtatgtatgtctccctctccaatgtccatgccagataattttattacgaatatattatagttaatggtaattattacggaatctttgtactttatgacgcaaaaaatttcagaaataaaaagttgaaaacgtttcccattgttctgcgatcattcgaaccttaaatgtatacactccctattaaacaagagtctgcccaagcaatattattatttttgactaaaaggacccatcaatttattaccataacatttatgtacttagaatattgtaaggaatcaaatgtatatacatacagcgacaacaatggtttcgtaggggccagaatctttggggatgtcagttggattagcgtaactgccaaaatgcaaagatacttcccattctttcaatctttcttcttcgtccatatgagacatatcatttctttgtttatgtttcttcgttaattacgatgatggtaattaatcatagagatgatcagatgaatatttccaatatataatactatgtttaaaaataacctttatatgttggtcaacaactctatatcatggatctactatactgcgcatattttttggtgccgaaaaataatgatttaactctttggattaacttccgggaactggtgcacttagccacttaccatttttttttttgtcgaagttgagtatttctaggattggaatttcgactgttgacattaaactatttatcatatacattgagttactacataaacctttttaccgaaaattaaaatccactcctaagaatcaatgtacacttgattacttgaatgacccaaatgaacgaaactttctattaatgtcaaaaagatgatctgttttgacataaacaaataattgccagagaaagaagtgatctagtctagattgctgtctggaaattctttggtgttgtattgtaccaacagaactctgtacataatattgtcgaaactcgtaattatggaaatctcgtgtcgaattattttgtcacatatttaatatataatgtacacacattccttcagctgaactactagattctgcgtcaacaaccatattttaactgaaataaataacataatccagcaaaattgtccaactttcacgttacatacatttaaccaaaacaatttcaatatttattttttataaaaatcatagaaaatgatgttcttaattttgtcaagttggatgtcgcaattttttcgggttacatcagaataccattgtcctagaaaaagttactagtttagtcgaaaaaaacttgatggtttatcaacaaatcgagtcgaattttggttatccgcttacttaggcttgggaatttgttcatatacaaaatccgattcacgtgaaccaaccgaagtaaacagctgtcattgttttatactaaaaattaagtaagcatgtgtttgcacattctgacaactccttttcttatctgtccttttttgcctttttattgggcccattttttgttttttctaatagtattgcggaaaaataatttcgattaaaaatggattatagcatgttttgtttgggcttttttgaacaacccaaaagatttcgagctacattacaccactagaccgcttccaaaatctgggcttactctttcagaggcccatttattttctttgtaagaaaagtaaattcaatttagtgctaaaccttactacatttattttgaaatcaaaattgactttggtacaatagtagatgagaaaaacttaactagacaaattatcggtgtcacggataatcttcttggaaggaagaacaattgctgccactggtttatccgggaatccaccgccttcatcgatgatcaatctcataccatcgatgtgaagttttccatggtgcccgctaacaacaacagtatgtttatcatccagctcctgaagaatgtttcagagaaagagatttcaaaaactaaggaagatcttaacacaaagtttgattctttcgatgccttacctgtgggatgtcccaaacgtttttcctaccacttagatgttgtatttttgagatgctagtgtctttagctctcaaaagcttcagttgttcttctacgttattccctttctctaaaccagcatgtacggcgatcaacttacaatgcttaagcccttcctctgtttctatacaaacatcgtcctgcaacagaataaccaagtggacttatgatagctcctttgttggaattagcatggatgttaccatctaaggggttgcaagagattaatccgtaagtctaaagttcgagttttgtaaccactaaactactattcctacaaacatcacagggtagcacggtaggagaaaagagcccgtacctcttcatgaacccataccatattggtcaagaacttcttgtgactctcaggtactgccttcatcaaatctatcaacggaatagataacaaacaagtattaaaatgtcatcatttcatcagcacaaagatgagactcatgagaacatgtaaactccaaatcgagaaagattcaaactttagccaaccacgtagctctatattgaaatgtgaacagatccaatcgttgcatgaccaccaaattcacaagaatgacttgtacgagagaatagaagtgtgtacagattcaatcgcagcttaaataaccaaatttcacaaacaacttcaaccagcttacaagtttccaccaaatgtaataacaaattaaaacctatgaagaacccaaaacacaatgattgagaaatttaccagaagatccatgtggaacgccataagattcaaaagtcgatccagcatcgtaaatcgatcctttataagccatccctttcacagaattgaacgtagccttaattttaccagcccatcttctaccttgaagatgcatatcttcgaacccttcacctgtataccatccttctgtctcctcactttttgagtactccttccacgtatccttcaaatcagatccatctgaaggacgaggcaacaaacctaagaacccagagaaggcaaagtcatggttcccggcgagaaagacatgagtttgatcgggatgtttctccggcagagagattaagaaatcgatgacttttcgagtctccggtccacgatcgcagtaatcgccaaggaatatgacgagagctgagctgaaatctgatgggtcgatggcagattggagattaagccagaggttattgagctttgatatgtatccatggatgtctccgacgcagatcaccgttcgtggtttttgcgccattagtctctctctgtttcttgaaatgatgataatgtacttgtgggcttcatgggcctttggctatatatattatttcgaaataataacatgtttttttggtcgtctagtttttcttagcttcttcttatctcctttctaagttggtggttcataagctaacaacatgcaaaagaatttacaagtttcaaaattttttttcataacagtgttaagtagttataccattttctaattttggaaaaaaattatcaagttatacaagtagcggaaaagaccgaaacactaattaaaaagtaacaacagaacaatcacaaaaactactagaagtttcaattttaatatgaagacatgatatacttaattggaaaaattatcggtgtcgcggataatcttcttagaaggaagaacaattgcagccaaaggtgtatcggtatatccaccaccttcatcgatgatcaatctcaagccatcgatgtgaagtttcccatggtggccgctaacaacaatagtctttttatcatccagttcctacagagtatgttccagagcaaacaaagtcatacaaagagatttcaaaagagagcaagatcttaatacaaagtttggttctttcaatgttttttttacctgtgggatcccccaaacggttttccgaccagttagaggttgtattcttgggatgcttgtgtctttatctctcaatagtttaagctgttcttctacgttattctttgtctctagaccagcatgtacggcaatcaacttacaatgcgtaaggccttcctctgtttctatacaaacatcatcctacaatagtatcaacaatatgataactattactacatgtacattttcctacaaatttagcttatgctttcttagacaaaaagtatttgctttataacaactcaacatttgttcctaagaaacgtcacatggtaggagaaaagcccttacctctttatgtacccaaaccatattggtcaagaatttcttgtgactctcaggtactgcctttatcaaatctatcaaggaaaagaaaacaaacaagtttcaaaaccaataccaatagattcaaaacagttataaaatttcataatttcactagtacagagatgagaacatgaaaactccaaatcgagaaagattcaattatatttttggttaaccaaagatccaatcattacttatttgactgatcaccaattacatgatcgatcacttgacctatatttacagtttccgacaaagacaaacgtctaatcataaactataaccagaaagaagaatcaatggagaatgtcaccagaagatccatgaggaacgccataagattcaaaagtagacgccgcatcgtatattgatccattatacaacactccatatgcggaataatcgaactgaaccctaatctttcccgcccatctcctgctttggagatgcatattctcaaacccttcacctttataccatccttctctctcctcactttttgagtactctttccacgtttccttaaactcagacccatctgaagggcgaggtaacaaacccaagaagccagcaaaagcaaagtcgtggtttccggcaagaaagacatgggtctgatcgggatgtttctccggcaaagagatcaagaagtcgatgacttttcgagtctccggtccacgatcgcagtagtcgccgaggaagatgacgagagctgagctgaaatctgagttttggatatcggattgaagattaagccagagtttattgagctttgatatgtttccatggatgtctccgacgcagatcacagttcgtggtttttgggtcatcattagtcttgtttcttgcaatgcaatcaataattctaagcattatttgattcgatgatgtttgatagttttgtcaacaaaagtcaactgtttcaatggttatgattacataaggtacttcatcgcaaccgtcgaaatcttcgcgtgtaaacatttcagatcgtacggtcaaattcctatgtactcaatgacttttcttcattatttcataagaaaaaaaagactaattattattcacattactattacagcatcatacaattcttcaattctctcaatcgctcttcttgattctctcgtgtaattattattctgtaattgctctttttgacataaacatgttttggatattgttgtgttgtgtggagtataaaacggattaattttcttatagcggaaaaaactgggatgatgatattagctggctttttaactgtaataagatatcaattaatttgtactttcgtagtgcatgtggtaattaacataaagttttaggaggaatcaattaatccatggcaacatgtggtaattaaaccaactccattttaaaaattcttataaactacaatttatataagtcaatttcctgacaccggaagtatttttaaatattttatctcaaatttttattacttatttcgatggtggttcaaagaatatatacttgcccagagcatagcatgtggaaaacattggactgacttttgaggcataacttttttttttaaaacgccaacagaaatttttcttcatgatatattgatatgcttactagtttcttcacgtccctaattcattaattctcttacgttttctggtttgtgtaaataatatacattctttttctttgggcaaaaatataatattcattcttaaacggaaagtaacatggtataattgaatgagacggtgacgtatatacagccagactgcagtaataatattcgtgaatcgtgattataaattcataattacgtacatctccttcttaattaacttactcacgcaattccattcatggctaaaataatgtgctcttcaccaaacgttactaacttaccaattttatacacacatcatcttttcttttgataaaagctcttcccctttgtggtattgttcttaattacgataaatatcttcaatgattaaaacccaattcattccccttgttgcttctttaatcgaactcatgaggtggcttatataaatggtataattaatgtggattaaaattgtaccctttaattcatgtaatgtgtcatttccgtttcttcacgtaatctcaccgtaatctctatatataagcacacaagcaacacaatcgatcataaaccaaaaaaaacgagagagagagatggggaaggggggttggcttcttaactttctgaaccatgccaaaaatcaagaaagtgtggagaatcttgacaaaaacggtgccgtaaaggccccaagcagtgggtttaagatgccgttgcattacccaagatacacaaaggaggattatgaagagatggaagagtggagattggatttgcttctctcggaatacggacttcttgccttccatgacaatactctccatgagaagcgagcttttgcaatcgacacttttatatggcctcatcacccataatttcatctccttcatttatcttgtttatatttcttaagagtaacggagattgtagagatacaacattggaagagatgacaaaaaccgggatatcaatctaccggatatatatgtcacaaaaagattttagtatatttttagtaatttgatttctactatattctttagttttcattagatctctttatgttatgttatctatataagtttggctttggattttgcatatattaacctttccgttcaataaaatatagttttaccgcttcttatggtatcaaagccttcatccaaaacttactcaaatgagattgactctcatgttaaaacagagaaaaacagagaaaaaacaaaagatcattaaagtcactatataaacatcatgattcatctccatctccacccttaatttctttactagtccgttcgttctcgccactattgttgtccgtgattgtacttcttcataagcatcactgaggaagcaaattctaaaacaatagtatcttttaacaatcataaagtaaaacagtttttttttttttgttcttatatatatactacttattacacatttaaactttggttttgaacagtgaaaatgttgcttgcaatttttttaactttgtagaaatcaggcaagttcttaagttgacaaatgacatatactagtaattttcacgaacgttatcccactaaagtagtcatacccaaaacaaaattgtttaaataaaagtaacttaattatatcattgagattcgagtgaataatgccaatgaaatttaatattcattatctgacactctgaaactatgattaactacataattatttaatttaacgtttgtaccagctaatagtatacacgtttttatgacaaacatttttgaattttttgagttaaaaaataataatggttttcgtcgtaataggagaggacagacaattccaacgtgatatgtacgtttatcatgttacttagtcagcagatcatttcttcggattatataatagctatttagaaacattaaaggtgtggattatattatagtcaagtctttccaatatgaatattatatcatccaccaatacataattattgtcaaatacaagttgagtcagattagtcaaatacaggcaaccaagactcgagatcctcatcgtctctccactttatataaaccccaagtcagtacttctcataatataccaaaaacgaaactgagaaagaagttttatttattaattaatggcggaagagaaaagctacaagtacgtgatcattggaggtggtgtagccggcgtaagtaaatgcattttcaattttgaacttttcttttgacaacaacatatcttttatcaagtttaaattcgattgtaacacaacaacaacaacaacaataacactaatacaaaccagtaaattacatgttttgcccaacatttttatcaactcgcattgttcagttttgtagatgatgagactttttttgttgactctgttttttttttgtttttttttttggcttaagaatcattgttcagtttgtgttcattctttgcttacaaatcatcgcttatttcgcatccgtgctttgcttacgaattcctttctctaactctctgttattttactctcacttttacatgtaaatccctttatgcttattaagttattatacacaagaaattgtttatgattttcttctattaaatgttattcatgtaacgaatacgcatctctctgaattgacttttttttttttttttttttgggcatttcggaatcacagggttacgcggcgagagagtttagtaatcagggcctgaagcctggtgaactcgcaatcatttccaaggaaccagtacgttttttcactcttatgacttatgagcgtttgcatgttacaatttggtgttttgcttttccaaataataataccactactttttttgtttgcaaacgtcaattgaaaacacaaatacaagcgcaaactctggttgcatttgcatttgcgtctcaagtttatgaaaactatttttagaaagtcgaaataattaaagccatccttaatatttgattgtctagtctgaaaattgatgttgaagtccataaccatgttttttttgtgtgtgtgtcaataggtgcctccttttgagcgtcctgaactaaccaaggtatatattgacctcgaaggtaaaccttttaactctaaaacatctctgtcaatggatatattttaattgctatcggattttggttaactttgatcatcattacagtcaatccgacccttgcaaatatctatgtttgtgctggaactggagaagcgaagcagtaccctaactggtacaaagagaaaggtaatgttttgtttatgtcttctccgagaaatctctgtgatttcacttgcaatatatttggtgatctgagatattcaaattttacagggattgatctaattgtgggcacagagatagtcaaagcagatcttgcttcaaagacacttgttagtgatgatggcaaaatttacaagtaccaaactttgctaattgcaaccggttctactgtgagtaaaatacttatgatctcttcctctctctttctgttctttgttcttagttcatctcgagaaactctaatattttttgcagaacataagattgtcagaaattggcgtccaagaagcagatgttaagaatatattctacctaagagaaatcgaggatagtgatgagcttgccttggctatggaactatatgtgcaaaggggaaaggccgtcatcattggcggcggtttcttagggcttgagataagttctgctctaagggctaataatcatgaagtgaccatggtttttccagaaccttggcttggtaagttgatacttaacaaaaaacattttagctaaataattacactgtattcgtaacagattttcctctgttttatcgttgtatagtacaccggtttttcaccgctgagatagcttcattctatgagagttactatgccaacaagggaatcaaaatcatcaagggaactgtagcaactggatttagcaccaactcagatggagaggtcactgaggtgaaactagaggatggaagaaccctagaagctaacatagttgtcgctggtgtcggtgctagaccggccacctcactcttcaaaggccaacttgaagaggagaagggtggaataaaggtttatgatttaccctaccggcgaaaaacagagctcttgtcaattaccataattagtgattaatgattattcgttttgattgtagactgatgggttcttcaaaacaagtgtgcctgatgtatacgcacttggagatgtagccacattcccaatgaaaatgtatggcgggacgaggcgtgttgaacacgccgacaatgctcgcaaatctgctgcacaagcagtcaaagtacgagcatttactagcttgattctatagtcgaatataccaaactcttctatatatactaatgatggtgttttgcaggcaatcaaagcgggtgaagaagggaaaacgatcccagattacgattatcttccctatttctactctcgatttttcaaactatcgtgggaattctatggggaaaacgttggagaatctgtactgtttggagataatgacccgaaatctccaaagccaaagtttgggacgtattgggttaaagatgggaaagtagtaggagtgttcctagaaggaggtactcaagaggaacacaaggctattgctaaagtggcacgagcacaaccttccgttgagagtcttgacgtgttatccgaggaaggcctttctttcgccaccaagttctatagcacctctctttgagacattgggtcttgtttagtcacattgatgtaataatctcctttgtctttgatttcatatcgagcccctattgtatttcgaaaaataaattaaatataataatgcattttgtttggattatcaaaacattggattttaagttctttcattcgtcatgatagacattcagttttggatgcacatgaacacatggcattggtcatgcttttgatgacactttgagtcagaccaaaattgtcacattttaaaaaaaaagtcaaaacacaactgaaactttaaattttttgagaatcaactatcaattacacacataattcaacgtcaatttaattcataagtaatataacacatgtactaccaaatcacacccaatattcgctaacttttttttttaacaacagaatcgtgcttctcacgagatgccttctcgaattatcccatgtcacggaagttgatatcatctcaatcttcgaaaccctaatctcctgctttatcaaaacccaggaaatgcttatctctctccaagccccaccaatctcaaaccctcggcaagatctccactttcaacccttcctctgcccacaccctagccacgtagatattcgtcactgtcgggtaaaaaatcgccaacgcttcgatcgtctcctctgtcgtatgacgatttcattatctgtttatgcatcgatgggtagtttagctcatcggtccctagcgccgccttagaaactcatgctgatgtcgtagtagatgagactcgggtgaatcgctctactagggtttatttgacccgactcggaaaccctagctttgcttctcgacccctttgattcctttttgaatattttttgattaaagtttttggttgtgtaaaagagagataaaatttggaacttggtgttggttttggacatagaacatcaagtggggtttgttgatttcgttgcaagacttataaaaagtggaacttggtgttgttttctatgttgcatcaattctaattgagaacaccgactaattctctgagtttattagccatctaggtctcaagctatcaattcaaaaacagcttgattcaacaagatcaaccgaaggtagtaagatttcatatttttataatcattgcttttttttttaatctatgaattcgacgatcccttataatacccaccagtttctggtgttgacattcgaaccagtgagcttgacttgtgaaactctctttactacaaagacaagccgagacaactgagtaaagatataaaaaacaaaaaagaagaacatataattagtcttactcttaaatccaaatagctttgagatgtttgtgtagaactgagtaaacagatctccatccttcttcactcggatgaaagatgtcccaaaagaaggcagcctttggatcttcacaaattatgtacttcttctcacccttctcatccacatttgagcagtcgtaactgctgttgaccccgacacaacacggttttaacgggttcccaaacctcgaaacacctgagggattcacaaaagatatatatatatatataaggatcataaaagaaaaatgaacattttagctaggatccaaaatttaaacttttctttttgggtttaccaggttccggtcctttgttcttgaaaacagtcaagaacgcgttgtagtggtcaagaacgacgaaagtggatggctttgtctcattattaagcctagcgatggctttatgcaacaaatagttgtgaagattcgttgatgcgttatctgtggcgttgcaacgttggaatgaattaaagactgtgatgctagggaggcatccgagtggctgcattgaaggaattactattttatttactcccaacttgtggatgcgcatggcgttaaccgcaatttgatcaacaacttgcttcatgaatgccggtaactcctgcaagatacaatttcgggcttaagtatacaaaatgtaagtacgtgcacacaaaatctgatatttttacttacggtcagtgggcgttttagggccaagaaagtggcgtagtcgttgccggcgacgctgaccagagcgagggaggaggggagatcggaaggcgagtagatattgccggcggcgaggacacgttggaaataatcaatctgagttgtcatgtttggcaatggattatctttagtcttaaacactcctgttcctccatacgcataattcattccgtacaatagccgttcctttccggcataatccttccacgtgtacggaattggtgactttatccccaagtatcttgctgcacacatgcattaaaaattgaatcaaaactttataaatggttcaaaagtaataatcgtagtatgtaaataaaccgtgtagatcatagattaagcagcaggactatcccacactatttgcaatcagccgtttgtattcggagaggctagtttaattaatttcttgtttttttttttggttcgattctaaagatttaatgtgattcaaaaatgaaattcaaaacataactcacaattttcaaaaaaagttgagcagttactaatctttttattttgtacaaacagcttgaatagtttactaatctaacgacaaaatcagacctataaaggtttctaatatttccacgtcagcatgatggtagctagtaacatacccatacgttttcctttttcgataattaacacattaatctacgtaacctacggtttgttagtgttggtgttgaatctggtggccggatcacatcaccatatcctcatttattgtcacaaaaaaaaaaagtgtgttagagagaaaacctagaaaatcggtggcgacgcggccatcggagaaacgaccggaaggtttttgggggaaagtgatgccgtaaggaattttccaagaatcggagagagatttccttatgtttccggtgtctgcataggaatctccaaacacgaacagtctattcggtctcagtctcttcaagttactatgctgaggataatccgattcagcaccttcaaaatattaatcattagtagtgggtttcagagaacccatttatgtgattaagagctttttagatgagtatgagtataattacctaagaagaaagatgagaatgagaagagaaagagtgagattaatagttttggtaactccattgttgttggtgtattgatgtatcagattcagaccaaaaggcttgtgtgtgttttgtgtgtgtgtgtgtttgtattgttgtgttaaagtacgaaacgtggagcgaaaagaggaggaagaataagtatatatgtggtggggataagtttaaggagagacctttgtgaactttatatttttatcttctatacattgtctatttgactttgtaaggacaattaccaaaagagatttaaaaaggacacaacaacgaagatttggtcaactttaggttcataatcataatgccaccaacaaaaattctttcacatttttgtgaaattgtgaaagccaatataaacatttcctgttttaaatttttttatgaaataaaactcataatgttaacgaaatgaattattaaatgattgagaccataaatggaccgcacgtatagtagtgcccttccacacatgtaacgtaatcttctcctcaaccaaaaagtctaaattcatattatatatacacgaagactttcttacatcaaagaagcacaatctgaaaatcatcgaatccaaaatagttgaagtcgtcatggcgcagaggatcacaacattggttctgctaatagagatattgtttctggtgagttgtgtgactcatatcactacgacagcagcgtataacaatggagataagattcacgtcgccggaaaagtaatgtgtcaagattgttctctgaactacgacgaatggatcaacggttctgaacccatcaaaggtatccattaatagttccaataatatactctctttatatatatatatatatatgtgaatttctgttaccaaaatgaaataaagagtttaattacaaatgaaaatttctctattcacgaataagtaattagtatgaaaaacatatgaattacattttataccatacaacatgtgataatcactcataactgactaggaatacaaacttcaacgtggttgtggtagacaaaactatttactgttatatcgtaaaaggctataaccaacgcaaataaaaaaggaaatggtttttctttttctatttagtttatattcgatttttctttttctattttgcaaaccgtgagaaaactctcaaacccgaatttacttaaccaaattattccactttgtatctttcaggggcagtggtatcaatcacttgtatggacgaaaggagaagagtgagctactatggcagcgatttgaccgatgagagaggccagttcgatctaatggtcaacaaagtcctctcccacggcaaggttctcaagcctcaactttgtaatgtccggctcgtgtcttctccggacctgtcatgtaacattcccaccaattttgggaacggtcaaaccggagtgaagctagttcgaccattcacagttttcagggatctggttaagtatgtggttggaccattttattataccacgccaatgtgtgagacgcctaaatttgaaaacaactactaaactcggaggagtttgacttattggccaaggtcattttgatttattagtggcccttcgttaaacaatactatattactctatttatgtgtattgtgacatggtctgcttccgtaatcttgttaatttcttgtatatgtcaaagtataactaaaacaataacacataaacttcaattacaataaatattcccttgtgatattactcttccaattaagtgagtttcttctagtaaaatgatcattttaaaagtaccaaaagtaataaatagcagaaaactgttgttgcataaatgtgttctaaaggcgatgattttatatttggtctaaaaacataaataaagaggaattcactataaagagaatcggaagcaaatttacatgcactggtctgactattctccaaacttattagatactaaatgaaaaacaagaatatcaataaaactactctagttttagttctcaaatccgaatatttttttattcctcacacaaagaacacacaacgcgcgggagtgggtacaacccaaacataatgaagaaaaacaaagcatagagaagagagagagtattacaaaattaaagatacataatctgctgattccgaggggaaccgaagcttgccaaaggatagaagttgcccaatttctagagggagataaacaaaactcgcagtctgaatcagccttctgcagtcttcattgctccatatcttaaaacgctttccttacatgaacacaaaaccacttaactagagagttttcattttgtatttaggccatcccctaaaagatgaataacctctagataaattagaggttttcattcttcttcacctagctaggggatggccatttttcttttgtttttgtggtgtttgccaagttaagagagggttcaacaatggaggctctaggggggttttatagcatatttctttcttttttgcgttttattgttgttgttgtctttggtcatgaagacattaaaaagatacactgaaaccccatatatatattacataagctatattgttctttccacctttcctcatttctttttcattagaaaaaaataactaaactttttgtaacaatcaaccaatatatttcatgtttgttaaggttctttataaatgatttcttttcttttatagttaatagatcgtatatgatatttatattttggtatcataaacacgtaacatacaaaataaagatacgaaaattcaccaatgtacacgtttatcttgatattaaaattctggaaagaagaaacacaaaggaaaaagaagagagtatatattattggtgtaaaggggaataaatatatatatggtgtaaagagagtatgcaagtaatttaaaaatataaatgtttataagtggaagcagatgatggaaacaaggggagtcttacgtgaatatgcttttgagaattttggatcatccgatggaatatgccgttaccaaaattgccttttcagtttacacagacatatacacactcatctgatgacatacacagaaagttgagttgatttttaattcaatacttaattagtcaggtataatgccttgagctgtcaggaacgtacatttgttttagtaaaatacaaatgcaaattactcatgaaaaagcaaactgttttatataaataattactctgtgaaagtctttttactgaaatatacaagatttttttaattctgtgtgttatgttaataacttgacaagttcttagctctttcgttttgttataaatataacaagctctttctttatgatcaaattggaggacattcttttaggaaaaatatgggtcccaaaatatttgttcgcttgaaagtaaaatatttataaacaaataagacgcattacgtttatctttttttttttggaacgattgatcacctaatgaacaagcttagtgttcttataattaaagatacctctcgtgtctatatataaaaacacttcaagtatatagacacgaaagtgtgatgtattcatatactcatgtaaaatttaagaaatctaaatggttttctcctactgattcagtatatagacacgaaagtgtgatgtatccgtatacggatgtaaaactaagaaatctaatggtgttctcttactgcttcaattcaattgttttatttggttgtcttaatggtgctcctagactggatccacctagtttgataaccaaaaaaaagaaatggatttagttagtgtgatgggctcctgctacaatcaaatattagccccaattatcaaattctaaaaaaaaaaaaatgggttaacaaatgtctctacatatatatatatatatatttgtctaaggctagcaaccggattacctatatctgtgtcaaacactctcattcttggaatcccaatcttgagtgccatctatgagatgaagctgtgaggagaaaaaaaagtaatgttacagtttaattacgctgaccaaattggttagttaaaccggaacctagtggggaaaagaaaccggttttgattgcaagccttcgttatttgatgatatttggaacaattggattggtttacaatatttgaaaacgctaatagctgggctttaaaattactcaattgtctaattgggtttatgaagcccaaattgatcagtaaatataatctagtctagacgttacttttaatacacggattctggattcgtttatcctggatatgtttggtgataacagaaattgaaagtgacaggagaagacatgcatgatcaaaagttttgtacgatgttttcaaatcaaaagtatgatgttctgtcaatctgtctctccaatactactcttttgtcctccaatcactacacagcttaatgggtttgctatttatttattttaactatatttttcttttgcaccaaaaaaactgtatttttcttttccatgttaagattcaaaaagcctttttcaaaaaaaaaaaaaaccgttaccaagattcaactatttaacttttttttttgttctcaatatcttaatatgtagatttaaatggtgacataacgacaatatttaacataagtaactgcaccagaaattctgatcatatatttaaaaccattaaataccatttttcaatgccatttcatcaaatacagttttttaaaaaaattaaggctatttttcagtcaaattagaatcattgacttttgtcattttaaaaaacgtttgcacttactcactagaattgcaacgtttataatttttgatattttttcttacttcaaaatattctataaaactaattaggggatttcacatcttgtgcatgctaatatatatttgcaataaaactttactatctttgtggtaattttcgaagtacaatttagagtttatggtattatcattttttaaagttaatttgaccatatgaaaaacttttagaacttttatatatgtggcataagaaatgtttttgtttttcatctgagatactcattagggtaaaatggggcatccttttaatatcatcattataacgtcatttttttttattgaataaaaattcattataatcaaaacctatatacatactgtcattgatatgatgaataaaccaagcatgcaaccactacttagaatttagaagaagacattgactaattaggattggccttaattagagatattatattaaggtccattaggacataaaagaagattatcactaagcactttggtcataatccacattaaaatctaacgctatgatattgtaatctatagttaactaagttatctaccaatatttgaatatgattagatattgatgtcttcaaaacatactttaattcccacaagagatatacagaaataatatatgtgatctatcaaaaatgaaatctatagataatatttgtgctagattccaaatccacggaaagagttcatcaaattttaaaccaataattgatactgtgtgactcgatttattatcagttgagctagatgtatgtacttttagttaaataataatatctattatatagtattgtaaaatccatggatttgtaactttcaatcggtttgcaggaaaccgtacttgtcattttcaatacttggtagggttacttatcgtataggggaacaccacatgcaattttgaccgagactaatcctgagcgtggtatatatatttatgaacaaaatataaaatactttatttgtaatactatatacgaaataaaaggaggaaattgtatttatttgctgtagcttattttaagtcaaaaaataatctcgtagtcaaaatcaaatagtcacttatcaactttgttgaacgatagttgttaatacttatcgtcgacataacccatttttctttgtcgttgcatggagaatgcaatggacgtgactagacctaacgcaaatctctaaattaaataccagtaataaaatattagcctcaacaaaggaaaaaatagtctagaattgtacgtgatgcatacaaatgtgacatcaatcatgggtccaacgaacctatattagatgaattttgtaagactaactctaaagctt

SEQ ID NO: 403 - DNA, 87937 bp, Arabidopsis thaliana
gaattcacctcgatagttcggatcctcagtaagatgcccaaaggtatcgagatctgtgctccaaaatacatacggaaagagcattgcaactttattcagtaacccaaaacctaatctctttatacaatcaagctttctctgaggtaattcgggaacaaatttgatggatccgttcttaaggacaccaaggggaactgtacacagcaccatatcaccctcatacacttgatttccagcagttaccttgacaccatttgaaccatatctgattgtttggacggtcttctcatataatattggtacattttcagccaaagcctgaaccagccttccatttcctccaggcagaaagcagtgatctccacccatatcatatgggtcatcttgatcccagaatgcaagagaaagctttgatactaggcccgcatttgcatactccaagttagcaagatgccagttaaacaaacccatctcctcggtggccacatcattcccagaaacctgcctgaatgtctcgagtgctgccccaagggagacatccatggaaacatcacccatcaactgcctaagtttacttgccttgtctagaagctggttaaacgctacctcaacctttatatccacatctggatcaaccggcttaccatccaccctataaagaggacacttgtctcgtaccttatagagagaagaaccaagctgtctcgctataatccctaaaggatttcctaatgttccagtcaaaacactcccacctaaatccgctgcagcacctaccctattagcttccatctttttggtataaacccgtccaccgggtcgtttcctaccctccaaaaccgtgactttgaagccaaacctcatcagttgcctagctgcagccaacccagataaaccagcaccaactataatcacactagacttgcttgactgagcaggaaacttatctttaatcgcctgtgctattccaaaattgatatatccatgtgtaaccaagtaattataagccgaatctaagagactactacaatgtttaggaatcgaattaagaaacatctcctttgtgacccaactagatatattttctcgccatttggatataatgtggttcctaatcaaaatgtaattgacttgttcaatgcctccaacaataggcaccacaccgaattcaatctcttcctcggtaagcgaatcagcaggaaacccagcagtgagagcaagcaaagcttcagtggtagcttccttgttaatcgtaatgatctcatcaccaatcccaggataacttttcacagtctggtttgatccattgacgacctctacgttaaatctaccggaagaagaagctgaagatgacacgaaattactgttaccaggaagaagacctacgttagggacgggaagggaattaagcgaagacattgagcgctgagaacgtcctctccttcgtttctttggtgcggagaatgagaccatctgctcaaaactagggttagagattgaggtagagatcgaattcggaaatggattcaaacttgtttcggtattggtgtttgagctcgactgtggaggaggaggagtagagaattgagagtgagaaacagacggaacataattatccggtggattcatcgtttccgtcgccgtagaaactgcaggagagtgatcgatgagaagaggaagaagaaaaggattgtttggttactggattaactttatctttatttaattgaagagctttttgatgatttagtttcccacgatttttaaattattatttgggaaaaaacagaaaacaaggaaaaagtaaaacagaaaaagaaaaaaaaatagagagagaagaaaagtctggaaaattagaagaagaaattggaaggagaataaaacaaacgcgtatcgtatagatttttaccttttcttcttcgtcttctccattttctcgagatttagcttttctcttcgtgatcgggaacgtgttgatcagattctagcgtggattcgtatcccaggtaagattcgcagctgaaatcgaatttgtttctcgatattcttttctctctagatctacttccagacgtagtgtttgattaatttttgtatacgccgatagtctcgtcatcagttgaatttttcatgtaattcgaattatgattctcagatctttcgctgaaggagtaatgattgaattgttcacattttgttctcctgacttgaattctatgttcgccgttgggtccactagcttctttgtgtgtactgaactgcgtaatatcgcggtctctagctcgtgtatgtgtttaactcgtcttggggttttggacttttgctttcagctacagagagctttgattggaatgtgctgaggaacattcatttcggctctaataagccaatcggagtgagttcgccagcatggggattttcaatggtttgcctgtaccctcggataaaactgtaagttcactttcctcactcgtagactcctacttgagttggaaaacctgaagtttgggcttatgaggaattgtgttgttctatggtgttctttcatccccttggggatttatagggacatttaagtataacggttctttttcttatatctcttcatttcggggttggagttaattgtaagaagttgtacgatggctagacaagaaattgactgaattaccaccactcttgatttggttatgtatttggttttggagtacatgtgtgtgtatatgtgcctgagtgttgatggttattgcagtaccttagggaggagctggcaagaatagatgagagctgggctgctgcacgatttgactctttaccacatgttgttcatattttgacatcaaaagaccgtgaagctgacattcatatattaaaggaacaaagtgatgttgtcgaggaggttgttgatgaagttgtccatgcttatcatggtggtttcaacaaggccattcaaaactattcacaggtttctaatatctgttagctcttcctttttattggatagttcgttctgttattctaaagtagcatcctctgttaccgcttattgacttccatattgcacgcttcatttgccaaagatacaacaaatctaatattgatactaactatggctgcttctatggtttctgcatgtagaattttctttttggaatagtaccctctgttgtaatttatctactaaaatttcatttgtggaacaccttggttttgattatctctcttcttttgctctgctttcaatgtattcctcatcagatcttgcgattattcagtgagtccactgaaaagataggcgacttgaagcacgatttagcagaagcgaaacagagcttgggtgcacgcaataaacaattacatcagttgtggtaccgttctgttacattgcggcacatcatctcacttttggatcaaatcgagggcattgccaaggttggttggattagctgtaacatttctttgtttattttgagtttacagtgcttgctatgtatctgcgctgctatcaagtttcatacttcattcatcatctctgtatctctgatgttacttttgttgatatgctcccgatatatgtacttacttttttttcattttggcttacttaaaagaaactgcttttctgatgtgaaaatggtgaccctgcctcttgaaaccttgaacaggttccatctcgtattgagaagctcattgctgataagcagttttacgctgctattcaagtgtatctccagtcgtctctaatgctggagcgtgaggggcttcaaacggtaatttacttactgccaattttaacaaatgcattgtcatgggaatattgtgggtcttcccattcatttatcaatttgatctctaggattgttttgtaataaatccattgaagaggatctgggatcatcgaagttctgttgggactttagaaatatctctgtccaagggatctactgttcacttgtatgttgaactcatagatattttggtacgttaacctaggttggtgctcttcaagatgtcagatctgagctaactaagttgcggggagcccttttcttcaaaattctagatgatttgcatgcacacctatacaatagaggtgaatacaggtaggtttcttttgcaattctataagcaaatttcagaagctgtgctgctttttatcctcggatctagtggcctgcttgtttgattgtttgcctcatcacttctttcagtgcacaatcttctgttcttgaccatgtttatgctgcagttcagttgcgtcaagcatatatgaaagagatgatgaagtaccaacgacaacagctgttgcagctagtcgaatgagctcacaaccactgtcacgtagaacacggacactgaaaggtgatagtcagtttggtgttagagggctcacaaatggttcatatagaaccgcttctaatgatgaaaggtatgatatagcatcctttcccttcagtgtattcttcatgagatattaggaacattttttcgtgtatattgttaactttattctgagtgatcaatgtttagtaactgtctgtttagttgtagttctccatagaggctttcacttgctctattattaatactgagattaatatacttgcatcatttcctaatcattatgtggagattctccttgtaaattctttcattagaatatttgttgataaaagaaactatactgtaaactgattattgcagaagttgctttgtctagccacacaacctttgttctagttttacgaaatatactttacatgttttgctattccttgactttgctaatgtttgtatcttttatcacattgtgtttcgtagttcatcatttgatggacatgatgaagaagactccgtagaacatgatgaatccaccgcagatactgccaggaatggcactgatagtaaattgctttctcaccaacttcctccatggctttctgattccactcctgatgagtttattgtatgtgtctgtgattcagccttataacatatttctccccatatttcattagtgtcatgatatgtgttttctcctgtttcaggaagcagtaagaaagagtgatgatccactgcatgtgaagtatctacagacccttgttcagtgtctctgcatgcttggcaaagttgcagctgctggtgctatcatatggttggctttctaattattttcatttttttaaatggttttataaatgctactgtttctgtttcacagctggatatagttatagattaataactcctttaatatctgttagtgttagatcgctagcagatggcctcatttctttagttaacttgtcacccatgtcatcactagatactaaatgtatatgtgtaatttttgggactgaacctttatcattcttgaatttaaagataaatggataaccgatgcagcacagtagttttccacttgatggaaattagcacattccggcttagaaattgtgaacttttcttagttatgattttgtgttcgcttgcagccaaaaacttcgacccacaattcatgaaatcataatatccaagattaaagcccatctggagactacaaatttgtcaaagtccgcgtgtagtcagggtgatcgaagtgtagctgctggattgcatttaatcaaaggacagtcagaggcctaccggttatcaaaagagaaacctcaaaatgggatatcaaattcaggaactcacctagctgtgagccctgtttcgcctcttatggctcctggaggcaaagcgcaggctgcagcgaaggaacttcttgactcaattttagatactattgtcaagatatttggtgagaaattcaactcttaaactcatctcaatatttcattttcaatagtcaacgctcaaaaattttgttactgttgcttctatagaaaatcatgttgttattggagagcttttggagatgaaggcttcacaacatgacattaacacaccaaggtcattgcctactgatgtgaattggaacaccgagtctgaagcatcccaagctactggaggctacactatcagttttcccttgacagtcttacaggtttgctattatactccaaatatctaatttgtcgtgaagctaaatgtttggattctcatacttacgcttattgaaattctatgtgttaattgatgaagagtgaatgccaacaactcatatgtgagattctacgagcaactccagaagctgcttcagcagatgctgctgcacaaactgctaagcttgcaaagaaggctccgaagaaagacaaaaggcaagtgacccacacacattggtagttcatacatttaccctggtgattttctcattatcatgtaggtacataaacaatgaaagatgtcccaagaattagacgtttaagatttggttctgaaggcctggtgtgaatcacctggtgtagtcattcgattatatagagaggatgttagggttgagatatcttccgacagtaaaataagaaggtttttacgatacctaagtctaaaaatttgtcatttaggttcttctcagcgcgctagtaaagtggagccctgaggagtataacacagatttgaactttttggttgctggatctttagcctgtctgggttatttactatccttttaaatgtcaatattggaaatagttcaactgttgtttaacatacaaacatgtcgcattctctttcagcatcatagtgctttgcaaggctattttgtaagatatgcattagtagtattgatacttgattgataatgttgggctgcagggatgcacctgaggatggcctaacattcacctttcggtttacagatgcaactgtatcaatatctaatcagggtaataatcaatcatcccgacttttctttagttagaatgcctttggtggacttgatgacgttatctgctgattgcaggagccgatctcattcgtcaaggctggggaaagagggctccaaatgcatcactggaaggttatggatctgcagctgttttgcctgaacaaggaatatatctagctgcatctatttaccggcctgttcttcaggtttagattctggttcatctaagcatcttcattcaatgtcatcagttttttttgtagacttatgatcttatgtgtcttgcagtttacagataaaatcacttcaatgttgcccaaaaagcattcccagcttgtgtaagttcaaaatttccacttttctttgaaggctgtcatcctggcaaagcaaaactacttgctcacaagcccaaaatgaaattattgttttctcaagtgctgagaaattgctagtatattcaccatcgggttattaataattgatgcaggaatgatggattgcttacattcactgaaaactttgtgaaggaccatctgttaccgacaatgtttgtggactataggaaaggcgtacagcaagctatatcaagtaaaccccatatactatagagatttgatcatagagttttttgctattttagggtaattattctctaaatgtataacatagaattgcatcttgaaaagtgggctgttagtttggccccaaagacttggagttttgccatcacaaagtcgtaatagaagcatttgctctcaaaactaattgaattggtctgccaatatagggtatggcagttttatgaaaagttaaagcatctttgagaattattgcagatatctttaagattcttggcatgaaatattttataggaatatttacatttcactaatttatttaaaacaaagtaccagtaatgtcggtgtgtaattctgtataaattcaaggttagaaacccatggttctgaaatcattttgcaggcgctgctgcatttcggccgcgtgcacatacaactacttacaccgcaaccgtagaaaagggacgacctatcttacaaggtcttctagcaatagatctccttgcaaaagaggcaagtcgtctatgctttaaaactgcaagataaaagtttttatttttcataattttcatcttcctaaaagaatggattagttgagtggttacttccagttcatcatttaatccatttttgttttctcaagtttcaagatatttgtgttttgatgaaactacttgctcttcaaattttataggttcttggctgggctcaagccatgcctaaatttgctactgatcttgtgaagtatgttcagacatttcttgagaggacatttgagagatgtcgaacatcatacatggaggcatggatattcctcttttcttatttgttttcctcttccttttgactcttctaatctatatatgttgggcatctggtttaggggtttgcgcctatagcacaaaagtttatactaaaagtagttttgtcagcgtaatgtgatgttaaaaattcaactggaggtaaatgaattagatgatatgactgtggattaccagctagagttcagtttgggctatgtgaacttggcattaaatgcttagaagcaataatcctcagagagtattgattcaaagagtgatgtggaagaatatggagccagtcttaaatgcaccttttcgcatctttgataaaaaatctgcattttcttacccatttaatacctctttagtttccctaaatgtaaagcgttgtatttcttccttcgtacacacttttctgaccttaggtttcattgttagtatttcaggctgttctagagaagctcagttacatgctcattgggaggcatgatattgagaaattgatgcggcttgatgcggcgagtgcttgtttaccatctacgcttggccatgccgtttctcactctgaggctgttggcactgaagtagaactcagtgacctattcttgagtttgcgacctatcaagcaggtaaaaatatgtgttctctgatacttattctagtaagaatttttcattcggtgaagataattaagttgttttcttacaggataatctaattcgtgatgacaacaaactgattttgttagcttctctcagtgactcgcttgaatacgtggcagactctattgagaggtgattcattggttcagattctttatgcatttgctcgttcctcatctcttattacatcttagatgttttaaggacacagaaaattgcgaagttccatgatgttataaaagagaaaaaggacatgcatagtaaaaataggatagctaagagactaaattagactgatcactgtcttttccagctcaaacttaaaaaaactcacaaaactttttcatcaagtgtaaaacaaaagcttgcataacttaaggggtcttccatgaatgttgtttttaccctttctgttgtgctccttcatcatgtcgagaaagatagccagttcttccttccctaacagcaagcaaatgaaaattctttctgaagttttgatttccaaaatctttaggcttggacaagcagttcctcgtgtggcgagtcaagctgaaggtaatagcagaaatcaagcagcttctcctaggaatctggcatcatttgcagatgagtacagaaaacttgcgactgattgcctaaaggttcttcgtgttgagatgcaattggaaacagtctttcatcttcaggtatgtgatggatcttccctttgtgaggaaagtggcatgactatgagaattctatctctggcctgtaaaacttacgaaaatactatggtgttaaaaaggaaatgacgaatagggaatatttggaggatgaggatgctgaagagccggacgactttgtgatatctcttacttcacaggttaggactgattatagctatgtacttaaaaaaaaacaatattccaggaatacactttaatcagccttgtttagtttcatagccatcaaatattcatatcactttcttctgctgagagaatctagttagccagatgatgaagtcatcttaattcattgctgtgaattacatacttgttaagtgtccactgtccaatgtaattttgaactgcttttgcgagatgacaatcttttgaacccgatatttctgcaccaagtttcttactcttcctctttttacagataacacgtagggaggagggaatggcgcctttcatctctggtgagaagcggaattacgtttttggtggcattagtggaattgcagcaaatgcgtccattaaggtacaactcttcctttctatctttggtacttctagttcaaatttgaatataccatactataattcgatatccaataggttatcacaatcttctaaactgtgacagtatttattacgaaattttctaggctttggctgacatgagatcaatcaaccttttcggggttcaacaaatatgtcggaacactattgcagtggaacaggtaaagatttgttcactatttttagtaatttccaactgcattcactatcttaatgtgtgtgtatttacactgcaggccatggcagctattccatatatcgatggtgaaaccgtacaacagaacctagatcgtgtccgtacttactttgagctattaaacatgccattcgaagtaagcaaaaagggagatttttttttttaatcctttgggtttctcagcattattatgacccgaaaaccaaatgaaactcaaatgtttacttaattttctgcaggcattgctcgctttcatagcagaacacgaccaaatgtttacacccacagagtctgcttctcaactttatttccgttaacctgaattcagcgaaataaacacaagaattagactaatatagttaattttttggactaaacatcacattctttggcttgcaggtattccaatcttctgaaggtcaatgttcctggaagagatactccttcagatgctcaatcccgccttttggaaattctttctcattaatgtcaaagccattcgcggattactgtgattaaacgaaagctttctccagcagccaatttgtttcatgattttcataagctgcagaaaaatcataatggtgaaatcataaaggagaagcaggagacataaaatgtatatcttcttcgtgctttctactgccacaagagtttggattcgtgagtatctcaatttttcatttttttttttgttcttttttaaactcttgtctagtttcgtgagtatttgtctaatacggaaccaaagacctttctttgagagctttgttttgtttaaattctttggtagagattttccattgtataaaactttccaaggtgagttcatattccttccaagtaaaaacaaaaatagagagagaaagccacaaaatactttactattcatcttcgattttttccgaatcacacacaacagagtggaatctgagattctctcttttggcttttggtttgccaaacgttactatcaaatttaaacaaacatgacttttaattactattcactttatgactttgttgttcaaaatgatcttgtgaaaattgaacctaacccttgtttctgacacttgtttagaatctcaaatctctgactccactccactagacttaaagctatagtagacgcttagttaagagaagcaattgagtcttccagactattgaggacaatctaactgactcagaatcctgtagctcttacacatttcacaacaaatcatccgagaaacatgagtagccgcagtattattattccatccgtacagttttattattcgttctcgctagtagctacccaaaaaattcaacaaattggaaaataggaaataataaattcaataataaaatagtgtaagtaaatctctgagaggccgctttagttgtgcttgccatcgttaaactgtgcgtttttggacgacttgaaagtttcaagaaactctttagccttttgcaactcttgcttctgcctcgacttgtcccatttgtgttcacttgctagaatctccaccacacgctgcaacgcccgagccgctgcatcagtgtccaagaacgcgattctacatctccttgctatgaaatcaaccgctgattcgcagtactcgtgccttgcacagtaagcaacctcagcttccaaaaacggatgcccatgcgccaaccgtttccccaaaccctcctcctgcaatccgaaatccaaaatattacctaccgaggacatgaagaagaacgagtctggatatagaaccatacctgagctatggtggcaactcggtcagccattgaaccataggcatgagacaaatgctttgcagcagctgtgtccattgctccaggaaccactttaccaccgtatgttttcttcatgcgcacgtattgctgtgcaagagttgtgaaggaagatggttcccatccataagaacccagaagctgtagtttctgcgttacacattcattggttggcttaagttgtcccgatttgattgctgcatcaactgcatcttccgccatgctgaaagcaaattactgatgagcaatgatcacacaactttaacaaatttctgctatattttacagtaccctcaccttcgataagttgtccactttccacccgtgattgtaaccagaccaggattttcctcgaagacaacgtggtctctggagatactctctgtgctcttggctgttggatccatggccaatggacggatcccactccaagccgaaagaacatcagtacgtcgaacctatataagatttaggatgcataacatcatcaactgaattgttagagagctattgggtcaaaaatagaattgattattcctcattaatctgaatctggatataccttaatgttaagatagtcgctgattgcgtccagtataaattgaatctcatcttcatgaggttctggaagtgaagtgattgaagtattagagtctgtagtgcctgctactgttcttcccaaccacggtaacataaacacaacgcggccatccttagttttagggactatcaaccccatgccttcaggagaatagtaatcaggcagcacgatgtgtacaccgctgcttggacaaatcattggttttgtatcttcatcaatcattttcctaatggaatcacagaacggtcctgccgcattaacaactacttttgcatagctgttaaattcttggcctgtcaaattgaaacatctcatcaaaaactgcacaaatcatgacagagcagaggtatactgaattgcacgaaattgctagtcgttttacctgtgagattgttacgaattcgggcaccaattattctcttagtagcatcatcagtaataagcgagacaacctcggcatggttgagaactgccgcaccagctaacgcggcagtacatgccaaacccacattcagacgtgaatcgttcatttgcccgtcataatacacaacagtacccctcaaattcttgtctttccctttccttgcaagagtggggaagagctcaatagactcttttgcagagtaatatctggacagatgcaataaccgtggtccagcaaccaagtcatacatcttcaaccccatccagaagtagataacttcgaaccaatcaaaacaaggtgtcatacagggcagagcatgacagagatgtggcgcattctcaatgagctgtttacgctcctcaagagcgtgaaatacaagcttcagctgtccataatcaagattgaaaacagctttctccaagtaacgaacccctaagtgtaaacgagcactaaatcaaatggtgtatcaagagccgcaaatgtaatacatatccttaacatgtatgttccttcaattattgaattaacaaacaaaaacacaacaatgagtggcaaaaaccaagtaactagctacaaattcttcaatataatttcgtcaattgaatggtcataccactcaattccaactagtaaactaagaaatggtttaatattaccagacaattcagagagcttcttatacgaaattcggaaatccacgccacatagaaaattcaaaaattaaaagtacctccatgaatcagctttgtagatcgcgaagaagtcccagaggagaaatcctcgcgctccaccaaaccaacacggaggccacgtgtaacagcgtcaagagcaactccagaaccggtggctccaccgccaatgacgagaacatcgagcggatcagaagcggtggctgcaatcagagcagactcttgagcagatcgagacggtacagaagcggtgggatcaccaagcctacgcctcaacgaatctagaatcggaccacctcctttgtcgctggaggcaaccgacggagacaggtagacagcgccaccggatgcagcggcaattacggcagctccggcagctaaacggcgaatggaagcgagagacatggaatttaggagagatttagagattgggtgaagaagattgcgttgggaagcgagagacgatcatgggaaagaagaagaagaaaatgattgcgaatgatatcaaaaaatggaaatagaaatctctgtaatggaaactatatcgttttaaattactgtttcaccctcacaactttccatacatagaaggtaagtgaagtggggatggtttggtcatttcatatgaatagagagttccgagttctaaggaatggtttgagtgggctgcaagagatttttcttataggctttgtaagtttttgattaaaaactgttttgtacaaacaatagtgtttttgattttttaagaaaaatagaagtaatttgtgcgagttaatttaataaactagactaacaaattataaaattgaaaataattatttcaaaatatggaggatttgcaagtgagtttttgctagttcttaaaatgtgcgaatcttgctctcttaagattggaaatgtttaggaatatagtcagtaagacataactaaatatttgatcattattagtattaaaagagttaagccatactaaatatttgttttaatgctattaccgtagagggtatttctctattgtaaataaactatattaattaaacttctgtataaagattacaaattaattatcagaaaaatgaatgaccgtaacgaaataaacgaaaaatacaaacttctctctgattaaaaaaacaaacgttagaaattgtgattatttattgtctcgatttaataagagattcttgaatttaggtgacaaatttaatcattaattaatcatccttttaactttatgtaatttgtccatcagacaaagagatggatatacgatgtcgtaatagccgcatcttcttctaatcaccttttttaagattagtttatgtaattaaaaaaggttaagtgtgacagtttgggagaattaccagaggatgaaggcgatctcagacatccatgatttgcctcttttgtcttctttaccttattcgtctctcattctttgaatcccctttccctttctctcaatcttcctcacttacatttcttatctcactccctctctcactttctccttcaatgttctctcctctgcgttttcacgaaacagagaaccttatcgttccgtcttcgtagacattgaaatcgatagagaggtgattcattactttgattcgcgatcggattctgatcattactctttttcaaaaatcgatagattcttctccgatttcgtaacaccgacacgaatttgtttttggctttttctggtttttgcaggtgttgatttgattaggtttaatattgattcggatgaagggaagagatggttactaatagctacatggatacgcgatcaaatttgacaagtgtgaatcgaggatccaatgtggatctcgaagatcgattccagagggagctcgaatctttgctccaacaacatcgtaatcagcaatcatttggccgagaacgagaacgagacattgatgttcacagaagcggaagcgcgcctcctaccgtggaaggattgttgagagctatggataatcagtacttgaacaataacaactctgatcatagagatgttgggaatattagcagtataaccactagcaatggcgttgagcttttatctgatgatgagttacgttggcaccctgagtatctctcttattactattcgaatgagcattcgaatccgaggttgcctcctccgttgttgtctagagaggattggagggttgctcagaggtttcacaacagtgagtctgtgtttgatcctgttggggaatggaggaagaaaacggttgaagtcgacaactcctcatcgctcttctcggttcagccaggggttccagttgagcaggcagagaatgatttgatggaactgaggaatgctgtagctcagggccgctctcagaaggtgcagcggctagatcaaggcagagaagacttgattggattatctggatattctgggcttggaccgagaaggaagagttttgctgatatacttcaggtaatgtatatacattgatgcttatgctgttgagtatatactggttgtgaggtgtctgaatagtccttggtttcttacttcattgagtggaacttttgcaggaaggacttgaacgggatgcagccttaggcagccaactctctcggcctgcaagctgcaacacttttcgggatatgaaagatgctgctgttttatcaaatttcagtgccggtggatttgacagcccattagcattccatgattcattacattctactgccaaaaacagtccaaatactatgcttggatccaccatgagttctccggtgccaagaaatagaactcctgactcacatctagtaggacgatctacggcctctggccttccccctattggtaccagggttggtcctgtcgagaagaagaatacttttggcacagccatccaaaactgtgaatcttacactgctgccgatgttgccgacacattgtccaggttgaacatgtcagagatgagtcaagtaaaagaaaaccatatgcagtcacagcttcaagtggaactggagaatcaatctgatgtcatgcgttacatacccaatggtcataagaaggctttgcggcaacaaaatacggcagaaactaaagatcacttgttttctgcaaattatggtggaatgagtgggtatggagcaagtcttggtgcttctacagtgggttcccatggacaggtcaacatccctaaacgaacctcctcttcagcgagtctctactcaacttcagaccattctagattaggaagcgtgggcttatctgatgtcaatattaggaatggaaatattaatggaacagacttctccacagctggtggttatatggcaaagaacaagttgaattcattagctgagcactattccgctgaaggtttctcaccccttcctctctctttctctctatatctctgtctctatctctatctctcactctcatatacacaaacagaacatcgtattgccttggattgaaccttttttttattccttatgattcaggctcacatttgactggggatggggatagacaaagcttgaacagattgataaatcaagttgcttctgagcttcactctccagttatggacccacattacagccagtatctgcatacggcatcttctactgctgccccaatcgatcattctcttattagaaacaatttcgggacttcaaacggagatacggctaacgaatacctcgcgatgttacttgctcaaaacaggcaacagctgggtaacctcaatgctgcaaattctagattttttgagagtccttcatatgatcttggcaacatgtatctaggaaaccatttgccttctccttccaagaattcaagaaatttccagaacatgcgtatgtcacaatctgcctcaatgatgaaagttcctttcggaggcttacagggatcatcccatgtagatattggcagtacggcagaagcatccttactagaggggtttaagaacaacaagacaaggtctttggagctttcagaaatagttggtcatgtgattgagttcaggtatttaccttaccttatctaatatccatcattcaaggttactagttcacttttgtttgaattttacatcacttgcagcatggatcagtacggaagtcgtttcattcaacagaaacttgagactgcaacggatgaggaaaagaatgcaatattccctgagatacttccttacggccgtactttaatgacagatgtctttggaaattatgtcattcaaaaggtacaagctgtagctttctaaatcacttcaacacatcgctagatgtgtcagtttactcatttgttgttctggttatgttctagttttttgaacatggtacaaccaagcagagaaaagaactcgctgaacaagtaacaggccacgttttggctctttctctacaaatgtacggctgcagggttatccaaaaggtgctcagtttaaagacattgttttgatccgattacttattattagtggtaagggttttacagacaaaggtgtttgacttttctgagcgtgtctctatcttgtttctgtgatatggatacaggcgttagaggtggttgaattggagcagcaagctcgaatggtgaaagagcttgatgggtctgtcatgaaatgcgttcatgaccagaacggtaatcatgtgatccagaagtgtatagagcgtcttcctcaggattggatacagttcatcatttcctcattctacggaaaagttttagctctttcaacacacccttatggatgccgtgtaatccaggttctcgatataatacatctcaccctataggttcttgatcataggatccaagttccaattttttttgtcaactgttaacgatacttatattctacttctttcgaatcgcatcagagggtactggagcatattgatgatatagaaacccaacggatcattatggaggaaatcatggattcagtctgtactctagcacaagatcaatacggaaattatgttatccaggtaagattctgaagcttaattgacgtttctgcttcatgaaaatggacacactgataaagattaatcctgtttccggctgtagcatatcatacaacatggtaaacctcatgaacggtcagaaattatcaataagcttgctggacagattgtgaagatgagtcagcaaaagtttgcttctaatgttgttgaaaagtgcctaacatttggcggtccagaggaacgtcaggttctagtgaatgagatgcttggttatactgatgaaaacgagcctcttcaggtctgcaatctaactccctcatgtctttctgcaatgtctcgaaaaaagtcccactaaagttggaacaatttgcaggcgatgatgaaggacccatttgggaactatgtagtgcagaaggttcttgaaacatgtgatgatcaaagtcttgcactcattctttctcgcatcaaagtacacttgaatgccttgaagagatacacatatgggaaacacatcgttgcccgggttgagaagcttatcactactggaggtaaacatttcttctctctgtacaacatcacagttcatgatcatgatcatgaatcactcttcttctttctgcagagagaagaatcggactctcgtcatctcttgccgcgaacaccactccataaccatctctgagtaagtaaaacctcaagcttcttaacttataacacaacctgagaagaggtacaagttgatgaccgagagctatttgtacagcctaactaagcaaagcatctcaagatggttcctgttatatatattttgcaaataatttgtaaataaaatagagggttttagatttaagtcagtaaataaatgtattttggatcccaactggcttaaatcaaaaatctccttttggttgtgtaaaaggtgaagccttgctgttttatttatgtaaagcaatggcttacttttaggtcttattcttcacattacgatgtaaatatcttgcggctttgctccccaagaattgctatattttttattttaaaagctctaaagttttacactgaacattttacacccaccaaaatgtagcaaatactgaatctgttaacagtttgaaaaactcgtcgatattcatttttagccaaagaccaaacccatcaaagacaaacatcaacatctataccaaaaactatgtaatgtattaaccaacactatctcatacaagtgaacctgcttgttcttcatccttgtggtgataatatgtaatgatcttatttccaaatgatatcgcccaagaagcgcagagcagggacacctctgatctccatatcaaccagcggagcctccatcagtgtcaaagcagagagttctgaatcctcccggatcatatcaagagcccgcatttggtcctgcatgttcatttttcaggttttagatgcatgttcataccacagaacaaaacaagaacagaagcacattgtggtttgaggagtaggcaagaccggtctttggtttaaagagactatcagttcatgagaagcttgtgtttgtgtttgtgtgtatacctttctcttaatagagcaaaatttgcaatctgaggaggatggcgggagaagctgattaacaatgagtcttttgacgggaacactttccttcttcaaggaagcacttaacctagaagactcgctgacagccattacctttatgagataaacaaaaagtaatgagcagtgagatgccaacttaagaccaacattggacggaagttctcagccaatggattttattcttgaagataggaggacatcaaggagatgcatgtggtagatattaccgttgggatagtgacaatgacgaattctgttgactctgtgtcacggaaaagctcgcgaactttaaccatcctttctcttagtttttccaatttgtcggcctgtgacatccataaagaaaattttaaccaaatgaaaacaggaatactatatcagccaatgtacaaagacttacagcatcaggccccttttcttctttcccaaaaactgatttgatcgctgaagtagccgaggttattttctgtctaagctgaagatgaagaaaatgtatttaagaagacaaactctgagaaagagattgaaactttggtaaacagactaaacataagagtttaaaggaaatggtttatcaacatttcttaccttcaagattttaccaatggatgcatccaagaaatcaggtaaagagagtagccttagcgtatgaccctgtaagtagtaacaaactctgtctttaatattttgcaatataaaaagggaagggaaattttaatcaagcttgctcaccgttggtgcagtatcaaatacgattctggtgaacatgttatactctggtgattccaagaattgaatgacctgtgaatacccttgacaaatcagtaagagacagtacatatcaagaccgaagaaacaaggatcacatagaatagcagaattccttagaaatggctatggcttcatccaatccaggaggcggtgtgtcgagcaattctccaagtttaagctcccccaacttcatcaaccaaaaaaccagagtcagtatcataagcagaacagtgagaggcaatcacatccatttgagacatctagattgagtatcagaaacattgaagctcacatggctaccacggaatatatatttggattggtagccattaacacgatttcaaacacattttagctgcaattgccaccaaaatgtacaaacaatgctacaacaaacctgttctacaagcattccaagtcccataccatccataaaatctttcaccccagttcctccattcatctgcgaggcactacgaaactcttccctagccttctcagggtttatctgttgcaaagctatcaattaaaactcaaaatttgagtgtaagatcatcaccacagaaaccaaaaaatgcaccaaaggtaattccaaacacatacttctaaagcaaataaaggagcttcgggtccttctacagggacaagcattcctccagtcaagtcctacaaaatcaacaaaaacaatagaaacaccaatcatatgtatatcttcatcaaacaaaaacaaagtcttcacctttttatagaatttcttcgtttacctgagcaaaagaatcgctcaaggaatgtgctggatctgtagatacaaccagagttgggtgtccattgttggcgaatctcacagctaaagaagcagcacaactagttttgcccactcctcctttcccaccgagcatgtaatactttcgtttcgtgccggagaccatctcatcgaattctgaaatcgtctccgttgggctagctactgatttcactgaaacccagaaatcaaaatcaaaatcaagagaagctaagctaatccaatcctgtttcagattaagaaaaaggaaaactttagaattcgaaccttgaagcgagtttctccggcgattatgtttaacggaaagagaaagaatcgccggcaagacagtggatgacgaggagagagttgttcgaggagagaaagagatgaaatcaattcctgagacgagacttgttgccgagaatcgggatttgcatagaggaggagaagataacagataggaagacagagtcgccatttttttcgtctgcttgctcttcacttctgtgctatacaaagaagcggtgccgagaaactatttatctccctgtttttgctcccaacaacactctttattaaataagtaactagtccccaaattcgtctctttttcccaaaatgaagatttcttctctaattttttgtatccaagcatgagattaaaacacgttttgaaactgcatacacaaattatgtgtccagaccaaaaactgtgtcttagactcaaattggtccaatcggcactataccaaccaacaccttcttagcaacaacactccattgcgactttttatcataatggatcaaaagaatagtaaaacgacactgcattcaacatacaaacaaacaacttataggttttcagatcttgacaatgttcattttcgtggaaatcaagaaatatataaaacacaaatcatgtaaagtagattaaaaagttggtaagaatcttggatgtagatctatcgaaaaagattttcaacagattgaaaccggagctccgttccactccttgagacattccaacaacggatcaataagttttccatcagaaatcgctaagaacactttatcaaactcctctcctggcgaccgaacattctctccagtaagcagttcagtatttagctcatcgcggacaaaccgatacaatggataagaccgacattccttaatccggttagctatagccgatgttccttcctcgtattcaacccggacgcgttctacttctttagggagaagcagtttcagctcggcttcaaaagctccgattttgtggaaaaccgatgtcgcggaattggcctcgcgttctggatccgctaaagcgtggtctacaagaatgtgtctaagtttctgcattagcgggtaagtgaggctgcagggatcgtctgcgtatgagaacacgtactctcggtcaaccacttggaggacatcacgttctgtgaaccttgacggatgtagctccccgttggcaccaacggttaagacccgtttcgccacctgactcactgctgatttaaccgccttcttcagattctcttcaagatgtcttagatcaacggcttggcaaagcgcgactaagtaggttgtggacattagcttgaggatatccactgcttctgcagttttcctgctagagattagccctagggaattaacgtcttggttatgctgctctgcgctttggacatggttggtcacgggattagccaggaactgaagctcggagcaataagaagccatggctatttccgcgcctttaaacccgtaatcaagactagggtttctcccaccagatagattagaaggcaaaccattgttgtagaaatcgttcactagttcagaaaactgcgcaaacatgagtttcccaatggaagcaatggctagacgggaattatccatggcaacaccgatcggtgtcccttggaaatttccaccgtgcaacgccttgttcctcgacacatctatcaaagggttatcattaacagagttgatctcacgctcaatcattttagtagccgctctgatcacttcaatctgcggcccaagccattgtggtgacgtacgtaaagcgtacctgcaacttaaaaggaaacactactcagctaatataatcatcacacacgaaaacatcaacttcaacacacaatatcagtttacttgaagaacaagatacattaccgatcttgtttaggtttttgaagaggatccatttcgtggagaagttgagcttctttaacgtaagagcttccgtctaatatatgttccataattgcggcggcttcgatctgaccgggatggtgcttgagcttatgcgtaagatgatctgtaaactccggtttcccttgcataacctctgcgaacatggcagacataacttccgataaaacagccaaaatatttgcatcgaacaaaaccgttgaggccaaacccgatccaaccgctgtcccgttcacaagtgctagtccttccttaggctgcagctcgaaaaaggacgatactccggcgagcttaaaggcctcagaggcagtgagagtctcaccagagggacccacggctttggagttgggacggccagtgagaagtccggcgatgtaagagagaggaacaaggtcaccggaggcggtgatggtgccacggagagggaggcacggagtgatttcgtggttgagaagctttgtaattgcttcgagaatctcgaagcgtataccggagtagccttggaggagagtgttgacacggacgagcattgccgctcttgttgtcggctttggcaacgtgtgtgacgtgtccccggcgccggggccaaatattccggcattcaagaacctgctcgagtcattaattgcacgttaccgttaatttcgtccttgacaaatattaattgttgaaaatgaccggcttaaaattatggtgtatgaagaatataattaatagcgtccacgactgttatgtgtaacttaatttcacctaattattattgccaaacaccaacttattcagctaaatagtgctgccaaaatattagtcacctaagtattaggtcaaatcagtaccaaaaattgtgaagtaaaaaaaaagtgccaaaagtaaggaaaatggttaggcgaaaaagagatcaccgataacaaacttttaacttgtttcaccattttcatacccgaatcaaaatcttcctttttctattaataagtttatatatctaaaatttcttcactagtttcaattttcaacgcatttaatttcagtttacaataattcttgaaaaaaatcgttgctataattacttcgttacctatcgaaactttatgaattattatgagtagtactactactatcaagtttctaagctttgttttactagccagtagggcttggcaaaatattcgttcgatctgcttcgattcggtatttgatttgattcaaaaaatccgaatatccgtaagattttggagcaaagcaaatagaaaaatgtagtattcataaaaaccgaatcaaataacaaatattgtttaaaaaaaaatcgaatatccgcttcgatccgtatctttttatatatattagaaaatatagttatatctatatataaatatcataaatagtttatgtattgttgtcattttatgtttttatgttaagatgtttgtttgatcaattttttttcatgttatgttttgatcaatggcattaaaaactatcgggttttagtttttggaattagtttgataacagtttgttgaccggtgataccaacaacggttatgtttggtatttagaacttattttgaaagcatgttaaaaaaaaactttgaatatctgatatggttatatagtataaatatctttttaaatatttaaatgtatcaaagcggataaacgcaaatatccgcaaatatcacaaaaaattccggatattcgaaatatcggatatccggaaatttttgaagcaaagcaaatcacaaaatcaagtattcgtttaaaacgaatcgaataacaaatatcacaattttttcggatatccgcttcgtgtccagacctactagccagtctaaaaatatagtcaatgcatttaattttaagacaaaaacgaaaaaaacagtagttaatttgttataacttaacctaataaggtatcgacaaaaaaaactgacctaataagctcattttgaagtgcaccgccttgtttggttcttctatgggaagttgcaccaaaccctgtggtaactccataactgtccgttcctcggttcatgctctccatcacccattcgctactcgccttgactccggcacgagcctcctccgctagctccaccgtagatcctcctcctcctctagccacggcggctacttgaccaatcgtcaaagtctcacctcctaacttcaccgcctctttcctatactctttcaccattcgtttcacctcatccaggtggctccctttcaaagcttcggccgtcgcgttccagttcaacggatcgcccgagacggcggtgatgtgattgttttgattgcatagctccatgcgcgccgactcggttaaagaaaccggtttttttttatccgacccggttttcaaaacgatatatacggtcgtcttaacttcttttctctatatgcgatgatgttattatacaaaacaaaacactacaaatgtgtgtatgtctctacttacacgttgcgcttacaagaactattgaaatttgtttttgcgattataaaaaaagtaaagggagaaataaaaaggaaatttaatagcaaataaatttcctgagagaaaggtgagcgacatcggaggttttaaatagacagacgcaaagagttggtgagaacgaacgagtcgggttagttgaaatgtgtccacaaccgtcagatgttaattgcaatatggacggacaatatagtcaccacgtgtcttccatgtatatgagtcttcttttacttgtcgagctcgagcgtcaggtattttgccagagatagggacatgatgtttggtctggtgtgaggaagaccacaaatccatatttaacatttttttttacaaagtattaattttcttaatcatataaaactttattttttcgtaatcaactttctttgcatgaaatggttctgacatgtagtttcagaaaacttagtaattccattaatatatagctcctataccaaatcttatccagatcgtataattgatagaatgtcatttattactaccaccaggtaggtatctttttatagaatctgaatacgttaggtctttttgtgtgtctataactcattcgattgttgcattcacacgactactatttctgtcgaacggtcatatacctaaaaaagctaatacaagtatacaactcatttattatctgcattaattgtgtgtttgttgctgatccaaggttcgtcctaattacattagacattttaggcaacacaccggtcgatctttttaatttatgttgatttttatctatttatgaattgatttaaataaacacttttaattaagtttataaaaaaaggtcttcatttaccgttatttataattaaaatgggtaaaagtataactccatctaaatcggctttaatttggaatatttttggacggagatattagagaacttgaaactacacaattggaaatttggaatccaaaacatggagttaagtggacaacactcaaaactacaaagacatcatgaatttagcctcgtgactaatgatttatacataatcgacgattcatatacggaagatgagaaaaattagaatattgaaaatgggaatggaagttaagtacgtataattctcctatagatctggttaaaagcttaccaaacacataaactaaatgcatgcaaatattaaagaatttgataatggatagagttggtaagatttgggtaaagtcttttccgctcctcctcttcaccaaccaaagtcatacctctcaccaatcttatggtagggtttgtataataattattatctaaatcatggaattttagatattaatttatacatctcttaaaaacaaattaagataaataccaaccctctcgaatgatttatataaaaggtgttcttatatatataacggtaaactggtttacgggttgatggactaacttcagttgtttgagttctttttaacgaagaaaatttcatttgtttgaattatcacttcttcatattctagctggtttagagattacgatccaaagagtgtgtatgcagaaaatactctagatacaaaattggcatgtttatgatgcatttatgcagcttttcaaactagttcaggattctcacatgtaacttttactttcttctatatatattcttctggatataactgaaccaagaatatatgtacttaaaaaaaaaacttgatgacttcaaaattttattgttacaaaaaatgatgatttgatcattactttgaatagaagatgaaaaatgagcatataggtgacatggtccaatctctagcaaagattgtagatttccattttatccttgtggtaggtaaacttacaccaatgatgcgcaaacttgtctttttcgtttattttattatgtctttattaatttctgcatgaaagttattagtttctcagaaatcacttttcctttctatgcgaagtaatcttaatttactagaaaccatgcatgtaaaagcgtttctgtatatatattggaaccattttcctttacccatagaaatctttagctcttaaaaattttcatatcttgaacagttgcactgcttcaaatgcttgtggaccggcgatagaacattacaaattaatctcttttactcatataacaatgagatactactctgtttcctttgttaagaagtaaacattaatcaatctttaaaccgttgccttaattagcggggttaatatataggtcagtggcatgatgctgaaaatggtatgatcaactagaaataccatctcattaattcaacaatgtatagtaccttatgaagaaaaagtgatacaaatctactgtaaaactcttgttcaagcgtgcctccagtcgcacttctggacaaaacaactttataacccataatcccaatcgaaacttgaaggtatggttgcgagtaagagattagaagaggaagacactcaagggctttgaaggttcttgagatcttcttctttagcgtaccaagctggtatgatcttggaaaggtgagggtaaagatctttgtaagagtttcttatagttccttccgcgactccagttgccactgatatatctgcaggttcaaaatttcaattacagtttccgtgatgttaggctgttttcagttcacaaaatgtgaatggaacatacctcgaagaggcttcttctcatcagagagctgtgttatgatgtatataaccgctgctgcaatcgatatgggactcctcctgcaacagcttaaaaagcttcatgtaaatggctgtgaaccgatacatccagaacacagaagcagtaagacaacaatggtcaatggtgtaaccttatatcaaattcttctgacttttgcacagactcttgagccgctttcacggtttggttggtcataccaagattggagcaaaaacgtctctggaaatttaccaatcaagttgatgaaaaccgtggatacatgtaccaagaagcactgagttaagaactcaccataaaatctccagcatgtatagtacccatttcaaccaattgtccggtttccagccccaactgtttgactatgtactcttttgcacgaccaatctccttcttagtagctccattggcaacagagcatatttctacacaaaattggcgagggttaagaaaacgagaatggtgaatgattaaaaaacagaaatacaaaagactctataactgttctgtacccttgaccgtccgtggtttgtcttcttgccggcaagcaatgtataaacaagcagccaaaagagcatcctgatttcttcctctacttgacttctgatcctctacccttttataaatctcattcgctcggtccttcaatagaaaagcaaaaaatttggtaagctagattccaagaaaccatcagcaacttaacaaaacagaaagctttacaagtagaagccataagattgcaaagagaaagagagtaagtaccttgatggtcgcaacaagtcccaacctggagcaacaacaaggttcatagaattagtaaatggcatttgtcaaacaacctaacttagagtaaaaacagctcacaataacatttcataacgcattgaaccaattattataccacggataatgagcaagaatcaagttttctcatttcccagatatctaaaaatagatagtttctattttcagtgacatacatttgcttatacccatcataagattcatctagaattctaggtattacaattcttctacatactaaaattctcaaaattgctgaaattgagcttcaagaaaacactgaattgtagaaattgggcttaaaaaacaaaccctagaatcgaaaaacgaacctatcagccatggtagcgatagtcttgaaagcaacaataaggccacgatcaggattagatccacgattctgccatcgaccaagagaagaagagaggaaatcgccagaggatccattaggtttagaaatgacagtagtgagaccaccatctgctaaaagaggattcgtcggaccaccgacacgaacaggatcattatcaccggactcattagcgaaagtacgccactcagaagtttcatcgattgagtgagattcaagcacgagaccacactctgaacaaactgtatctccggcggaatggtcaaacacaacctccgtgtgcctcttacagtccgaacaaaacgcgtcactcatagcttctctttctcttctcacaagaaaaccccttttcactaattggactttgattactaaagattgttactttcttcttcttcgtctttttcctcgtcgcgccttgagcttacttactttttcaacgatttgttttcttctcttttctttctttttcccgaaagatcaaaatttgcgacgataccgaactcggcagtatatcaaccgtccacgtgtctaatgaggatcgacggctaatatgatagacatgtttttgtttgttcagacttcttcagacccatctatctataatagggctctgaaacaaacccggcccaacgttttgaagccctatattgttttgggtctctaaatgattctttttacttttatgttcatgcacatcatccatacggccataccacatgagattatcacacatgggtcataagtcataacacaccaaacagacacagtatatgatacacaactttggataaaaataaacatggacataactaggcaaataccaattagcaatctcaatattgtaagacatatatcgcatatcatgctctcaaaataccaattaggaacggattttaggaagtgaaataaataatatccaggctttccacaagacttattatataataatgattgacttttatgaactttcttaaactaaccctaagaactcaagttttgttttcttatgaattctataatataaaaggtataattatgtcatatttaattaatacaatttatttatacagcaaactcaaaattgacatatgaactaacacacatgtaagcaaatgattaagacaagtgtacgtattaaacagatgcactatttttattttggtcgatacccatgaccatgaggatatctcttgtttctttgtatttttaaaacatcacattttaattattaagagaagaaagttgtttcgtttcgtagactataaaactcaacaaagaaaatttccggtcatctgaatgtattatgcgttactcatgatcgtcaaaaagtggatatggttaaattcgcaatccctataaagcaaagtctcggtctccaatgatcatctttgcgtacttatattgcagttcatcgatcattttttccaaaaaaaatcataattaattgtctcaacatgtaacctaaaaagattacacgagggcaccaaaatatggacgtcaataatttagtgtcaaaaactttggtaaaatattggcatcaccatcattatttctcattctgtttaatgtatatgacagtttatatatataacccttcttaatcaatgaattttatagatcttattagagacttagacctttacatctcttcgaacttggtctaaaagtgggtcacaatactttatattgacgttagaaatttctacataacttgaactatacatgaatttagattatacgatagaagataatatattcctaatctgctgaacatgattaatcaatatcatattcttcttttttatttttcattcttaatattctagaattttcgcccaccagtttttctctttatgaaattcttatttaagtattttttcgcctaccaacttttttattttcccttgggtctatattttgtattaaacgtgttatatatcaaataatagtgcatcagaaggtggcttttggcaagcaaaaaaaaaaaaattaatactagatgttgtttgtagttattgatataatgacatgtttgtatgtatttgacctttaagaacgcctccataagctatttgatcatttcttccttttcccatgacattctccgcggtttttataatattaaaatgtccaacaatttgaaattctttattcttaattggtcatccctatgagtagattggtctcatcaattatttataccaatatataattttaatcatactataaaacaaatttttgtttcaatggcatttgtgctatatatgacaacttaattttggattttattgtgttgaaccataaactagtcttggatcatgcagtctttcactgattttttaaaattgttttatttccggttcaacctataaaattgttaagtctaaaataaagatcacaatgagctggacctcagataacataagactccagcgcgccagaaataatacattgaattttgtttgagtcatcatatacactaacatagaaaatatttggtgtccaataacttgatttaacttaaagcagtttctcttttcatgctgattaagacataaattccacttaaggaagttgaacatgtcactgataggatgatttcaactaatcacgagtataaagtaagacgaataattagttattttaccaaacatgatttaaggataaaggaatcttgtgatgcaagaaacatatataagcctaaaagatgaatgatgggtttggcctaagtccctttctcgttctcccacacgtctcctcattcccctttctaagaagatcgaatacatcccaagacttagtaactttctctctcttaaccaacaataccaaattacgtctctctcttccaaagaatagtatgcgaacgtctctctctaaataaatactctgatttcaaagctaaaacttacaacaacacccacaaaacttctctctcttatctcgtctacttgatctctctactctctttcctctctagctacttctctcccttacgtctccaaggagatagattgacaaattctgttcacaaaggaaaaaagttcctctgcatacgtctctctctctatgttcttcatttatatgacttgaataacaagtaaaggatgaggcagaatctgaaaaaagtagcacagatcaaagtagacgaatctaagaagctatttccttatgtcttccgggttaaaacttcttgtgggaattgcgctaagagatcgaagcctaagcttatctatcttcttatcttctctcttatctcaagttgctttgtctttgctcctcagctcctctgtttcccttacccctctgctctgtttctcatcggtatggttctagacttctagtacaagaattcccttctgtcctcgtttgttgtttgttgtgttgttgtcctaaactactttcacttcatatattttggcagattcttcaattaaagagattgaaaatcgggtttccgaaagcaatatagaatcacctaagacgtcacaaaaaggttagtacttaatcctctgtttcttactattcttgaaacatcaagcaagtggatttctcagtaattattctgtcgtaattatgcagaagagagcatatcttgtgacagaaccggctatcgttcagacatctgtttcatgaaaggcgatatcagaacacactctccttcctcctccatctttctctacacctcgaatgatctcaccaccgatcaggtcttgcaagaaaaaatcaaaccatacaccagaaaatgggaaactagtataatggaaaccatccctgagctcaaacttgtgacaaaagatatgaagctttttggcgacaagcgtaaatgcgaagtgatccatgaagtaccggccgtgctattctctaccggaggatataccggaaacctctatcatgagttcaacgacgggcttattcctttgtatataacatctaaacgtttcaacaaaaaggttgtctttgtgattgctgagtatcacaagtggtgggagatgaagtatggagatgttctctctcagctctctgattactctcttatcgacttcaacaaagacaagagaactcactgcttcaaggaagctattgttggtcttagaatccatggtgagttaaccgtcgatccttctcagatgcaagatgatggaacaaccatcaatgagttcagaaatgtacttgatcgagcttatagaccacgaatcaacagactggacaggctagaggagcaacgattccacgcaagactagcacagagaagaaaggctaagaggccaaaactagcgttgttttcaagaaccgggtctcgagggataacaaacgaggacctgatggtgaaaatggctcagaggatcgggtttgacatcgaggttttgagacctgacagaacaacggaactggcaaagatttacagagtgttaaactcaagcaaagtcatggttggggtacatggagcagccatgacccattttctgttcatgaaacctggaagtatctttattcagatcattccactgggaacagattgggcagcagagacatattatggagaaccggcaaagaagctcggtctagactacaatggttataagattcttccaagagagagctcattgtatgaaaaatatgataaagatgatccaattctaaaagatccaaacagcatcactaagaaaggatggcaattcacaaaggggatatacctgaacgaccagaaagtgaggttagatctccatagattcaagaagcttttgattgatgcgtatgcaaaatcgattaggtgacctgaaatgagttttgagagttctttttattgttgctgtatagtctgcataaactacagaaattacagagttctttttgtaaagatttaaatgaaaccataaatgaattcaatgtttcagagacactaacaacaaaactgttaaaagaatggcttaaacaagagccatctatgttacagtcagaacactctaaagttgagttcttatttactcaggaagaagaaaaacagtttcatcctaatgaatggaaactgaagtgtagatgctgaaaatactttcaactagatactatgcttcgagccaaagcaagaaaacgtgttattcttcaatagctttttatgcccatttcttccctatctttgatgctgagcgcataggtggaggtgtcttggcatttcttgaatcagttacatttacacctacaaaagcaaagtcttagttattgaatttgttcagacgaaaaggcgtaaagacgtgatctttcttaccattctcaattggttttcctcctattgaggatctacgtgatctttcttgccctggtggcattacacctgtgagtgactgccgtcgcatagtcttagcgttgcttgtgtccggggactttatatgactaaaattattagcaactccaagtggtgaccgtggatctgcaggaatgttctctttcctgtgataacaaaaacgttttcaataaactggtaaacgcatcatttaacatgcagattgaaacaatataaagtctttgtcatacctcttctctgaaccattgatcagctttccaattgtcctcagggacttccgtatatgtgaaccttttccatttgtcttagaatcaacagaaatcatctgtatgtcgtttctggaagctcctttaactggtgtttgtaatagctggagttgaggaatgcttgttctgccatctactttcacggctcggttttgataagagcttagaggactccgtggatttttgagctggtgcacttccatggtgggatctcctttaccgttttcttcgtttttacaggacattggaccctccagactcaatatttgtgcacgacgggaggctaaaggtgatttaatacctctcctgtcttcaaggtttgcctttgtgctgctacagttttcgatgcttaaccttctgagacgtggaggagttctctctgttgttgcgattggcctgctgaaaggtgattttatctcctttgatccgttggaaacattattccattcttcggtacccaaagccctcttcaggttttcaatctgaaagaagaacacattgtttgttggctcacaagatataaaataaactagaaacgaattatgttactgtttagcttcttatcaaggattagtctctacaaacctgctccttgagatgcataacctctctagtctctttgtgtgcacgagcagctccaagttcgactgttgaaactctttgtgcgaatttcaaagtactgattgtttccccaaaggagtcttcctcaggactcaaatgagcaaacattaatgttttggcttgtcctcctgaaatgaagacatgacagaaattcagtgaatattttttgttcacaacccagcgaaggaaggattcttgagctaagatattagtacctaatgagtcttgaagtagaagagtcaacttgctgtttcggtatgggatgtgagaattcttctgagccaatgcagaaatgacatctccgagacaagaaagagatttgttgatatattgtgcttctttgagtctgtctccagtaacctctgatttatctactctctcgctccctgcaagatccaccagatgcaagcaacttcgaagggttcccccagatgtatctttcccacgtacgtgcaccataaaaatactacaaaaaaaataaaaaataaaaaaattagatcacaaagcagtaattccttaattctgaaagtgaagttttgagttatgtacctgtgtgaccgactacttcgattattcatggacgtggaactaactgcacgattcacttcaccagcctccatcagctgaaggacatccttggtagaattcacagaatgcattgtagcatctggaagactcaacccatcatcatcgctggaacaagttcgtatatctaatgtgcacatatagtcaagaagaacactaggtcgattcttgtgaaatagatgaagcagaagttcaaggtaatttaaattgaagtttcagcagccatgaaaggatatctggtgcaggaggaattttctgcaagaaggtctcggacttgctcattgtagatttcgaccatttggacatatatctcatacgtcatcatatcctttcttctatcacatatcagaaagagatcactgagagctagatagtttattcccatttcagtagctgatctgcctggaggaccactctgcatcaaaaagaataaaatgataagtaactgtatatgtagaaggcaagaagatggtctagtctgtagaaaaattctcaccattgtgtatgtcttccctgatcccgtttgaccataagcgaaaatgcagacattgtaaccatccatcactgatctgattaatggttgtgtttctctgaatacatcatctgtaaacatgggatgaagagtttaaaagatatcttactagaacaaacaagtgtgagacttaagcttatacaccctcagagacattgcaagcttataccttgagttgctgttggaccaaatacttgattaaattgaaacgtttttctggcatctttataaggcttcgatggatccaaaacgaataaagagccatcttttcctatataatctataactccgtccatttcactattgaagatcggtctaactctgcagtacactcttatatttcctgcagatttaagacatggtattacgacttccattaaaagagcaaaacttgtgttaactgttttctacctttaagatcttgcaccatgttatataattttcgattctcttccaccactttgtaatatccctgagctgctgatgacatctcttgcatctgattccctgtgtaacgcagtaaattgcatttgaaagtagaaaatgtgattgtaattaaagatgaaatgttgacatttttctccggaggtaatacaaatgaaatctcagaaaccaaactaacctagttccatcaaatctctttgcaaataaacctgaaattccttaaaatcctgcttcgtttttataaacaagttcttgagaacctgaacaagagaagcatacctggattagaataaaaagtaatgcgtaggatttctgatcaacttgttaaatataaataacatcttggataaaaaagaacatgccagacaaataaggaactaaagtcaagagaggcatgccataagtatttttccaaatgagtagtagaacttcaaaatgacagattaaatgcaaacgtaccgctagctccttttcttgggttttcagtaaacgcttatggttgcactttgtcttgtgtgagagacttctgctggactgagcaaaatatatccaaaatttgttagtgtaaactaagatatgaagcgcttttaaacagttgtttggaaggaaaaaacacatggaaagggctgatgaaaagaagatatgtattgttcttgttcatgtgcagttctaaggtaagagtttcgtgtcacatgtaaagagaaagaaaaaggcatacttggtcttcttcatggacaggtaactcctccaacggcatggattttaagtctgatggtttcaaagttccttcgctaagtaaattcttgaatactgattgaagctgcagataaatatagggcacagatatcatcagtgtcagcaatctatcaaaagcgtattgaagtattatacttgcctaataagaacagatcatcagtaggcacatcgattttctatgttctaaacttgtatccaacacaaaacagtatcagcaacaagtctaattttaaatagcaaagccagaaattggctactgtgatagtgaatacaaggggctctattcattatatatagcaagttatattccatccagcatttttacctctgggaatcttgagaggattttctcgaagtttgctctagaattctgcaattcaaagagttaaagcaatttaaccaagcggatctgactgttacagtctaaatacttgaacaaatgttacagaacatttcaacttacctcactgccattctctaatgaaacaagattctcatcaatattttccttggaactgaaaatgtgatcggcaaacaacttggctatccctacaagtatccaatccaaatgcagtaagatgggtgttaaaacaaattacatttaacttatatcaactataggatataaagtatccttaacataagaaatggatgaagagtcgagaagaagcatggatcaaacctttgagtttatcagattcaccatcagtgcaatcgtttctctcacggactgaggacatatccaaatgcctagacgttttggaagcacttagagtagggtgaatcttagtcgcagagagctgaaacgtcggcgttttgacgtgcttgtataacccattaccattgctcggtaacttgcactcatggtatgccttaagtcccaaaatgcaatccacaaccttggtcactgatccagactctagattatcctgtcacattacacctcatactcaattatccatagctcacaataagaaaaaaaatctcgaaatgtgttaccttttcaagatcagaagcttcaaatccaggaagcctcaatgtttctaaagccacaagaaaattccgaacattctcgaaatattgataagccggtggaagctgatactctccgttcaaatacgagtagttctccacaacctttaagtaaacaatgtaagtctcatgaaccattccaactttctaaggaatctgaagaactgaatcaaaacaagagagtacctttgaaacagctcctgggtggatcttgttgattgcattacaaagtatcataccatttctcaagcaagaaatgaactccttctccgatggctgattcggtatacccagttgacccactacagatttaagccattgcacggcttgaaacctcctcgccgctgcaacagtaaacaaatcagaaacagaacttttccgatcttcttttcgaatcaaacagagaaatgttacgaacctgcttcttcggctcttctagaagccagattaaattcgtgcaacccagttgtcattagagtccaaattctcgtttatcttcctgaaaacgaaaaaagttgactaatcgatcaaaatcaatgcacatcagaatcagccaaggaaagaaatcgaagttaccaattatggactctgtttctttccttctgggcaacagatcaaaaccctagaaaatgtgaagagagtctcgtctggtcttcttcttcttctctgattctggttctttgaatcgcttagaatgttttctttataattcgaagctttctttcctttgttttctttgtgttttctggttcgggtatttaggttcggatcctaacctaagcggacaaaattgtaacgttaactcttttactgtgtttgaattcaaatatctagtgaactaatcttatccgtccgattcgcatatgtgtcaacggcttatgatttctcgaagatggtaatgcaaagcagttttaataatcttttaattacattggatttcaaatttgttagttatgctaattttgggaaataaatatcatctttaactaatcatcacgattttcatagtttataccgcatcctagatttctttacatttgttaaaaaatttagaaagagatagaaagtattaaagggtttttaaggtttttgtttttgttaaatggtttataaggggttcaccattcaccaatcatttgtattttgtagagaattgtagaggatttattcctattaaacgtcattaaagatatttttccaaaaatgtaacggtttttttcttttgattttttttagctatatgggattgtcttcttctttttctactgaaattcttaaaacaagataaataaaattttttttgttaaaacagaataaataatattttttcatatttgtaaaagtagtgatactaacatttattgatataactgatgatgagacaaagaaaacttcttctaaccaatacaaaaagaccattttttattatagacttcaataacgaatagtactaaattaatgcattttgtgtcgctcatatataaattattgtgaaaaaatagctccactaaaaagtgatgattagtgatcaaaatgtcttccatatgtttttagaattgaatttttcatgccacatttacctttcccatgatatttttttctaaattcaccagattatttatattttctttgctatctaaaaaatacttaaaaaaataaatttaagtttaaaatatctatgagtaagttttaaaagatggttttagtttatgactcatagaatgttttgagttttgagacattgaaaaactttgtccaaagagatctagagttgcatattcaaattagtcttgctcagccgttggattaaaaaattctttacctaaatcaacggttcaaatttatttaacgtatcgcgtcaattgcacgcgaccctacatgtgcgatattttttataaaaaataattaaaagtcagatcgtaagagttctatgctttaataacgggaaaatctattacattatcactttaattgtatctaaaaacaacatttatgttaaatgttaatgttaatatgaatttcaaactaattgtagtagaataacaagaaaatatggatgagtgatgaaagaaattactcatttttctttaattgagtcaaaaaatttataaataatgcgaaccatgaaaatttgcattttcaccaactattaagatacactagatcatctgtgctaaatattatattttaataaatataaattttaattatttaatcatttactcatgcaatgaacgactactgttaatattaaaatacattttctagcaacaatcttcgtcctaaaccattgcgtacgtaatagatttgattttggcttcttcatacccatttggattacttggcctcgaaacttaagaaaatcgagtttcactttttgaaacacaaatgctgtcgttactgtaattggaaatattgggctcttagtccattcaaacttattccacaagattggttactaaggttttgctcatatgaaaagaagacccacgtctgaatcttaccggagaaagataaaaagacaacaaataaaatatccaaaagctcacaaagaaaatagagttagaaaacaatctctttggtcaacaaaaaaaaaaaaaaacaatcactcaagcgacgaggaatggtaaaacagtgagcatgaagttctcgtaattgaaaatagctgagcctgataacgccgtatccttctccttgaacttctcggtgagcccctgcgattattttttatcaaaacataacatacattagacacattgtaaaggaacaatcttgaataattcaaatggtagaattgcatgagaatgtgacgacccaagccatgaaaatagcatacctttacagtcaaacaacacctacatcaatggaaaataaaccagaatcagtgatgaattatacttgttacagagtaagaaaaggtaagggggttgaaacgaatgaacatactcgatgaaattgtcatattcgatagccctgttcctgcctccgcttttgtcaaactttgaaaccagcagatccaaaatcacaggagaaacagaaaacccaaggctcatgagtgcatctctcagctcgtttgtatctattctaccgcttctgtccttatcaaacctctcaaagatagactgaaaccaattccaaagaagcaacaccaaacaaaacccacatgagctaacaactcccaacattcttgaccaacaattatcatcaaaccattagaaaaacctttgaacttaccctccaattctgaagactaaagaaaagtgaagtaaactcttttggtcctgcaatttggagttcttaaatcagtatatactcaaaaaccaggctagcagggagaataattaaaaatttgactttttttaatactttcaacttgaattaataataatacaacttgaggatttggcaccaacgatcatcaaagtcaaaccaaacaatatgcagaggaaaattcaacaagataattccaaaaactcaaacctagattgttgaagcaagacaatcttctagttctagaaagcgcaaaaaaggaaagacctagaacaatcaatttgagatcagtttgaaagaaagaagaaactgaccaatcttcctgacattgctgttggtgaatagatacataaggagatgaacagttcttatgctgaagctctgattatacgaagatagagctccttgaagctccttatcatcgatgaatccactattgtcccgatccgcagcttggaaacaagccacaatgttcggatctgttccgggaggaaacgccgacggaaccagagacgcaaacggacttccataagaagcttgcggaggaggagctccgtaacctcctccatgtccagactgctgcggcgctcctccgtaacctcctccatgtccagactgctgcggcgctcctccgtaaccaccgtagtcggaaggtccagacgatggatgagcaccgtagccaccgggagatggagatccgtaggaggcgccgtgaggtttctctttgtgcggcttattatggtctcctggaagagacgcgtacggtgctgacggtggtgcaccgtaaggagcgggctgagctccgtagggaactgcgtacggtgaggaggctgatgatccgtacggaggaggaggattgctgccggatgatccgtacggaggagggttattgccggttgatccgtacggtggctgaggaggtggtggattaccgccgtaaccgtaaccttggcttgatggaggataaccagacatggtgagaagaagaagagaagctttcagagagatcaacgaagaagaaagtgaaaaaattagtttgcgaaatttggaattatgatataatgaagaaggaaattagctaagtcagatattttggggtttggattattacgatgaagccattagttaagaacgaattagctctgtacgcgttgaggggtgaaatcgtaattttaagatgatatacgcggctgacgcgtgacgactgacgcgtcaattaaaatgaacgaaacggctgaggcccattaatgaaatgaaatggcagacgaaaaaacaagaatgtattgagagccttgaggcccagtatattagtttttttcttttggtaggaggcccagtatattagttaattatccaaataattcatatctcgcacacatttttctttatatcatgaaaagtgaaaactaagagaaacgttaaaacttctaatttcgtgatacatgccatcaaatagccactaacaatctcaaaatcttatataaaccaaacatgaaccaacaacaagtccaaaataaataaaccaacaaggcaaaaagagactcccaatagaatacgtaagttgtttttagtattatacatttttgttaataaaccaaaatgtacagacaaaatctaacaagttttcatgattttacgaatcacaagttttagatataaagtataatataaagaagttctgagacattggcctagtcctactaataaagaataaatctagacttttggaccattttttggtaaagagccgaattttttacctaatctgggggaaaaagattttgtttattaaattttattttcctctttgattatcataataatcaatgtaacacaaatacaacagttttatacataataatttcaaaactcctaaataagattagtcaattcaacttttctcaaatatactttccaatttaaaaatacattaattagtcaactgcacattaattaatatatagatttcaacttaataatacattaattatcccaaacaaataatttgtcagttcaacatatatttatatatctttaaaaaaattaaaaccttcgtttttttgtaatccatctgagcgcttcaagaatgtcgtcccatgctcgaggtaaggagctaattcctctcctgtctttctcccaccaaaaaaaacaaccaaatctctcgatctcatcgacgacgaagatgaacaagaagaacccagatcagaaatccgacatgtcgtcttcttcatcttctccgaagaaacaaaccctcttcatatcatccttaatcattctctggtacacctccaacatcggtgttcttctcctcaacaagttcctcctctccaattacggattcaaattccctattttcctcacaatgtgtcacatgtccgcttgcgctatcctcagctacgtctccatcgtcttcctcaagctcgtccctctccaatacctcaaatctcgttctcagtttctcaaggttgcgactctcagcattgtcttttgtgcctctgtcgtcggtggaaacatctcccttcgttatctccctgtctcctttaatcaagccgttggtgctacgacgccgtttttcactgcactcttcgcttatatcatgacctttaagagagaagcttgggtcacttatggcgctctcgtccccgttgttaccggtgtcgttatcgccagtggggtacgtctttttctctacaattctcgtaatgaaaacgtctttggttgttgattttgattctgccgattttgaaatatgtgttcttttacctgtagattgtgatgtctgatttgttgttagtttagagccattcaagatgattgtttgtgttccacgtatgtgtctgaaacccaaaataggtttgcttagtttcatgaatgtgattacattcagtatacaaattcaattttccctgtcaagtacaaatttgagtcctctgtggctgtattatctacttatctaaagcttcatcctttaatgcgttattccagtcatgtgttatctaaagcttcagactttcttcttgtaactattgccattcttacattctacattgttctgtgaattatttgatctctttgctaggccttagctattgaatgttttgtttgttgattatgggatttctgtattgaatgatcctgctctgggtctgcctttgtggttacagggtgaaccaggttttcactggtttggattcattatgtgcattagtgctactgcagcaagagcttttaaatctgttcttcaaggcatcttactttcttccgaggggtaaatccgttaacttttcttttgcatttggttactcaatgaatcagaaaaccttattatatgctataataatgtaaaaggttctgcaactacagttggataagcaaagtaggaagctgaagctactaatgctcatcttagggtttaacagatcgttaagttttcttgcagagaaaggttgaattcgatgaatttgatgctgtacatgtctccaatagccgtcattgctcttctgcctgtcacaatttttatggagccggacgtgatgagtgtgacactaacactcggaagacaacataagtacatgtatatacttctgctggttaactctgtaatggcttattcagccaacttgttaaactttctggttaccaagcacacaagcgcacttaccctgcaggtaaaaatactgaaaagattttgaacttaaacaaaactagaggagtgcctaattggatcaaacatgtgtatgtttaatgtttcaggtccttggaaatgctaaaggagcggttgcagttgtgatatcgatcctgcttttccgaaacccggtaacggtgatgggaattggcgggtacagtataaccgttctcggggtggttgcttatggagagactaaacgcaggtttagatgaagctcaaagactgatattttcacttaactcatttttgtatcttaacctatagacttatacttacttatatatgtaggtcgattctatgacttatgttctttttgttctggagttgttgtgttgcaaacttgccagacactttgtattcactcactcagaaccataaaatgatccagttaaattcatttttttagttcgattctaccaatacgcaggtttagatgaacgcaacacaacaattcatgtatacgtataaagaaactgaatctgtcaaactgtggcatgttgcaaccttctggcatcaaatgagaaatcgggtctgcccattccacatggaagatgaccattgtttacattcaaaaccagaatacaatggtctcttccggtcttcaacccattttccctttgcagagttacaaactgaataggaaaccaaaatgcatcacaaaaccagactataatatcttgagattcaaaaactttggatcataaacttactaaatagtagaagacatagccaaaaaaaaatgaatactaaaagctgtggagagcatataaatacctgaagaagatgaaaactgacgttatacatcaaaaagagaatcatgaagcgagttttcctcagaaaccaggagtaaaatcaccaaaagaatgatgataatcaaggcaagtgatacactccctctgaatatatgactttttaccaccagacatcttagagattatcatcaacaaagaaaacgcttaagctcttctatatgaattgcattggttttaattttgttccaagctttttgtttgacaacagttttgatacttcggaaaagagaagtaaataaatataaacataggaagggaggagctacatgtctactatttttattttataagccaatcagagcgtttcatgtcataccccactctcacctctcgggcaatttcacacccactctcaccaatcgcgtgatgagcgcgtgtatacgttttctgtgggttctaacccaccaaatggcttgttttgaaacacactcgctcctttaaaaaaaagcctcgagtgcgtgatttcagtgtctttctcctttaattccaattcaaacccaaccgaaatcaattgaatttttcaaaaccatgtaaaccgaaccgaaattaaaacacaaacgacaaactagcaattgtcacttccactattgatccaactccgacgaaccagattgataattttgattcgattccacacagataacatatagtccaaaccaaacgcaattcataagagagccaaattattacgctatgttcgaagcttttttaacttgccacaaatcaattcacaaaataagaaattgtgctcagaaattttcagaagaattctcgatcataactttatgcggtggtggtggctgtgaatagccaacggagattgctccatgagaaattgaaccggcatcgccgccggtttcattgtccacatagtaactccgattgctgtgcgagtttatctcagtctcccttattgcggtaatggtgaaaccagtccacatatattttaatcaatggattattgggctttttatattaggcccattaaattcatccggcttttaaataaaatgagttttgtgatagtccgagaccattgcattcctcagtgaatacaacaacattatctgtcttactaaatgtaaatgaccatatcaacaaaaaaaaatcgacttgtttgtcaataaataaaaattcctcgatttccatattcatataaaagaaatagataccaaattgttggcaaaaacaagcaaataatacatatttgtggggagagaaacaaaaaaaaaagctacactttaatagaaagctaataacatattgttgacttatgataacttgtaacgtgacttcacacgcgtagtagtattacttaaaacttaggtcacgtgaactggatacttatgaaccgagtcaccccacgggttacccaccaatgactcgttagccggaatcgttctcaatgctctccacacaatactattacatttaaaacccgacccaaacgccaactgccaaaccctatctcctcgtttgacccgacatttagcctccacgtaagccagctcgtaccacagcgacgagcttgaagtgtttccaaagcggtgcaaagtcatccgagacggctcaagatcaaactcactaagtccaagacctttttcaaccgcgtcaagtaacgctctaccaccagcgtgaatacagaaatgcttgaaacatagtttaaaatccggaacatatggactaacctttaaccggaaaagcttactctttaccaaaaagaggataaaccggagtttttcagataaaggcaaaacaagcggaccaagtgctgttagattcgtctttaacgtgtcaccagcaacaaccgttagttctttagagagtgcgactccaacgatacctttactatcttctttttgttcagcacaagtgtagtgtttatcgctagagcctttgtgagtccttacaatatgagtcaattcgtacttagaccggactcggtcttgactccggtttgagagcataaccgcagcgccacctactcggaatagacagttagggactaacattgaccggtcgttgcctcgatacatgcttagagtcatgttctccgtactaacaataactgcgtaggtattagggtttgcctttagtagatttgtggcgaggtccacggagattcctaaagaaagttcaagaagctatgaagagtggtaaactctaaaaggaaagatagaaactggggagttggctgataaagatggacagtaacgattgcgtaatataaatttatcggcctcgtcaagccccggcgctgcatcccataccggagagattgtaagttttgacgtcggttttaagcttgtaccggtttacgatcatggacgagagagatgggttagggttaaacaagctgcagtttacgatgaagattccgacttctctcggttcgattccggttttcttaaatagtgagttaagagctccgaagatgactaattcggattcatgtctcgcctcgtacattgatggagttggtggagaggttaacatgcaacgtggggagtacgtatcgtctcctaaaccggaccggtttagtatcctcgtcatgaattggattgtttcttcggtgtagagttgagcgcctttggccatgttgaagaacgtttcggatgagattttgcaagaatccgtgggttggtgacatgagaaatccactaggtaaaccggtttagaccgggtggttgagtaggcatagaagaagatggatatcaggagtaaaccgatcttgaccggaaaaggagagaagaagtcatggtgaaagtgaagtagatcaagttcaaagagagatagaaggatgagtataagcaaaagaagcttgaaatctgccattgcaatgaacatatgagaaaatattgggcattgggtgggttttaatttataagcaacgtaccttaccaatatttatgatatgaatagagatggcgttaagcgcgtttgtgccgcggaaaatgtggtctgcgttttaaggttcacctattcaaacaaaattcagagacatcgaaaatgaaaaatccttaatggttttttttgggctgcaaatcataatcggaatttatttaattgaagtacaagaactttgggccgggtgggtttgagtaacccggcccgacatgagtacccgtaaaacttgtttgaagcagaagaaaacatgtctttgactgtcaccatcaactcctccatggctctagttcagagacaacactcttatcttctccgttattttcgtctcatggcttctcgtcctcgtcctcgtctcttctctcactctctatatccttcacttcaccgtcactcctcagctctcagctcttcaacacccaggtattgtattaattagctcatttcttcttttcacttttccggttttggtttccggggaaattacgcagtgaaatgaagattgaatagaagaagcaataccaatttgcctccgatgataaaaatcattcctttacgcgattgctgatagtttccaagttttctcggaattgggaattttatgttatactacttttcaagtgaaagtcaattgctttcttcagctccttcaaaaatgtttttcgtatttggtcactttcagggctttagtttactattaacatttagctatgtgattcgcttccatagtctgaagcaaaagttggtagtataaccattattcacatttggtttcaggataaagtttcagttagccaatgtttttagtcaaagacttgtacaaagaaatgcggtctcacctaaaagttttatgtcatcgaccatggagtctctccaagagagctctacctctaaggattatagttccgagcacatccaagtaattcctctaaagatctttttcgttttcttgcttttttagatgatttgctgtttttatgtttgtgtactcgatcattggaacgatgttttcttctatagttattgaaaattcctactatgaatctcttagtttcacttttttgggttattgtatcttaaattctctatggtgtattaggtgttggaaggcttagaccctgtcaggaaaagacctgggatgtatattggtagcactggatctcgtggtttgcaccatctggtaaatgcctttttcttttgacgttcttggtcgtgactggctcctatcaactggttatatccttcccaatacatgttgtttcttaggtttatgagatccttgacaacgcaattgacgaggcccaagctggttttgcttcaaagatcgacgttgttttacattcagatgattcagtcagcatttcagacaatggacgtggggtatgtgatttgttccacttactcatcttcgcgtatatttgtaactgaaaacatggatattgttttcttatgccgagatgcaagagaaaggttaagtggcacccaatggcattctgtactctgtagttatgtgtaggagccaattttggtattcctagctgatttttctcaaagcttccggttttatatctaatgtgcaccaagagtaaacaatatatgtcaatcatgctctatcttattcatttacgttttttttatttattttgtatatagctttctttcatcccagaagtaaaatttgttgctaatatcaaaatgcatttggtcacttttattcatacaagctttctgtctgcagatacccacagatttgcatcctgcaacgggaaaatcgtctttggaaactgtccttacggtactgccacttgacaaacatctattagtacaccttatacttatatattgtgtagaaagctatctatgtttgtctcaatgttgattcacacgtatttttgtttttgttatcctaacatttggtcctgcaattaatcagtgctttttatttgtgcaggtcttacatgcaggtggtaagtttggtggcaagagtagtgggtacagcgtgtctggtggattgcatggcgtaggtttatcggttgtgaatgcattgtcagaggtgtgttgtaaccgttagtacattgttgccttttctgctaaattgaaaatatcctctgtcacatgtttgtaatgataattagatcctgcgcatttgatcgtataggaagggtttgctatgttattgcaaattctttattttgtgtgaaagttaatctaatgtccaaacctgatatcatatgagaaagatcctggaatggttctgtactgagtgctggggctatcaatttcagatactttcaactataagaaactgttatatttggcaagacatcaggagtctattaggataatatgcatacaactaattatggagctcccattattcacaggcattggaggttatagttcgcagagatggaatggagtttcagcagaagtattctcgtggaaagcccgtaacaacacttacatgtcatgtcctaccaccagagtcaagggggactcaagggacatgcatccggttctggcctgacaaagaaggttttgcctgttttccgtacttatctattgtaccctcccaaagataggatttgatgactaacttatcttttctgaaacaaactggtaatcagtattcacaactgcaattcaattcgaccataacactattgctggacggatcagggagcttgcttttctcaatccaaaggtataggcagccgtgatatttgatttgtgtgcttcacggagcattcttaacctgctcgttttagtgagttcttatttagcagaagctagtgttcgactgtttcctttgtcataatcaagaggttcatattgaatgcaggttacaatctctctaaaaaaggaggatgatgatccagaaagggacgtgtatagtgaatatttttatgctggagggttaactgaatatgttagctggctaaatactgataaggtgaggcatgtactgtgggtcccttgttatagttgtataaaatctcaatatttgccaatcggtgatgctagacttaaaatagtggcaattaaattggaatgggttttgtgaaacaaaatgcaatggggatggtactaatacttttccttctcagcttacttgatggtaagatgtgttgtctgttcattattctttagggctctatttagcatgagcatggaacctttgtaaacttaatctctattatgttagctcttatgcatttaggtctctggtgttataggtcatccttattacttttcccttccgaaaatatgaatttacaattcgttttgttcagaaaccgcttcatgatgtgctgggtttccggaaagagataaatggctccaccgttgacgtttcacttcagtggtattttactcttccttctacatacgtcgtctaatatctgctcatgtgatgaacagattataatctgggttgcatttagcgtaaaaccacatacttgaacattttggctgactgattttatggtttactttatctaaactggatggaaatatgttgtaccgtatgcggagttgatgactgtatatacagttcttctagacgaatatgtgtatatcatggtagctatccaaaatttatatggatctaagtatataatctcgttattgtaccaggtgctcagatgcctattcagacacgatgctgggatacgcgaatagtattcggaccatagatggtgggacacatatagaaggtgtgaaggcttcattaacaagaactctaaattcccttgcaaaaaagttaaaggttatcaaggtgggatacaacttaccaactgcgttttttccactttatatttccactcttagaggcttagagcctttttccccttctcttttcctcctttttcatggaaactgcaaatgcctaattgcggttagttggtcattattgtggttgaaagagtcttctgagataatgtaggtcaagggttatattatctattcctctccatggattgagactaaatttaaatactcatctgcacttaaaagacatgctttacggacaattaataatgtactaccatgattgaactgtgaaacatgccagttatagaggttgttttttgcttacatttaagcatttatcttgacctgttctgaaaaggttgctaactcatagtgtaacttattgttgttggttatgttttcaggaaaaggatattagcttaagtggggaacatgttagggaaggattgacctgcattgtctcagtcaaggttccgaaccctgagtttgaaggtcaaacaaaggtactagggagcataatgatatgttgaccctcatttttgtcaacaatctctggtcagcaggccataagttttcttggattctgttgatcattttaatttttttgtgtcccaaagacaagactaggaaatccagaggtgagaaaaattgttgaccaatcagtccaggagtacctcacggagtacttggaattgcatccggatgtacttgaaagcattatttccaaatccttgaatgcgtacaaggtgcgacattgaaatacctgctcatactgtcacatcttcacctacacacacatgcactcaaacactcaaacatgtgttttatcccttgagaagcattttctgatatctgtgattagcgtattctttgattgagtatgtgtctcctacagtatgtctagttactaacttcaaccaaatgaccatggattttccttgctgactctttctttttaggctgctctggctgccaagagggctagggagttggtaagatcaaaaagcgttttgaagtcatcctcacttcctgggaaacttgcagattgctcatctacagatcctgcagaatctggtatgcattaaccaatatgaaagtgccttgtaagctgtgaaagttagtcagtttattgacatctatctcctatgctaccagagattttcattgtcgaaggagattcggctggtggcagcgcgaaacagggtcgtgacaggcgtttccaggtaaaaaaaatcattctgctcagcgtgtcactaacaggctctgcttctattttgttagtctgtaacactgtatttcgatctatgcaggcaattcttcctttgagaggcaaaattttgaatattgagagaaaggatgaagcagcaatgtataagaacgaagaaattcaaaatcttattcttggccttggtcttggagttaaggtaatatatcctttttcatatcctgctgtttgttggtatgttcggaaaactcagtttgacataaaacttatttcagggagaagattttaacaaggagaatctgcgttaccataaaattatcatcttaacagatgcagatgttgatggtgcacatatccggacacttctgttgacctttttcttcagatatcaggtactagtttagtttgataaaacattagttgaagtagccttgattgctgattgagttatgtgaaatttaatgaaatttactttctacagagagccttgtttgacgcgggttgcatatacgttggtgttccacctcttttcaaggtaagctcttagtatctataatcttatgcttcagattgaacggaatttttttctaaagctagtctctctgtgaaaacgatcaggttgagagggggaaacaggcgcactactgctacgatgatgcagctcttaaaaaaatcactgcttcgttccctggaaacgcatcctacaacattcagaggttcaaaggtaaaacatcctacttctcacatcatgaatgtgttcttttggaaaggataaataactatgaaaagtaatgtatagtagttgttatgtgttagctattaagatactcttgagtgtgtgcataacgaaatctagattagtctcaactattggattctatgtaatgtttcttgcttttgcatctgcaggtttgggtgagatgatgcctgcgcagctatgggaaacaacgatgaatccagatacaaggatattgaagcaactagttgttgacgacgcagcagaaacgaatatggtcttctcatctctgatgggtgctcgggtaagccaatgaattgccagactcggactcatgataatagtcaataaactggcataactcatcgtgacaatgttatgttctgtgtatgtttcaggtcgatgtcaggaaggaactcatcaaaagtgctgcgactaggatgaatctggagaatctcgacatataacacagcttatagttattgcttcagctatatacaaacaacaaagaaacgactctggtgaaatgcaaagggagacatcatcatttcaaggttaaatcatatagtcacaggccaacaggattttgttcttcttctggcctataaaggacaaaattcattgttaggattatctctttcaatgtcaaaatttagcaattcacaaggctctttgttgggcgtttctttccattggaactagaatttttctagagacaagagaaatttgcattcactaggtatttactatatattatgacttcaacaatttggcattcctgaaaatcatgcatgcgacgaagttaaaactaatgattagaaggaagatgagaaggtaactattgtgcaatgaatatcttctctgcctgttgtattgattttaattgtattcgaggttaagttttgactgatgttttactagcgatcgcagagtgatcgataattaacaagtttatttttcgatttggtaggtatatagtgaattaaacatgatttttgttcttcctgaacaacctaaagcagtgttatgaacgcatcacgcatgtaacaaccagtcaaccatattagtgtgactttaattcattgaataaatgaaatttttttattttcaacaaggcttgtaacggttgataaatctactcagaaaacttctttttgtttgtcttgcaaatacaaacgatacgtttcaactctttttttggcgtccaataatacttcttaaaaaataatttgtttattgtcatgagctacacgtgggaagacaagtcctatccattattactacacactactccaacatttgcccacattttgaaaaaaacatttttttgtaattcaattattcgacacaaccaatcccatctcttgtttcacttccgccctccatctttcttcgtgattgagagaatcttcaacgaaagaaagcaactttttttgggtgaaattcacagaacaaccaaggtttttcttcttcttcttcttctccagttcctacaggtttactcttactcatcttcatctttgtctcgttcttgctcttcaatttctggtctttttgttgttcttgtcttctcgccaaatatactaagatctaagttttatatcattgtaattatcaccaacgaactgttaagaccaaatttgattactcgaaatggttttgggtttagggtatgaagaactgatcaaaagattcaattttttatgaagtcaactttcatctgcaaattgagcaatctcagatttcgattgtgtttcagaatcatgcctgacaagaacatcgtagaggacgttatcggtgatttggtggataacttcacggagactgttcagaagaacaaacatggttcctccttcttcgaacaagaagattccgtcagttctcgtttcaaccgtttgtttgatcgccagaagccaattcatcatgtcttaggcggtggcaaatgtaagaattcgtatacaggaacataaatatgagattggtttttcttgtaattgagtattgagagattccttcagctgctgatgtgttgttatggaggaacaagaagatctctgcaagtgttttgatgggagctaccgcaatttgggtgctttttgaatggatcaatttccatttcctgtctctcgtttgctatgccctcttgcttggtatgattgcacaattcgtttggtctaacgcctctggattcttaaaccggtaacttgttggagtgttgttgtcattattattggtaccttgtgattgcaatctaacacaatgtcctttaatgtctcaaagcagctcacagtctagagtgcctcgcctagttcttccaaaggatttctttgctgaagtcggtgtggccgttggaaaagaagttaaccgcggtttgttgtttcttcaggacttggcttgtaaagggaatttgaaacagttcctcatggtgcgttgtttgtttcaataaccacaatcttgtttgtataatgtattagcactttcattactatgctaagatagaaactttgatcacaatatcatttttcaggctgtaatcggactatgggtagctgcaatggtcgggagctgttgcaatttcctaactgttttgtatatcggtgagtggttcttattagtgtatcctcttttgagattggaagttgagtaatacaagactttaaagggatgcattttatgtgtgtgtgtgaagggtttgttggggcacacacaatgccggttctgtatgagagatacgaagacgaagtggatggttttatggattctatgatcatgaagtttcatagtcattacaagaagcttgatactgggtttctcagtagaatcccaagtggaaagtttggattaaagaagcgtgagtgactaaatcactcaagcattttcttattttaccttgtttgttgttagaacaatatggattatggtttgctaaatgaatgttttgagaatattattcattcatgtagattttgtgtatttccttactaaacaataccttgtccatgtatttgtcaataccttggttaataagagaatcatcatatctgtcaaaattatacaagtagattgagagttcattaactcaatgtctaaaaatgtaagacttaaaacaagtttgaatcaaaattatttcacaaatcaaaagtatggttttcttatttcgtaagaatcgttgactaatattgaccggctggctaataagaagatcagataactctacaggtatgggatccaccattgtcaaacattttacacgtgtcagcttcctgagcttcgaagcctgaatgttaaaattaaaaaatttaaaagaaagaaatataaaaagaagtaaatcaaagaaaatggagtaaagaaattgatccacgatcgatcaacaaagtgaggttaggttccatctccacctctttctctctcgaatcttctccgattaaaggtgctcttttgcttatgaaatttgtgtttcttaagctaatcgaatttgttttcttgatcgttttgatgttcttttttttttttgttattgttgttgatttgatgtgatccggttgtatttgaagacgaaatcgattcgaagtgttgaggtttagtttggggtaaaatagatgattctcaatctgttcttatttgtgaattattttgtatttctgattctctgtttttttctgtttttttttgtttttttttggatttgaaacctagagaaagaaccttgtttcattagtgggagataaaaacctctaatgatttgatataaatttttgaacttgtacagattcgaatcgatttcccttgtaccctctcttaatactggttcttgcctgacaggaacaaggtctggtttacaaaagtctcatagatgtcgagtggaacagtgagaagggtttcacgtcaagatatacaactggtaataacaacaaaaatagatcatgatgaaggaaggcctttggtttcattgtctgaatctgcgacaatttgaattcgtcctcttccaactcaataaaacttacttttggtttcaggttcaaaaccttatagaacgatgccttcaactttacatgaatcagaaagaagttgtggatactttactagagcaggctaaaatcgagcctgggttcacagaactaggtagccactcaaatactctgttttcttttcatagaaattagcatctgattctgtaatccttgttcattgatgaatctggattcattactgtgaatgaaaaggtattaatatatctattaccagttcaggacatctgtagccaaaatcatgtgtgaatgattttgttgttgcttaaaactgaaatcttatgtattgtttggttcaagtgtcaccaagaaggtcttattggtcagaacctagttaggaagtgctcaatagatcatgaaatatgagagaatatgtatagtagtgagtatcgatgataaaaaatggggatttatgataacacgctttctttttatgtttaaaagtttggcagaagcttgaagaagagaatcgggagtttttcaaagcttactatcttaggctaatggttaaacaccagataatggaattcaacaagttgcttgagcagcaggttcaccacatgcgtcagatgcatccaactggtgttgcttctgtccaaaacacaaatggttctcatcttcaatcaagtaagattcgtttggagtgagatggattttaatttctgcattttagggtctctttattgcttgtatacttttgctatgaattgttgttcaagtgttgtagtaaacagtcctcatatgcattgtcttgttttctggcttccacttttgctgccttagttcttttcaaggtttctttttcctgtgaacattatgtgtttgttgttttccttagattagtcattcattcaagtcgctaactgatgagtattaaatagctaatctatgtgattttcttaacagtgaatcagaaacaattatgctatccctctgagcacactgaccaatctttgaagtctgaaagtgcacatcatccaatggcttctagtctgtctaatgcattcctcaatggctcttccacactcaatacaaacgtgccctcttctataaacatatcaacccatgctaggagagttgatgcttctccaaatatgctctcatcgcagaccacaaacatgcctatgatgcaaggaatgaatggaggaatgatcaagtctgagactgcctttacaaaccctgcttcattcatgtatggtggcgaacggaatgccctcgaaggacattcggcagttggggatacttcgattcctaatttcagtaacgagtccaacaaccaacccctcagtgatccgcttcttgaagcagaagcttctacttttgggttcttaggtcaaattcctcgtaactttagcctctctgatttgactgctgatttttctcagagctcaggtctttctccatctcaatatctcatatactcctttctctctcgttgttctgacgtcttagcatgcgtataacaccaagtagttattagtggttttctagtacaagagccagtaaacagctaataggataaattatttgtcgtaaccataagtttcctggttgatttcagagattctggagagctacgatagatcacccttccttgtgccgaatgctgaaaacttcctggactcccgtgacagaggagaatatcaaggtgagagagctctaggaatctttcttactttctgtaatatatcgcaagtaatcgggtttcaaattcttcaagacacaatagactagctcgctggtttagagaaagtagaagtattgaggcaacagacagaagtgataatggtaagtgtgtgtttttgcaggagacaacaagagattggataccatatctgaaggtttcagttacgataacatcgggagcgagtagttgggtattaggtaagaatatatatactcatctgcctcaaatctcaggttgcactttttttttgaatttgcatttccaacatcatcattttttggtttctggaaactatgcaggttttgctttatcactaataacataggacacgtttgtgtacaaaagattcagcatttgatggttttcctttgcaaagactacttggtggggtgtataaaaagggctttctattaacattgttacttaagcttgaagttagtaataagtttaagaagaagatcatgtaattttcagtgtgtgattttgtctcttttctcttgtgttttagttatcttttttacttgttacaattgttactctttttttttccggatataagtggtttggatagtgccgaaggctaaggatagagtcaaagtaaggaatcgaaaagaaaccagaaacttgcatataaagcaagtgtcattctaaagaacacaagaacaaaaaaaacaaaacgaagaaatttcttaagtaaaagagatctgactctcaacgtgattcgggaaaacatggagcgtgtaaccatgttcattactgagcacaaactcgtcgtcagtgaaccctttaagctcgaaccttctagaagtgtttctcaccggatcataaaagaaaatcttagccgatttatgaaacatggattctacataaataatctcaccagcatgagtgaaaccttttagtaggaacttattagtactcaaactcttatctatgtgaacaagaggtgcaagaaagtctttactcgaccacttgttgtgtttctccaaaatccacaatctaataccattcttctctattatttctctaccaacgcaagctaacctcccattataatctatcagcacatccttgtgaacatccgatgatggtaactcgatcatatcgaatatttcagatctgacatcaaagctcattagaacccacacacacatatccttgacataggctatatgatatacaacaccgttgatgcatctcccagaatcataatagtcagaacgatgcttattatgagttttgaccgttctccataatttttgagctgatcctaaggttaatactcgacacgtatcataagttgctgaaaactccatgcacattactttgtgtttaccttccactggatcgtatcctaaaaagattgttagatcattcgagttcccattgggttttggtaaaattaacaactgtcgcgtactagggttccaaacaatcagcctagctgattcttgaaagcagatcaagccattgacagattccgtaggggggaagtaattcatttcttctgagaattccatatgataacgatcaataagctgagaataagagtgagacttgttccaagtctcaaacgtctgacgatgttgcggaatcgaggaaacaaaaaacttttcatttgctttgaagcagagtaaaagccgtggagacctagttgttaacaagttgatgaaatatggctcggtggtgattgatgaccaaggcttggacacgcaacgaaacctcgcaacagatttctcaggcagtcttaggagtatctctgagactagatctagaggaatggacgacgaacctgatttggatcgtttactttttctttggtaggcttttatcttcctcttctcttcttgttgctccatctttggccaaaaccctagttttttcaggcttttcgacctcttcatattattctaactcatttttaagatatgtaaataatacgaatacacacgttggagattttatgtgattatctatagactatagtttccactttccagaagatagtttccattttgtttcaaaataaaaacggaaagtatatagaagatttcttgggattatagaaacttcgcaatataacgattttatattggattcacaatgtagcgataaaccaaatcattcatagatttttatttatttgctttgttaaataaataaaatataacatttaaaacataacttattaatcattaaaattataatttaccaaataattttttactttacttctcataacttataagcatattttttttacaaatttgagaagtagaaaaaaaaaaaaaaagttttactaatgatccattgatttcgaaatctggataatgaatcagaaatttaacaaccatgtattaatgcgtaagctagtattagtggttatgagtgactaatgaccaatgtcacaaaaaccaaaagataataataataatggatttgtgcacatattgggaagagagaccccactaaaggactcataccacaaacacattcatagactcaattctctctttctctctctttctgggaagaagataattgtctccatctccatgaagctactgcttctgggtaagttttgtggtcttcgttcatcttttctctagcaatttagtattccattttctcaatccctctggttagaaatcgtgtccggtgatttttgaattatatccttttggtgttttcttcgattttgggggaattcgatggatactctgttgaaaacacccaacaagctcgattttttcatccctcagtttcatgggtttgagagattatgcagtaacaatccataccattcaagggttaggcttggtgtgaagaaaagggctatcaaaattgtctctagtgtagtgagtggtagcgctgctcttttggatcttgttcctgaaactaagaaggagaatcttgactttgagcttcctttgtacgacacttccaagagtcaagttgttgatttggctattgttggtggtggtcctgctggtttagccgtggctcagcaggtttctgaagctggactctctgtttgttccattgatccttctcctaagctcatatggcctaacaattatggagtttgggttgatgagtttgaggctatggatttactagactgcctggataccacatggtctggtgctgttgtctatgtcgatgaaggtgtcaagaaggatttgagccggccttatgggagagttaaccggaaacagctcaaatccaaaatgcttcagaaatgtattaccaacggtgttaaatttcatcagtctaaggtcactaatgtggttcacgaggaggcaaactccactgtggtctgcagtgacggtgtaaagattcaggcttccgtggttcttgatgccactgggttttcccgatgcttggttcagtatgacaaaccttacaaccctgggtaccaagtagcttacgggattgtagctgaagttgatggtcacccattcgatgtagacaaaatggtgttcatggattggagagacaaacatctggactcatatcctgagctgaaagaacggaacagcaagatcccaacgttcttgtacgctatgccattttcttccaaccgaatatttcttgaagaaacttctttagttgctagacctggtctgagaatggaagatatccaagaaagaatggctgctagactgaaacatctggggatcaatgtgaagaggattgaggaagacgagcgttgtgtgatcccgatgggcggtcctttaccagtcttacctcaacgggttgtggggattggtgggacagcaggaatggttcatccttcaactggttacatggttgctaggactcttgcagctgcaccaatagttgcaaatgccattgtgagatacctcggttcaccaagtagtaatagcctgagaggagatcaactctctgctgaggtttggagagacttgtggcctatcgaacggcgtagacagagggagttcttctgttttggaatggatattctgctgaaactcgatttagacgctactagaaggttctttgatgcattctttgatctgcaacctcattactggcacggattcttgtcttccaggctgtttctcccggaactgttggtcttcgggttgtcgctcttctcacacgcttccaatacctcaagattggagatcatgacaaaggggactgttcctcttgctaagatgatcaacaatttggtacaagatagagactaaggaccagaaacttagacatataagtacatctgttctttggttcttgaccagtagtatatccgcattgcaagtcgttggataattgtgtataaaccacagatcataacctgaatccttgtgaaatcaaattgttactactagttcattaaaattaatactttgtgctgcattgtgtttcaccaactcttgtaaatccaaaactagaggcaaaatgtaataagataaaagagtggattttgaacacaaaagcaaatctttcaaactccttccgctccttaatatttgatgctttcgtgaaagtcttatatttcatcttcctcgaaagggtctctttccggataatcaccaacctgcaagccaacatcaagttcatgagtagcagaaaatggttttctaatcacttaaactaggttaactactaagaacccaatccatactaggtccaaaccatgtccagaaagtcaaactcgcccaaacgttagcttgagagtgataacacccttaggcattagctagttctatagctaacccatattcgactccagactcctaatatcaaacttggaaaggtaaaacccgcattgacatctatttgagaaacagcaaatactactatacgatggatgatgtagaatgactaaccagttctatgaaatgtaataaatcatttcacaagcaaaatgaattaggcaacggagaagctaaggccttaaagaaaaaaaatacctttactttgtcaggcctgaccataccaccttgaagccgagggcactcaaagaatcttgttcctttcaccctgcaaatgtaagccagtattaaatatgtgggatctgacaaccgaacttccacaaattgtacttatgatatgaagtatgaacatcatgatgttaagaaaaagtctatacaagattaagacgcttaaagtgatactagcacaaggttctagaagcaagaaaggactgttacttcaatttgtgatagagtttaacgttaatgaatacaaaatagcatcaagatgaaagaattaacatacatgccatcatgttttccaaggggctcatcatactgaattccaacccaatagccaggacccaacgactctgctcgtccaacatatttgaccattcctcttttctccccaggctcaacttggcatctatctcccaccttaacattggaatggttaaataaattagaagcataacgagttgagaaagagcagaatcagagaggtcaggtctcacaaagttaacaaaaaaccatgatatttgcacagagatcttccatatacaaaaagaatgtttctgactaaccttgatatttgcgcagagatcttccatatagttctctttcgtctgttgaaaggataaaattggaagaagaaacataagaacatttgtattcttgaaagacttagtcttaccccaaatacttctccgcagtgactaagctaaaaacttcagtttcgctgaaagtttaacaagaagcaacatacaagtttggcttatattgatatatccgtttgtcataccttagcctcagcagcaaccggattttgagaaactctcttttctttgaatttcctaaaactgtctggaatttgaacacaagaacatacaaccatcaaacgaatccaacatatattcaaagtcacttgatagaaaaacttgtctcctttgagacaccgattacaggtagtagagaatttaccagttcgtttagcataatcctcctctgagatgttatacttctcaaccagtgacgtatcttcaagccagcctccagttgtgaccgaggaggggtcaagatctatgatgtgtaaccgaaacctattgaaagcagcagaaaagaacaatcagatgaaatgataaaacaagaagccatgtcatgtaattgaatgccatctatcaagattacagtgaacagagatctatttagtcaaactggctccaagttctctaaattagccaaccttttgcaatctctacaagctatgaagaaaaacagaagttacccatcaaaaggagagaagaaaccaagaggtctagaatcatcactgagaactgcaacctttgagccagagtcatcatagagctctaaagccatggaattaacagatgtaccacatttcttccatagcttttctttcacagcttctacactcatctacagaacaaaattcaaacaaaaaagcctttatagatagcactacattgaaaaacagttggaatcagtactgaatgtaaaacgagactcacttgcggagagaaacgagcgtccgcagagaagcttttaaggttggcgtgagtaatgtgtagatgtacagagtcatctccttccaactgtaaacgcgaagttgccattttttcacctctagacctgacaaaaaagctctgttaaatcacttatctcaatgaaatcaaaaaaaaattcgactttctcgaattgggtaacaaaagacgcttaccttcttagctatttctgggcaaagagtttgacttgtcagcagaaatcgaatcgaatctcgccggatcggagacgcaccgctgagaatgtagctgagaaacgagagagacgattaataaaacgacgtagttttctctagtgttcaaaaggtcattagactcgttagatttaggcacgtgtatagtcgcacgttaaacactgtgtactcacccgcaggttagtataaatcctctaatccctggtctaaacaaaaaggacacgagagaatccgtgaggaggaggaatattccggtgatggctgaagatttttcggtggttgtgttggcttctgatctaggaattgacgctagacccttcttgacgagaagcgatgacgttgatgaacaagaaaactggcatgattgtccccaatacttaggagatgaagatttctctgatctcgatcttctccagttctttactctccagggcttggataggtccggtaaccggattttccgcatcgtcggaaagtatttccctggtaatcactctctcttcttattagttgaaatgtgtcttaattaaaaatactgtgattttgggacaaagttgctaacttgatcacaaggacatgttgatgttctctgatttggcttattagattagcgttttggtatttcctgctgctttagataacgtctggtcatgtattgtccacttcagtctcttctaattgtgtgtatgaaacgcagctcgtgtagtgagtgcggagcggctgaagaagtatatatcccagaagataagcaaccaatgtcctgagggacctttgtgcttggtttacatgcatagcacagtccaaaaggacgacaattcaccgggaattaccatcttacggtggatttacgaggaccttccttcagatatcaaagacaggcttcaacttgtttatttcatccaccctggtcttcgttcaagacttgtcattgccactcttggccgccttcttttaagtggagggtaatcatttcttttcatatgtatcagttgatttatatacaagttatttcaaacttgcataatcgaatattgaaccctaaagtttgaagctttcatgatctaataaactctggcgtctaggagtattgatcttcttttgagcttgtaacttgaaacggttatgggatctagattactttagaatcaacaactgtggacttaactgttttgtcaaaacaatatctctttcaacattgcagactgtactggaagattaagtacgtgagcaggttgcagtacctttgggaggacataaagaaaggcgaggtggaaattcccgactttgtgaagaaccatgacaatgtgctcgagcatagaccattaacggactatggaatcgaaccggatcctttccagttaagcgaggttcaatcttcatcgttctctctcaaccgctacgagaacagatgggtctcatagtacaattgctctttgttgagctagaacctctatatgtttgtgtctgttgtatagagtaatctaatgtattaaacactcgtgtatcatcaatctggtttttgattgattttggaccgaaccagtaccagtattagatttgttttcgaaagcgggtcgaattttactctttgttgagctcgaatctctatgttctaaaaaggtgctaaaaatggaaagaaaacggcggatcttgttggaaatcattatttgattaatctccaaattggtaaaaaggaaaaacagagattgagaagaggaaggatgatcgtaagaagagaagaagaaagaagtgaagaacatgtgtttttcctttttacgatcatgtaaactatcatcagagctaaaaatagtgagtctatttcaaatgattgcccagaatctctttctgcaaaacaaaacagactctgttatcttcttgtctttgttttcaagctcatgagtttccacttcccacaagaattttggagccaagcctcggatccttgagatgatatattcctcgtcccttattatgacaaacccctgcccaaccacccggaaataataaaagaccagaccacaagtgttctttttgattcaacagtttaatgtcacctttagttagttgttgcaaaggtacctgagggcgaactatgcggtccatctcaagcatgatatcctctagcaaacaaccatctccgtagcttttgttgtagtgagagaagacatgatcggaatgcaccaaatcatacgtgcgtggatatgttgagaacgcctcacacctaagacacatttgttcttattcaagtgatgctgatgctttatggcaaggatccgaaacaaaacaaaaacaagtgtttgatagactagaagaactcttatcagcttaccaatcatggaaagcgccatttaagcctctctcgaaaattccagacaaggtatcattcatggttgcaggtactatgttcattacccaaacaggatacgaattcatagctgcagcaaaaccaccaatgaatgcgttcatgtccatcacattccgtacttcagtctcattgacattcattaaccgccagtaatgattaacttgttctctccagaacactgtatctgatgtatattcatcttcactgatccctgaatgaaagttttgctaaagtggttagttagggaatctaacagaaacataataatgccaccgaagaagaaagatatacctatttttcttagagttgctggatatgcagaaagacgttcagctaaagaagagggtctctcttctgtttgtccactgatttgcacacaatctttaagaggaactttccatgatggtttcaaaacatcttccacatcacataaacttattagctttagctctgctttctgcttaagacaaacctccttctcttctttaatccatattgcagtctgtaccttccgggaaataagcttccagcacattgcactagttagattgaccaacttatcccaaatcataggatactctttatcctttctatatgctggtggtgatgaatacacgaagaatccatttggtcggagaagacgatgaacttctttaagtaagatgccatctgaggaaccaagcggaagcattatcaaccaacttcttataaccaaattcaacacaagaatacatacataccatttgtatgccagtcaacacgacatctcgaacaatgaaccatctcaaacgaggctgcaggatatggcaattgtttggtggcaaccgcggatatcattgcaccaatgcctctctccaatgcaaactgaatctggttttcatgaccatctttgggagcaaatgaaattgtctgtatacctaagggaagaagataagccgcaaagctcgcaactccacagccaacatcaagaacttgtaccaccccagctgaacgcaagtcacctgtttcattagtcatcatattccccaacctgagataacatatacaaaattttaatgcaatgcattagacaaacatcttcagacattataaataaattacctctggatgtattctgcagctccatgcttaaaatgagtaccaccaccagggaaccaccaaaactgaccttgctcatggacccaattttggccacctttaacttgagcaagatgtgtatggttcacattacttctccatacatagtctctactggttggccatctaataggtatcttataatcatttggcggaggtaccaagcaaaaaaggcggtgctcgagtggcgggcaatgcctttcgaggtcttctcttctagaaagattcaagcttggtagcagctgatgcacataggtgacattgtgacaaggtatatactcattgaactccagtggacacacattcatcccagattcaggtatgactagtggtaatcttctataagtaagctcaattttgtttgcaaatttggaagaagctgcaacaacaacaagaatcactctaattattttgactgagcattgataaatttagcctcgagagaccaaaacttagccaaatctacaagaatccaaccgcatgcagaaaaaacttttgaagaaggaagaacagagtgatccttttaccaaaaaaaaataaagagagagagagagtgagagtgagagagtagggaccagagtgagaagaaggatgagagacgtaaatgggttggttggttccgaagagagagccagtgtaaaatgatccaaccataagaacgagagccaccattatcgtctgcccggatctctctgcaccaattacagaacctctcattgtttctgtcgctctttcttcttcttcttcttcttcttcttaaaggagaagtatctatcgtttcttcgtgttcctcgggattcgtttctactttactttcgaatccaaacaatggatcaagtaagcagagtgagagagtggtcttcagcctttgagacttgtcacgtcctcacttaatctacgtgtcaaaacagttttatttagatgagtaatatcttcagaaattaatatctttaattttagtaatatattattgttttttcgttttttttttcttttctctattgctttaaattttgaagtttccatattaggacgattcggagattatgaaattgatttgaatatttaagttatgaattatgatactttcttgaattaattctatctcgtaatctctaaattcttctaacgattcactgtttggaaacttaacaatcacaagttgaaaaagaatattcgttgacaaaataattaaggaaatactttagttgttgaccaattattttggacatgtatttaactgatatatatcctattagatttgaacaaagaccaaaccattaatcacgagttgtataaattacaagggacacctatgaatccaaaaatccatcttcaatcaaataagtgaaaaaaaaatggagaaaatttcagcattcttcgtcattctcttccttgtctcgtcgtgtaagtaatttatgtcaatctcgatatatcaaacacttattatggttttcaatatcattagtccttaatttgcttatactattgaacgtatatatatacaggcttggtgacaatgagtgttggagatatatgtcaaacggatagagattgtgttgagattgggattccaagatgtaagagaacaggaaagatgccgatttgttacaacggatattgttgttgtatctgttctgctaaaagacttcctgcttctactactcgaaaacctccttctccatcaacctcaaaattagtctgatctgatataatatatttatgcatgttgcttttattttagctgggattaaagtagttaattaggactacttcattacttcactattatcttcttcacacgcatctttcatctacaatgtatttctattatcaatcatccctacgactcatacatacactgacgagctaagttaacatggccaattggtttttaaaacctaaatattatatactaacattttgcaaaaatggcagtagaatataagaaaatagaaaatggtacaagaatcttatatattcaaaggagcaatgaaattaagaacatgccttttgaggaatctgacaaattagaccattgtttttctttcacaatttaatggaaaaattattgtgcctcacatgtcctagcattaatggtataaatgaattttgactgaaaaagctgcaaactgagtaaattctcaaatctaaatgcatctttatgcaatttatttaatttaagaatggattatatcagaatctttattattaattacttcatactcaaaatttcatcttttcttcgttagaactacagcttattcagcttaaaaaaaacactaattcccaagaaaacaaaagatactcgtaaccctagaacaagggcaaaaagagcttcataggcatagcaaaaacaagaaaaaaaaaactttgaaaaaaaagaaaagggaagatcaacgctggagatccatcattcgtgagaactcagtgaagcacacaaaaccatcaccgtcctcatcaacatctgctatcatacgcttacaatcatctaacgtgcaccgttcatctccgatggtcgagaaaactcgtagaagctcatcagccgagatcaaaccgtcacgatccgcgtcaaagaactcgaaagtctccttcagctcagtcgagtcacgagccggatctaaagagactacacgactcgcaagctcttcaagacggatcgtaccgtcgccgtcgcagtccacctctttaagcataacgttgatctcctcctccgtcaaaggatcaggacctagccggctaagtaacgactcaagatcgtgtctagagacagctccgtcgttgtctctgtctatcaacttaaacgcttggagaatctcgacgtaggaataaggagaaggaacctccgggagaatgctagtcggggtaacggaaccgccaccgccatcaccaccggagtttttacagtcttggccggaagatgaggaagcggatccgaaggaaaaagccgtgggggacttagagacagtggaacgatctttggatctgatgaagaaacgttttggaattagtttggcgagtttcatagtgtgaatttaatgatttgatggagaaagtgaagacatatataaatggggggagtgataagtgtgagagtttacctattggcaatttcctggaagtttcctactcaactttaactttatcgttatttcatttatttttttagtgtaactgtacttagttagattaaccgaaaagtacgagttttagttgtctttagttacgtgtttcaaggatctttttttggataaattatatgcaaacattgaatatatgtattctaaagtttatcgattcataatcctcaatcatactaattaaacaattacaaacatattcatatgctttggttagaagttagatttatccaaaccttgtttttcttttcttttctttctgagacgtacattattacacttgaacaaatatccaaactttgaaacattaatgaaattacaatttatcataatcatagttcaaacttcaacaaggcgtagtattttaaaatagtttggttggggaagcgcgattgtctggtgtattaactaaccggttcgatacggtttttgaaattcgatttttttttaaggtaaactagattttgagagggagggaaaactaatttcgaacacctgagaaagagatattttaggtcttactttgttcgccggagaagattatcggagaatggagagaatccatgtctcagtcagagcgcgaccgctttcgtcggaggacgcgaagacaagtccctggaagatctcttccgactcaattttcatgcccaatcactcttctctcgcttttgaatttggtactctttttctcaattcccttctcacttctctatccattttcttctcctgcttgcaattttcatacccaagctctctctattttcctacaataacagatcgaatttttagagaagattgtaaaactgtccaagtgtatgaggcgcggacgaaggagattgtttctgccgctgttcgtggattcaacggtaaaatgcagcaattctactaatgggtttagctgatttacttagcccttttcgaattgttgcttcaattttgataatttggggttcttttgatttgaatctcccttgctcctttttttgggtttcaagggtactgagtttttcgtttttggctaatgatatctgctcgattgaaggaaccgtatttgcttacgggcaaactaacagtggcaagacgcatacaatgcgaggctcacctattgaacctggagttattcctctcgctgtacatgatttgtttgacactatatatcaggttcatccctttacattcttagcattagttgttgtgaattggatttttctagttttggtgttctttgtgggaaggtattgatttgaggaacaactgtttttctttttgctctatccccttaggatgcaagtagagagtttctgttgcgtatgtcgtacctggagatttataatgaagatattaacgatttgctggcccctgagcacagaaaactacagattcatgaaaatctagaggtacttattgtatgtcttcttagaatcccctgtaaccaaattctctagcgattctgatgtgcttaccaatcttaatgttatagaaaggaatatttgttgctggattacgagaagagattgtcgcttcccctcaacaagtccttgaaatgatggaatttggagaatgtactttctgttttcttctcattattttctttattttgtttgttttaaacacaattcttgtgttttcttcacctgtgcacatgcatttgtatagcatctcctggttttaatcttctgtctccaatcttggtttcgctaatattgatttagttgatggatattcttttgtctttggaaatataatttcagctcatcggcatattggggagacaaatatgaatctttacagtagcagatctcacactatttttcgcatggtaaatatgtatactcaaccttagtgcttagtttaatgtaagttgatttttaactcgccagcttttttattaaacagattatagaaagtagacagaagatgcaagatgaaggtgttggaaattcctgtgatgcagttcgtgtttctgttctggtattattccattggaactagtgtttttgttcccttatatgcaacgtattattttctttttcagctttcttctttcttaccatttgtagaatttggtggatctagctggttcagaacgggctgcaaaaaccggtgcagagggtgttaggttgaaggagggctcacatataaacaaaagcttgatgacactcgggactgtcataaaaaaactgagtgaaggagtagaaactcaagggtaggtttttcttgtcagttttgttagggaacgaagcatatggtacataagcattaagtgtctaatcttattggccttttatttggttgagtcagtggtcatgtcccgtaccgagacagcaagcttacaaggatcttgcagcctgccttaggtgggaatgccaacacagctattatatgcaatatcacacttgcaccggtatgtattaatcaccaataatataatcaggataagcgaggcagatgaaaccaataacaatctttattttctctttgtttgctttggtgcgattaacaatgttaatattcgtttcctttggtgtgattaacaatattaatcttcgttttgatgttagattcatgcagatgaaaccaagagcagtcttcagttcgctagccgagcactgcgtgtcactaactgtgcccatgtcaatgaggttggatccgaatcattttgcacatattctctctatcttaacatgctttctaattaagtatgttagaagcattttcttaaaaactaattatccatccattcttgtttttccacttttcaatacagattttgactgatgctgctctattaaagcgccagaagaaggagatagaggagctcagatccaaactaaaggtttcttgatcgttttcagtattattttcttaaaagttatctcaagtttatatagtgggttaataaatatcagctattctatcgcagacttctcactctgaccattcagaagaagagattcttaacttgcgtaacaccttgttgaaggtatgtcattttttctttattacttagttgtttattctttcatacgtttctgatatatccttatatcctgtttttctgcagtctgaattagagagagagcgaatagcacttgagttagaagaggagaagaaggcacaagctcagagggaaagagttttgcaggagcaagccaaaaaaatcaagaacttgagttcaatggttcttctttcgaatagagatgagaagcgtgagcaggatcactttaagaaggtttttcctgtttcttccatcaatttacttttcgataacttgagagtttataacagcatggccaggtgctagcatttatcgctaaacttcaaattacggaaccatagtggaaagaggataaacatttgatatgtagtggaacaagatatgctatgcgacttgtaacctaattctcgcctagtttaattagaatgatctcagcatctcgttgttgaatactcttgttggcgatgacattagtatgacactgttaagtgaattaattaagtatctttgtcacatttttttcccatctcttcttagatttgatatgttgtttgtttgcagggaaaaaggagggatacatggtgtattggtaagctttcacgagactccacatcagaggtgaatgttgcataaatgaagaaaaacacatgagaaaaatgttgactttggcagccataaatatactttgtttctttcgtatcaggatcagtctaatgttttgtcaaggggatcctctcttgaatctgcaagatccgagcgtgagactggtccactacttccattttcagaactagtaaatgaacctttatataacattaacgaggaagatgaagatagtatcgagggaacccttgaagattctgtacttccagatccatgtgcattagtgaatgtgacaagcagaaagaaaccatcaattaagcagaaaaatcctgtagtggtgagtgtttctcttttgtatgtatcttgtgctcttctcgttgtaaagctgacattttgttagtgtttcataggttgaaaacgaattagatagaattcaaagggaatatgaggctcttctcttgcaatatgaaaccgaggtaatagtttgttcttctcaatatcagtagtttatagtttgtatttcttatttctccacacctttcaatagagaatcatcagcgaaatacaaattgagtgccttaaggtgaaattgggtgaagatggtttatctggtgatgcaaaatgcaagcaatcagaagtcgttggcaacgtgcattgcgaagaacatgttgtaaacttaagagatccagaagctattcttctcatcaagcaactacaagagaaggtgcatgtcttcttttctttacttacaactggaccgactatttaagtagcttctcttgctttcattatggctttttgattaaccatatgttctgtccaaaagataaacatgctagaattggagaagtcttcaagcaaccgaaatcttgatgatcttgttatggtagctactgagcagaatatatgtgccagggaaaaatttgctgaggtatatgtggttctttaactgattgtgatttgctgttctgttcagacacctggaaaaagaaatgcctctgtgcttcatgaatttaagaaattggttagaaaaggttcagataaaaatatatttttactaatatgaccatatatcgttttagttgtatttttgtttgttggttaaagtatcgttttagttgttgattacatgtttttggaactgtttatcacataggctcttattattagttgatgttcttgttcaaggagaatcatcattcttaattgtcagtggccttactttttacaatatgaactctttttcgtcttaatcactttatacctttgctcaacaagtaaaaagaaaattttccttttaagtcagctttctagacttattttggtactgttaaagggttttaaaccttttatgtattaaattctatagattcaagaagagattcatgctgctagagaagaggcccaggttgctcgtgaacaacttgtgtctaaggagtctgaagttattgatgtgattaatgttggtctccctttcaaatctgaagacaatttcttattgttgccacccagtatgccattgcctaattgaattttttactttttattttgaaggagaatttcaactcactggtcaacgtagcaaccgaaattgaagtcttagagtctgaatttcaaaaatataaagcatcagtagaaaccatatcatcagttatgaatgagggtctccaagattttgctttcttctctccgttgatacatgtaagtactttgcactttggtatattctcttgcatcgtttttttctgtgcgggtataagctgtgtttagtgcagcacaccttaattatggctggttgtaaaggttaacaatcgatttcatttatgataaattttctcactgcaggatttcacattgtttgtgcgccaaagttctgagcaacatgattcacttatcaacagctaccaaactgtccaatctagtctaaaaaaaaaagttcttgatgttgagaatgagaaggtccgacattttttattctcctctcaccctgcagttgatgttaaatttgtgagtattttagcttaagtcatgattttgcttttcagcttcttttgcaagagcagtgtgctggtctgcagagccaaatagaagaactaaatcaggaagcccaaaagcatgaaacttccttaaaggtattttggttttcttcaaagtactagtttgtttcttttcattcttcgtcaaactctccagtgttagaagtaacttgatgtttttaattatttgttagatgctctcagaacaccatgagtcggagaggtcagatctactctctcacatagaatgtcttgaaaaggatatagggagtctgtcatcctcttccttggccaaagagaaggagaacctaagaaaagattttgagaagacgaaaacaaagctaaaagacactgaatccaagctaaagaattccatgcaagataaaaccaagctagaggtacgcggtggacccaattcttaacttaagtagtactagatattttgtcgcataacccatctaacttgtacaattgactctgatatccttgcaaaggccgagaaagcatctgctgaaagagagttaaaacgcttgcatagccagaaggccctactcgagagagacatcagcaaacaggagtcctttgctggtaaaagacgcgactctcttcttgttgagagaagtgctaaccagtcgttgcaggtattatccaatgttttgttttctgcgggatcttctttttaccattctaatattaagtattttgtccaatgttggaaatgcaaagtcgagatatgggaagctaataaaatgtacgaaattgttatcttattgcagcaaatctctctctgttggttgaatttgggtattgttcaaacattgcatgagcatatttttctatcttttatatttttcccagtggagagccatatcagtgttttttggttgatatatactttccgtccaagtgagatgctcgttctcatttctacttcacatttatcaggaagaatttaaacagcttgaagtgcttgcttttgaaatggaaaccacaattgcttcactggaggaagagctggccgctgaacgtggagaaaaagaggaggcactctgtagaaatgacggtttaggctcagaaattacagatctgacagagaaactggagcactcaaatactaaactagaacatcttcaaaacgatgtcacggagcttgtacgtcttttcatgaaattgatgattgatccataaattgtttatattgaatttgaagcagttagtgttttgaagatgcattgcagtttgttcaaaccgtatgttatgttttgttccagaaaacgagacttgaagtctcatcttctgatcagcagcaactggaaaccaatgttaaacagttgcttgaagaaaaggaagagctagcaatggtatgatgattctgtcacagattttaaacttatttcttgtttgtgtaaatccagtaatgtttcctgttgttcagcatctggcgaactcacttttggaaatggaggaggagaaagcaatatggagctcgaaagaaaaagctttgacagaggctgtggaggaaaagatcagactatataaaaatatacaaattgagtcactatccaaagaaatgtcagaggtatgttccaaacaaggaaccttttatagtgagaataaaacccaaaattttcttgcaacatcagtttggaggtcgccctttagcactatcaacttgtttaacttgcttaggtaataggcatagcttatcctatctgtttggatctataagtatcatcagaatgaactccctgtagcgacaaacaaaaattatttggtttttaatcctttctctagtctctatatataatatatgttccgacggaaaaccccttttgtcatgctattttaagctctcgatctcatttaacttttaggaaaagaaggagctggaatcttgtcgacttgaatgcgttactcttgctgataggcttagatgttctgaggagaatgctaagcaggacaaagaaagcaggtttgtactttgcatttctctactttagaatgttaaattatatctcctttaaaattttcttgttaagctttccggcacttcactgatctgtatttctctagttgatgctatatgtcctttgacttcagtttttatgttaccctgtagcctggagaagtctttggagattgatagactgggtgatgaacttcgatcagctgatgctgtgagtaagcaatctcaagaggtaagaatcatttcacaaaaggttttatctctgaacgtctagtgcagaggttgtattacaattttcgatgagaaaactaaatttggaatgttgttgatgacaacacacctgaatttctggttatggtattcatgcttttggtatgctagttaaagatcagatgacatcacttgcaaatttgttatgttaaagatgcaaactttcctaaacaaaagttatatgtgcacctgcaggttctcaagtctgatatcgacatactaaagtccgaagttcaacatgcttgcaagatgtcggatacatttcagagagagatggattatgtcacaagtgagcgccagggtttgctagctcgcatagaggagttgagtaaggagcttgcttcatcaaatcgttggcaggtttggtttacagctcacagacttgactctattacagatatagtagtaaccattcattctcactaaaaccctattcctgccgtcagattgaaaatgcaaaaaatccaattcaagatttgactctcaaaatctcaagccaagaaaccaatctgcacaaggtaatgccaagtgaactttctgattatgttttttctcattgattgagattgatcctttcctccaaaagaatcaatgctagaaaaattgcagtttcaacgagacccattgttgattgtgtgcgatatgtttaactttctggatataaccaattttcatatttttgctggatatgattgcaggatgcagctgcagaaaacaaggagaaggcaaagctaaaaatgagactcaggggtatgcaagcacgcttagatgcaatcagtctacggtacaagcagtctgtgcaagaatcagaacttatgaacaggaagttcaaagaggcatctgctaagctaaaggagaagttagcatcaaaagcactcgaagttctcgacctcaagaagcaactctctgcttcttcaagaacaatgtgatgagcttacatcacaactcttaagtagttgattcacggctagtaaatgtcttaaagctgtaaactgttaaatgattaacgtcataatcacagagaactgatgtgattatggaagagtccaatacatatataaattatgataggtagattaacaaattacatggagtttatgctaaagtaattaagaggagaaactaagggcattttggtccaccgctcttggtcttccagttgttatagcaaggacatacttgcttattgccataagtacctgggggcacacacaagcacttgttacaacatttgttgcagaagaacaaacacggcttcttgtattgtgtattcgagcatctatctccacaccttggcccgcactctaataaaggtggaatagcggatttagtttcgcattcagcacaaacattaattaaaaactaggctagtcagtgggtttaccttggggttgaagactgccttgagtagtaccgtactgccaaaatcaacaagaagatgcaaaggatgttaaaaaggttttgtagattcgatgaaactctttttttgagtagtgatgaaccgagaaactcacttgagagttattgtgatgcggcagttgtggttgcgactgtggtggttgtggttgtcgagcaggagattccaagtatataggctgtgttttattcagggacgtataagataaagttgataaatgtgaacatagaggaatagagtgttgaaacacttacatgcatatgggcagacagaagaagatgtaacacaacaatggagaaaacaatgatgctaagttttgttgccattttctgaaaacagaaatgattgtaatgaagctcaggtagattatatattttgcagactaagctcattatgaacaaatgataggggtccactatatatagtccaatttccaaatactttttaatctagaaaatatatttctcctgtcactgatttttttgcaaactagaagagtagaagccattaataaaattattgtctaaatatactcttgtttttttataaaacttttcaacggtctaacgataatgaaattcatggattgaacaaccaatcactaatcatatgtaaaaactaaaaactaattttaaaatacttaattactgattaaacaccagaattatgtaagatatactacatttcccctaaaaaatatctgaagttgtgattttgtttatgcatggaatttgtataacaaaaagtttagtaagtacaaatatagacttcatgttcccaatcttggacaagtgaagcagagagccaaagatgtgataacgaacgaaacgaagaatagcacatgtgtgtttctactgctttctaaccctatctctttctcgtgactccacttttttcccttatactatttgttttaaatcttgtgatttgtttctaaacgttcttggagacgaattttgtaagaaaaagacacgtggtgagaaattttgggattcgaagtagatttctctgtaggcttccccgtgacctaattgtgattacctgccaagccattttgcatgttcagaattgttttgtttggtttaaaatgttcagaaagttcttgtgtctcacattgctgggcctcttcccttttctttgtcttgggcctttaactttttcttctttatttctgtatccatattttgtgttgggcttaggcccaagttgtttgtatcatcataaaaccaaaagtcattaacatgaaaactttttgacaaaatacattttacatctgatatgcaaaaattaagatttggatttttgttaactactttgatattattaactgtttgagacaaggaaaaaaaaacaaatatttattatttaattgaaaggctttaatttagttaaggatgaggaagatgaagatgatgatgattcgaaaatgaaggtggtggatactgcaaatggctgctgagtgctgagacactctcgaaccccacaaaccctaaggatctcctccgaagatttccactattactggaagtgatatagatacgttgcaacaaagaagaccacacaaaaacgttattgagcagccgtgaaatcgatttaccaattgaagcttccccccatggttggtctctatccgtctcttattctacttttcgggttcagctgttattgattgaaagatttaaactttataggtatttgtgttcatcaattgattctgtttgcttgcttcgaaaattggttgtggctgaacatatatatcagtgttcctttctctttatttgatttctatctatatagtttctccaatcttagcatccacattgttgtcactttgagagtactatggaagcttaaagtagacaactttattgaggttgaaaaatgcatgaatggaaagagagaacggacttaacaacttatcaagtatattttggttgcagatttgactttccctgatgctcgtttgtgggaaagggtttctaaagtgcagagcacctggagttccattcttttgtgacaaaagaaaatccttcttcactaaaactaagaggggctttcacagtttacctttgggcactggggtccgtgtttatttcaacaacagtaagttatatacaccactctgcttagacttgtctgtttcatgcctggggatggtgttcttattgctctgttggcgtctttagatcttaggtactcaagcaattcaatagaagttgtggagaaagctgccattaatatgggttcaaaggaagacaaggcagataatccagctttatcttcatatgatgatgccatggaagctctgtcgactcttatttctcgtcgaaaccgtggggatcgcacacctactaaaggaaatcgtgacaagcttgaacaagtcgtcacatatctcaaggtgatacagccatttacagtcaaacgctattaagtggttctgtctagtgtaagcataagctctaatgaaataaaaattatatcatacaaagaccgttgagaatattttcaatattgtagtgcaacatggatgttagataactcattctgaactgtctcaaatgatcatggaatttggtagatttttcttctctttagactgagcttatctgggccttctctgttgagagatcatgacttatgttgcctctggccattgagaattctggagtgttgtgattcaagtcaatttgttttatcctttccgttgaagacttttaccttaatactgtgaatttgtctgctgttttggtttgagaaatacagattttggacctggaagacaaaataaaagaactaaaagttattcatgtcgcaggaacaaaaggaaaggtaagttgctgtttcactttagctaatgcaggtcctaagatttaaaatgtaacgtgaaaaataagtcagtagaaggaatgtagcacttatgtgagatgctgttgtttccaatttcgagcaattagcacttaacagaaaaatcagatcactcgatggttaacaatatatgctgattaatcattatatttgatggtaccatctaatgcatgtctgagcctgcaattccgatttctaaagtctggaattc

SEQ ID NO: 404 - DNA, 118107 bp, Arabidopsis thaliana
gaattcttgtagatgtctctttatgtgcatgaatgattcattaagctctttatgatgcttaacggacttttatgaatgtttgttcttaaatttcaggacgggaagcctgggcttcagggaatcttgaagaatttggaaagctaatttcagcatccggcttgagttccattgagaattacgaatgcggtacattacactctcttttcttctctcccaaatgcaacatatcctatagtgaatacagaccactagtatgcttacagacattattctctcttagattcattattttggttttaaattctgtgagttttgtgaaggtgcggagccactgatccagctatacaagattcttctgaaggctcctggtgtatatggagctagattcagcggtgcaggtttcaggggatgttgtctagcctttgtagatgcagaaaaagctgaggcagctgcttcatatgtgaaggatgaatatgaaaaggcccaacccgagtttgctaacaatctaaatggaggaaaacctgttctcatctgtgaagcaggtgacgctgctcgtgttcttctctgatcaatcctggagtttttggtttcttccccacttaaactcgatttttttgtcccttatatctctcacgcttattgattctttgcttgtttatctctttttgatcctgtctgagaaattctctggtctctttggtcggagtttcatcattgcttgatacattttttttgctacaaatacataatgtaaatcattctctaccgttttcgagtcgatagaagaatcgcaaacttcaaaaatgtgactaacatttctccataaatttgttaaattttcaacaattggtgaatttagttctgtaattgatctaacaaagacactatacaagtatgaaattagaaattgaaatcgaaagttagttattataatcttgtttgtataaaatagtgtatatctcaaatagagatacagattagttttttgtttggacacaaagacccccgccaaagtattgaaattcgcgcctgagaaattctccggtgtggctctctagggttttagcactttaatccatttgtacttgtaaaaatccctaaaaccctctgggcatgactccagtattatgccattccactgcttcaatccctaaccctaactctctcatgtctctctcctccactctccgtctctcttcctcccttcttcgccgctccttcttccgattccccctcaccgacccattatgccgtctccgccgcactgaaccctccgccacgcgtttcttctcctcccgtactcctcggtccggcaaattcgttgtcggtgctggtaagcgcggagatgagcaggtcaaggaagagtccggagctaacaatggcggtttggttgtttctggggacgaatctcgtattgtgccttttgagctacataaggaagctactgagtcgtatatgtcgtatgcgctctctgttttgcttggacgtgctttgcctgatgttagagacggactaaaaccagtacatcggagaattctgttgagtgactttcgttcggctcaaagctactgatatttttaagcttagtcagtggtattgttccttctaatgttcgattattttgtcttccagctttgcaatgcatgagttggggatgtcatctaaaaaaccatacaagaaatgtgcaagagttgttggagaggtatattattgatttttggaaagtgttttctcagtcgatttctctaaatatcttattctgaagaacgatttgtgctgttgaattctttgggttttcaggttcttggtaaattccatccgcatggagatactgctgtttatgattctcttgttaggatggctcaggtaaatatctgaattcatggaatgtagtccagtcctcaaataatgtttcaggcacgattcgattcttcccaaacttctgacttttttgttttaatacctttgtttttttggcagagtttctccttgagatgtccacttatccaaggccatggaaattttggctcaatagatgcagatcctcctgctgctatgcgttacactgaatgcagactcgatgtgagtgccttttaccttactttcccttctagttgaaatggttttccctgcaattcactttttctagttgtttcacttgtctttgctatctatagtgtatctctcatctctactttttctcttgtcttgagatgaacatgtatttttgtcagtgttttcagctgattgtacttattttttttctgcagccactggcagaggcagtactattgtctgatctggatcaagatacggtaacctcactattaatttgttgccaagtttaccgatactcaactagatggtccttaacctcttttgttttggcaggtggattttgtggccaattttgataactcacaaaaagaaccagcagtgttgcctgctcgtcttcctgctttgttgttgaatggagcttctgggattgcggtaaaataatcaaacaaatcttaaatctgaactccttaatagattttgttcgagatttcttcagttaatcttgtgcagattttccctgctgtatgagattgaatatgcagttgaatcttgatcatttcacattgtttaggttggcatggcaacaaatattccccctcataatcttggggagttggtagacgtgctttgcgctttaatccataatccagaagcaacggtatcactcatctcccctttgtttttctgtgatttatcaatttgtgggtcttttgttttacatgaaaaatcctctgttttataagtagacaactcataagattttgtttccactttcttcttcgtctgggcagctgcaagaactgctggaatacatgcctgcaccggattttccaactggaggaataataatgggaaaccttgggtaactctttgctttccaatttctccccaaagggatcttatacattaatgacttttgtttgcccacctcgtttgctaattttttgagagtaggctatctataggatcaaatagaaagactcacttctaaagtgtgaaactttttttttatggaaatagaaaagcattttgttttgttttgatctatgattctaacagattacagaagctgtacctatatcttaaaaggaacctagaaaatgagtgaagaggatggtccagttaatagttttcctttatttgtctgtcatatgcagtttttgaatcatcatgtttttttctgatggtgtgagtgattttttaatattctgaaagcttatatgttgtgtagtacatttactctcgagtttgttgaatacctttattaaaaaaatagtttgcattcatatgccatttccttttacaatgttggattcttataattttctaatgtgtgtttgcgctttcaagggttttggatgcttaccgaactggccgagggcgagttgtagttagaggaaaagctgaagttgaattgttggatccaaagacaaagcggaatgcagttattatcacagaggtgatcaatttagttttttagattaatgttcagatctccatggatgagggtttcaaaaatgtttattagcagtagagtaatgcctttagtgtgactttattgcagattccttaccagacaaacaaagctacacttgtccagaagattgccgaacttgttgaaaataaggtacaactaaacttgcgacatctaatgtttattttgcttcacttagcaatatgtacttattttactcagaggtgtgttacatttctagtatgtccttatatgcttgcaaagtttcttctttattcattgatgttggtgtttgttttcagacgctagagggcataagtgacatacgtgacgagagtgatcgtaatgggatgcgtgtggttattgaggtattacactgtttcctctgcacttagatgtattagtctgctttaaaatttcatattggaaggtaattaagataatttccaatacttctctatagctcaaaagaggaggggatcctgcacttgtgcttaataatctttaccggcatactgcccttcaatcaagcttcagctgcaacatggtggggtgagttgcatcaaccgataacttcttatttcctgtacttttttgaagagtgggcatataaaagaacttgggcattttccaggatgactagttgaaaattctctaatgagtatgttatgcttgtaaatatattaaggatcatgtattcacatatgcgtttttctttatcgtaactggattatggtattctgtgttttacagtatctgcgatggagaacccaagctaatgggattaaaagaactacttcaggtgaccacttgtctatgtaaatcatttatctacgtagcccacaaggagtaatagaaaagtgaagatcagagataggatatttacttctgtgctactgtaatcacattttaaagtaaatttgttgattactttctgtttcttgcttgtgtgtaggcatttatagatttcaggtgttctgtcgtcgaaaggcgtgcaagattcaagctttcacatgcacaacaacgaaagcatattattgaggtgcgactagaaatatttaactttcttaaatctgctcgtgaagaccatgatgtaatgatgtaaagcattttttctaatatcttcactgtatatatgcttagggtattgtggttgggcttgacaatgtggacgaagtaatcgaactcatcacgaaggcctcaagtcattcctctgctactgctgctttacaaagtggtgagctatattttactttgacaatataatcaatgtaacaatcttgaactgcacattataggttgatgtataaacagaattcggaaaagtgagcgagaattaggagtcaaaaagtagactagagccaatttttcttaggtggactgatagatgtagtctaggatgtacactattaaaagaatacatcttgtggtgaactcttccatattacatttgaacattatatatttcttgtctttttatctggaactgctggagtctcattcgttgtaagatttgatcttaattgcaaagatttcttagggatttatgctttgtaagtctctattgtaagggacgataccatatattaaaattaacacttgtcaaacatttacttatgtagaatatggtctttctgagaaacaagctgaggctatactggagataactcttcgaaggctaactgctcttgaggtgctttcttattctcgctaagttcaatttatgaaacttgtaggcttgacaatgttctaactagattctcccttcataaatgcagcggaaaaagtttactgatgaaagtagttcactaacagagcaaattacaaagttggagcagctattatcaacccgaacaaacatcctaaaggtgacacactcactttttagttatctgttcttttggctattgatattagaaatttagaacacctagatgctagtagaatgatagatgcatcaatatatgtactccaaatttgtaagcttgactgtttgagtccactgaggttcaaaatctagtccatgcattatgatgtggtataaggattcaaatgcttcttccatttcttgtttggtacttatttttatatctgtaaagctgcttactatatgttgctgttctgggccaatgttaggaagataactgatacatgatgattttcttgtagaccaaaattgaactatttgcttcgtttacttcattgtatattacttactactttattctcttcgttgtttttcttgtatttttctttagttaatcgaacaagaagcaatagagctgaaggacagattctcaagtcccaggcgttcaatgttggaggattctgacagtggtgatctagaagatatagatgttattccaaatgaagagatgctgatggtatgttgcatacttaaacctagaaagtttctcaacgttgaaatttttgttgtttgttttgtaacttttgatatggatgactataggcagtcagcgaaaagggctatgtgaagagaatgaaggccgatacattcaatcttcagcatcgtggaacaattggcaaatctgttgggaaactaagagttgatgatgcaatgtctgactttcttgtttgtcatgcacatgaccatgtcctctttttcaggtatgtatacctcaaaatttcctttgtgtttgctacgcacatggatattaattttctgccttgttgtaattcattgcttatacttgttgtacattcagtgaccggggtatagtttactcaacccgtgcatataaaattccagaatgctctcgcaatgcagctggtacacctttggttcaggtaattacatatctgtgtatctatgttttccttctgctatgtcaaaaattattcaattttatgaaaggctaatgttttgctgtgttcatgtgacttgtggaagcagatattatccatgtcggaaggtgaaagagtaacctccattgttcctgttagcgagtttgctgaagatcgctacctcctgatgcttacagtgaatggctgcatcaagaaagtatctttgaaattattttcaggaatacgctcaactggaatcatagcaattcagttggtttgtcccctttttcttcttagtcatataggaagtcttcttaacaaggttactctaacaaaattatttgtcttcagaattctggtgatgaactgaaatgggttcgttgttgctcaagcgacgatcttgtagccatggcatcccaaaatggaatggtcgccttgagtacatgtgatggtgtaagttgtggctctcattttttctaaatgattcatctttcatgtaaaccttttaatacttgagcaaactctgatggcttttgtttgtttaggttcgcacactgagcagaaatacaaagggagtgactgccatgagactcaagaatgaggataagatagcgagcatggacatcatacctgcatctctgcggaaagatatggaagagaagtcggaagatgcttcacttgtgtatgtttttcttaacttatatctgctgatgtttgctctagaaacttacttatgtcttactgtcttcttttgttaacacaatcacaaaagcaggaaacaatccacgggtccatggctattattcgtgtgtgagaatggctatggaaagcgtgttcctctgagtagcttccggcgttcgcgtctgaacagagttggtttatctggatacaaggtaggatctggattttcaccatttttggttgtgtttgtgttgatttttcccttacatctaaatctcaatttgtcagtttgctgaggatgatcgtttggctgctgttttcgttgttggttactccttggctggtaagtatacactgccacaaatacggatttaaatgttctttgattgctgtttatatataatctcaccattgggttttcttgcagaggatggggagagtgatgagcaagtagttctggtgagccaaagcggaactgtgaaccggatcaaagtcagggatatctcaatccaatctcgcagagcacggtactcccttcatgtgacagtcttttcaaatgtatattttatatggtttctcatttgattgttaatttctcaggggagtgattcttatgcggctagatcatgccggcaaaatccaatctgcatctctgatctctgcagcagatgaagaagaaacagaaggaactctaagtaatgaagccgtagaagccgttagcctgtaaattttacaatcccaattccaccagtttttgagacaattgtcaagttcagtacatagagtctatgtgctaactctcttcattttgtttttttgtgatgttactacgagaagagaaaaccatgatcgaagttagttattaacattaatctgcttcacattttgttgggtttaactatatacatatgttaagaaagttgaaaccaattattctggttataaccaaaacagtagtgctcttctcacttttgttttgttgttaaccacaaatcaggagaaatattttactagtggtacaaagacgtaagcaccaaaccccataatcacaagagcagctacaccaacattcaccaaaggtatgtcatatgtccgactctcttcttcacccattcctcttcctcctactgcaagaggaggatccatgtcgctcttcttctgtccttctttgactagtaatggaccggtttctggttccacgacttcagcattatcctttagatcgcctctatctttggctaaaccagcttcgtctatcttcttctgctccactctgtcttgaatctctccttcactaaccatgtctccaaccatctcattattctcatcctgcttgtttctcacgccatcatcaacatccagtttgattctttcatctccctctttcgtttttagcttaggctctgcttggtttctctgagcaacattcttctctattcttcttgcctcatcaccaacaactggttttgtaaatttatcttctttctttggtcccaagttaatccttcctccctccagcttctgacctatttcaccatcttcctttttctcaacaactttggcatgttccttggattccactctagcatctatggtcggcgttctgctaatctctttttccttcaccttctgtccagtcttaagctgacttatatcatcatctttctttctctcaattactttctcttcttttgcctgtaccttaggttttaagctaccaccaagggttggtgtacttttagcctcttcctccttcaatttatctcctatcttttgctgaactatgtgagcagcctcctttctctcaaccaccttctcttctttcgcacgttctcttccccctaagctagggattgcctctcgcgctttaactttcgcttcagacttctcttgactgcccgttggcactgctcttttaccctcaaccactgatttatacgttttgggtgcttcttcattcaacgttggagtggttttctcttgacttgttcccacttgtttctcctcctccaaagctttctttcgtcccaaggtactcccattaggaccaggccctccacttttctcctgattagacctctgtccaatcttctcctgatcttggactgctttctcctgtttgttagcttccacgattgctggaaactcgatggtcaagagtccatgtgagaaggaggtgctcaatttggtcatgtcacaggtatcagggacacggtaagcttcactgaaacgagccttagtctgagcagagagcggtcgctggccttgaatctggacagtccttgtcctctcatccttttttatttctatttgatccctataaaaccctgccggttccacacaataaacgagaaattcataaagtttgttatcaattaaagtttgatctcaagaaacaaaaagaaagaaagagagaagaaaaaagaccaggaagattaacgtagaggaaaatggaagatccggagttagtccattgagctctcggcttgaaactactcactgtcggagccagcggtggcggatgacggccacctcccggccttggtctcttgaaaatcgccgccatatatgtttatatatagatcacactatatcaggacaaaaagttcaaagcctttacgaaataaatgaatcaaactgtatatgaaaacataaaaaatgtttgaatgatgtatataagatagaaagagaggtaagaagagattttgagattacggtatgggtttaggattgctttagggtatggactttgtctgtttcttcatcccaaggtctcatatgtgtaaatagtttcttgtacttcaaggaaagaagcttttaaggttttgaagaatatgcgtatcaacacaaagtgatgtcgttttatttgttatttccattttttttttgtttccattttaattaagctagtagccgatatatatattacgtggcattcaacatgtgaaattaaaagaatccctggacctaactaaccacatcacttcaccggataaaacctccaccgtcttcttccgccgcaatttctgtctccatggccggcgttaacctacagctccgtcacgcatactccatagctcaattcgttccaactgtttcttctcctcctcctcttcctactcagcgagttcgcctcgggacttcaccctctcgtgttctattatgcaatctccgagctaattccgccgccgctccaatcctgcgaactactcgccgttcagttattgtttcggcgtcttccgtatcctcagccgtcgattcggattcgttggtggaagatcgtgatgacgtggggaggatcccgttgcttgaagttagggatttgagagcagtgattgctgaatcgagacaagagatactgaaaggcgtcaatttggttgtctacgaaggagaggtgcgtattaatcaatgcaattttatggttaagacttgaaatttaatttgcagaaagctttgcctggtagtgctgtctcattatatgataaagttttgagtttgatatcataacttgtgaattctatttgtgtggatttgttttgcattgctgccgattgtaatccatggcttcttttgtggttgctaataggttcacgcagtgatggggaagaacggttcaggaaagagcacgttttcgaaggtgaacattttatttgtatatcttgtatctcaggattaacattgatgctgcagagtattgttctctttctgtttgttatcttagtgagagtcttattatttgtaggttcttgttggtcatcccgattatgaagtgacgggagggagtattgtgtttaaagggcagaatctacttgatatggaaccagaggatagatctcttgccggtctctttatgagtttccagtccccagttgagatccctggtgttagcaatatggatttcttgaatatggcattcaatgctcggaaaagaaagcttggtcagccagagcttgatccaatccaggtgccttatcgaattaaatgacttggatttggtttgcactgtttcttacttgttgttgtttgctaaatggtcccaattgtagaactgtctatgtattatgtcttactgatatcacatggctcatgcagttctacagccacttggtatcaaaactcgaagttgtgaatatgaagaccgattttctcaacagaaatgtcaatgaaggatttagtggtggtgaaaggaaacgcaatgagattctacagttagcggtaatggttctgcttcccttgtttctcagtatccataaggactgcatatgataagaaacaaatgtgattagagaaggtagtggattactaagcttgttccatgctacagtgtgcaaaaccacaaggctaatagttaggaatttcaggatatctgggtagattagcttaagcagttacaggttttaccataagtagacgcggttattgcatggcagttagtattctattacaagtatttgactgcagttttagctaaaaagacatggcatgttatatgtcttcatatctctttatattttcctgatcttgaaatatctgcctcccaaggagtggtcatttctggtttatcgataacatgagaacactattagtctcctattctttgtaagcaatatatggaaagaggtcatggaagtacgctaatgcaacgttttcctgtccttgcaggtccttggagctgagttggctatactggacgagattgattcagggttggatgttgatgctcttcaagatgtggcaaaggcggtgaacgggcttttgacaccaaaaaactctgttctgatgataacgcactaccaacgcctacttgactacatcaaaccaactctcatacatatcatggtgagcattgttgccaaaccagccttctttactggctacacaatgatcatatatattttggtaagctcatgtatgtttccttgggtttcaggagaatgggagaatcattaaaaccggagacaactccttggccaaactactggaaaaggaaggctacaaagcgatatccggttagttatcgcggatcatacatataacctgtcttccttctttgagagaccatggttattatatgggacaaatacaatggaagctaaagctgatgattggaaactgaaatctatcactacaatctttgacccgtagttttggtttgcaatttgcatgacaaactactttattgggatgtgaacagtattccacacctttttgtaactaacaagtttaaaattcagttaataaattttgttattataaatgctcttataaagtttgagactttaagtggatcaaatccaatcaaacctagtggttacttacattacttgagaaatttgacaaaataaaatttaatttgattattctatcgcctgctgctgctggaacgagttggtaatagaaaacaaattcataatttatgacaagaagaacgcaaaattcgctgatgattattaaacccaaacgcgtttttcaaactcgttcaatcaatttccttcatcatcttcatcttcttcgtaattgacttatcgaacaagattacacctccctttagctttttatgcaaatgtagtgcttttaagcattctctcgatttccctcccttattttccgacaaataccaaaccaatattgttccttttcttttcaatcccagatcgatctctttgttttcagacaatttctgttgtctggattcggttcattgcatcgttctttgtgttgggttcgtttaaactttcgattttcccattttgaaaattttgatttttttcttgtggcagattgattgttgttgtgcaagattcatccgttgcatcgacccgagtagggtttttgcttgttccatcggtgttcggagtttttaaaatcattgcctgatccggagtgatcaaatcctatatattgtcgttgcacaagagaaccaagtcttagattataaagagatttgactttcacttttagtgtctatgatcattaggaatgagatcagatcaggtcaatttgtgttcttttgatcagatcttgatgtggaaagcttgatgctgttgattataagtagagagatattttgatgggtaatgcttgcgttggaccaaacatttctggaaatggtttcttgcaaactgttacggctgcaatgtggaggccacggatcggagctgagcaagcttcttcttcttcccatggtaatggacaagtttctaaagaagcagcttcagaaccagctactgatcaagtccagaataaaccccctgagcctatcacaatgccaagctcaaagaccaatcccgaaactaaactgaaacccgatctagagatccaacctgaagaaaagaaggagaaagttcttgcagaagaaaccaagcagaaagttgttcctgaagaaagtaagcaggaagttcctcctgaagaaagtaagcgggaagttgttgtgcagccggagtcagcaaaaccagaaacaaagtctgaatccaagccagagacaacaaaaccagaaacaacgtctgaaaccaagccagagacgaaagctgaacctcagaagcctaaacatatgaggagagtgtccagtgcagggcttagaactgagtcagtgttgcagaggaaaactgaaaactttaaggagttctattcattagggaggaaacttggacaagggcaatttgggacgacgtttttatgccttgagaaaggtactgggaacgaatatgcgtgcaagtcgatttccaagaggaagcttttgactgatgaggatgttgaagatgtgagaagagagattcagataatgcatcacttggctggtcatccgaatgttatatctattaaaggtgcttatgaggatgttgttgcggtacatcttgtgatggagttgtgttcgggtggcgagctttttgatagaattattcaacgtggacattacactgagaggaaagctgctgagcttgcgagaaccattgttggggttttagaggcttgtcactctcttggtgttatgcatcgggacctcaagccagagaattttctatttgttagtagagaggaagattccctgttgaaaacgatcgactttggactctcaatgttctttaagccaggtttgtatttatggtaacttgtctttgatcattcaatttacactatctatgtttgattttggaatacttactattcttccacttttggcagatgaggtttttacagatgttgttggtagtccgtattatgtagctccagaagttcttagaaagcgttatggtcctgaatcagatgtgtggagtgctggtgtgattgtttacattttgttaagcggagttcctcctttctgggccggtaagagaggttacaatgtagataaatgaatatgattgttcttattaggctctgaagtaaatttgttttccatgaaatatacagaaaccgaacaaggtattttcgagcaggtccttcatggagatcttgacttttcatctgatccatggccaagcatctctgaaagcgcgaaagacttggtaaggaaaatgcttgttcgagaccccaagcgaagactaaccgcacatcaagtattatgtaagttatttaagtctaaatcattcatcttagttctattgagcacagaacataacctggtatatcttttaacaatatgctagttgattttcaccgttgtgtttcttctcaaggcgttttgtttatgaacaggtcatccatgggtacagattgacggtgtggctccagataaacctctggactctgctgttctgagccgtatgaagcaattttctgcaatgaacaagttcaagaaaatggctcttagagtaagttatctttttaactctaaacaagatccaaacgaaagaaactcagaagatagaaataagtttgtcctctttttctcaacttgttgtaggtcatagctgagagcttatctgaagaagaaatagccggtttaaaacaaatgttcaagatgatagacgcagacaatagtggtcagatcacttttgaagaactgaaagcaggactaaaacgagttggtgccaatctcaaagagtcagagattcttgatctaatgcaagctgtatgtcttttgctcttttcctttactatgaattccaaacttcaatcattcaaatcgagtttatagttccatgttttgcaataatcttttatgttttggtttgtctaattcaggctgatgtggacaatagcggaacgatagactacaaagagttcatagccgccacattgcatctaaacaaaatagagagagaggaccatttgttcgccgccttctcttactttgacaaggacgagagtggctttatcaccccggacgagcttcaacaagcttgcgaagagtttggtgttgaagatgcccgcatagaagaaatgatgcgcgatgttgatcaagacaaggtaaaaaagctcctttttacaccttctcatatcattctgaaactgcatcatattctcaacaatgaagagccactaataaacgcattatatcactcctaacaatggaatcacattgataagatatcttgagtattcatgcattgtagaaattttcaattccagttgattgatttaacgagctatcacatttttaaaactcgaaacattgttgttgcaggatggacgaatagactacaacgagtttgtggcaatgatgcagaaagggagcataatgggaggacctgtgaagatgggtttagagaacagcattagcatttctctgaaacattagttacaaacccaaatcaagaagtacttcgtctatttattttgttatgaatgatgatgatcatgattgtgtttatctcaacattttgatgagatttttgttcgttagactggtttaggtaaatctgtttctgtactatgtacttttatgcatatacacatagcttttgtctgtaacttttggtcataagttatctttttaaaattttaaaagtacagtcaggtacagagagagaatcgaatccattcgaggtcaagtaattttgtttttattttattttccttcgaatttttacacatttctaaactggagatttgtttgttagtggttgtagggcccatgttgtcctctaaagcccagcccactaagtatcaccgttttacttggagatatttattagtgtgactggagtattgtcaagcgctaaatcttaaccatcggatcaattaatcttacggctgaaaatgatcttgggttcgtattttacgtgacagtcggtatcgctagtgtgtctttaccggaaagacgaatataccctttttaaggtgcgttgctttacgctcctctcgtttttcctttttgttttttaaaattatttttggtaccctagtcatttttttttgtttgctctttgtctcgattttggtgccacaaattagaaaaaaaccctaatttcacctaaaatttttcaattccctcttttctcaataagttttcgattttaccttacgcagaaaggttcgttgaaaccctagattcgttctcagttttcgtgttggctaatggcgagcgcggcacggggagagagcagcaatccatacggcggcggattgggaaccggaggaaagttccggaagccgacggctcgtaggtctcagaaaactccttatgatcgaccaacgacttctgtgaggaacgctggacttggtggcggagatgtcagaggcggcggctggttgtcaaaattggtggatccggcgcagagacttattacttatagtgctcagaggctcttcgggtccttatcccggaaacgcctcggctctggtgagacgcctttacaatcgccggaacagcagaagcagcttccagaaagaggtaagaagattgttgattttttcgatccaaaagttattctttttgtagtttctgagtttcttagagaaattgttttttaggaactgtagtttttttaccgtttggatttgccctttgctttttttttattcattttagtttatagtagttcagaactaataagtacataaacgttgttggaatgttcttcaagtacctagccaggttgtctattattgaatttgtggtattagagattgtttatgtattggtagcagtcatgtatggaattcgtttccactttgctaagttgacgttgttaatgtgtactctttctcttatcatggatcaggtgtgaatcaggagacgaaggttggacacaaggaggacgtctctaatgtaagtaaatgagccgcatcttttgatgaaatatcttcttcctttcggtttcattgttcttttatcttctgtagtgtaaacctatgttttgttctgtgtgaagttgtccatgaagaatggtttgattcggatggaagataccaatgcctctgtcgatccacctaaggatggatttacagatcttgagaaaatcttacagggaaaaacttttacaaggtatatactatcttacaggtcatataacctagtagagtaacaattttccttcgaggattgaaaagtgtcttaatcttttgatgcatccagcattcataaaatagaagagttgataataaagacctatgatttttccttcttttttgtttcattttggtgtgctcatgtcaacatttataggcattttcacattttgaactagaaagaaacattgtgttttgaaaatcagttgatcactttcaatgattttacaggtctgaagttgatcgattaactaccttgttgcgttcaaaagctgctgattcatccactatgaatgaggagcagagaaatgaagtgggtatggttgtgagacatccaccatcacatgagagggataggacgcatccagataatggaagtatgaacacccttgtttcaacacctcctggaagtttgagagtaagaaagttgttacatattagttgtactagtctgttttatgctgagcttcatgctagatgccattgtttaatctttttgttgttgatgacatccttaccagactctcgatgagtgcattgcgtcgccagcacagcttgcaaaagcctacatgggtagcagaccttcagaagttactccttctatgttagggttacgtggtcaagcgggtagggaagattctgttttcctgaacagaaccccttttccgcaaaagtcacctacaatgtcgctggtaacaaagccttctggacaaagacctttggaaaatggttttgttacccctagatctcggggaagatctgctgtttatagcatggccagaacaccatactctaggcctcagtccagtgtgaaggtttcaattttgagccgtaactatattattgtaaagtttccaacttgctcccaactgttcattgtgttctttttttacagattgggtctctttttcaagcatctccaagcaaatgggaagaaagcttaccttctggttctagacaagggtttcaatcggtgagacattttgaactatgcaccaaattggtttcagattcgtctgtgaaacaaagtattgacatgacttttacttaatttttagggtcttaaacgcaggagctcagtcttagataatgatataggatctgtgggccctgtaaggaggatccggcaaaaatctaacctttcatctcgaagcttggctctgcctgtttctgagagcccactttctgtccgtgccaatggtggagaaaaaactacgcatacatctaaagatagtgcagaggatattcctggttcaagttttaaccttgttcctaccaagtccagtgagatggcgtcaaaaatattgcagcaacttgataaactggtttcaacaagggagaaatcaccaagtaagttatcaccatccatgctacggggtcccgctctcaaaagcctccagaatgtagaggcgccaaagtttttgggtaatcttcccgagaagaaggcaaattcgccagattctagttatcaaaagcaggaaatatctagagaaagtgtctccagagaggttttagctcagagtgagaagactggtgatgctgttgatggaacaagcaaaacaggttccagtaaagatcaggatatgcgtggtaaaggtgtttatatgcctctcacgaattctttggaagagcatcctccaaagaagagatcatttcgaatgagtgcgcatgaggtaattttctagttctcatagatatatttccagaatattaatgagctgcaaataagagtgtcaaagcgggcaattctagaaatgccaactctaacaccagtagcggcaaatatgtatttctcccttttgtagaaacaattctgctgttcttcatattattgttttccttttgtttttttgttaatattttatggcataccttgaccatctatacatacaactgtgataatgcaggatttcttggagttggatgatgatcttggtgcagcatctactccatgtgaagtagcagaaaaacagaatgccttcgaagtagagaaaagtcatatcagcatgcctataggggagaaaccacttactccatctgaagccatgccatctacatcatatatttctaatggtgacgcctctcagggtacttctaatgggtctctggaaactgaaagaaacaagtttgttgctttccccattgaagctgttcagcaaagtaatatggcctctgagccaacttcaaagttcatccaagggactgagaaatcgagtatttcttctggcaagccaacctcagaagagaaacgtatccctctggaagagcctaaaaaacctgctgctgtatttcccaatatctccttttcaccgcctgccacgggcttattaaatcaaaacagtggtgcatctgcagacatcaagttagaaaagactagcaggttggtggcatgatatttttcctctcagcttgataggcttttatatcactacttgtgcctaagtgagcctcatccatattggttatgattttttttttctggtttactcgcttccgactctctttcttgatgttacagcactgcgtttggagtatcagaggcttgggcaaagccaactgaatcaaagaaaacgttcagcaacagtgcttctggagctgagtcatctacctcagctgcaccaaccctcaatggtagtatattctcagctggagcaaacgctgtcactccacctccgagtaatggctctcttacttcaagcccttccttcccaccttctatttcaaatataccttctgataattctgtgggtgatatgccgtccactgttcaatcttttgctgctactcacaattcctctagtatatttggaaagttgcctaccagtaacgacagcaactcacaatcaacttcagcatctcccctctcttccacatcacctttcaagtttgggcaacctgcagctccgttttctgcgccagcagtgtctgaatctagcggtcagatctcaaaggagactgaagtaaaaaacgccacatttggaaatacaagcactttcaagtttggaggtatggcttcagcagaccagagcactggcatcgtttttggtgctaaatctgcggaaaataaaagcagacctggttttgtgtttgggagctcctccgttgttggtggcagcacattaaacccttctactgctgcagcttcagcacctgagagctctggaagtttaatatttggtgtgacatcgtcctcaacccctgggacagagaccagcaaaatttctgcgagttctgcagctactaatactggaaatagtgtatttggcacttcctcttttgcatttacaagctctggtagtagcatggttggtggtgtatctgcaagtactggaagcagtgtttttggattcaatgctgtttcatcagcttctgctactagctctcaatctcaggcctcaaatctttttggtgctggaaatgctcagacgggtaatactgggagcggaaccacaacatcaactcaaagcatcccctttcagtttggttcatctccatcagctccttcatttggtttgtctgggaactcttctcttgcatcaaacagttctccatttggattttctaagtcggaacctgctgtatttacttctgtgtcaactcctcaattgagttcgacaaactcctctgcaagctctagtagtacaatgagctctcccctatttgggacaagctggcaagctcccaactcttctccaaactctggtccagtcttcagttcctcgttcaccacatcttcaactcctaccaccttttcctttggaggatcttctgctgctactgtttcgagcactactactcccatttttggtgcatctaccaacaacaccccgtcaccttcacctatctttggtttcgggtcaacccctcctaccactccccagcagccggtatttggtaactcagggactccatcacagtctctgtttggtaactcaactcctgggtttgcatttggtgcacctaataatggaaatggtatcaacaataaccaacaagtgagcatggaagacagtatggcagaagacacagaccaagctaatagagcatctatggtagccccaatgtttggacaagcagcagtctcgatgcctcaaccaaactttgccttcggtggaggagcagcaacgcagcctccatcaatggcaaaccccttccagtttggaggccaaccaatggcaagcacgttacagaacgcatcacctttccaggcatcacagagtctagagttccaaggaggtgggagcttttcactaggcagcactggaggtggcgataagtcaggccgcagaatcttcaaagcaaagaaatccaccaggaagaaataagaaaaacacattgttcaagagtcattttatcagccttatggtctttttgttcgctatatactccgggaaccttggggattacgagcatatcgtcgtttaatgaaagaggtaaagtatgagaatgtgtatcgtttatgctcttgatcgtctctgtcattttagtatgagtcaggattttgggggtcaaattgttcagggttataaaagttgtaggaaagttttgtaattttcagaaagtactggtgtctgtaagagtaatatagctctgtgcctctgtctttcgcttctttttctttttgtccttataaaaaaacacactttattgtagctgtttgttaaactcttttctctcttcagttctggttttagtggtttaaattaataattgcctcattacaacttggtttacccaaatcaaatcgaaccaaaccaaaattgaataaatccaattcgatgatcttcaaggaagcttcttttagttgaccaattccattaaatccaatccaattcgatcaagtaaataaacaaattctcaatccttttattagagaagccttcttctccaaagtctcgatttctctttattcttccaaattcttttgtctctctgtatcatccaaaattcccagatttattcacggagttagaagaagaagatgaggagagttttcggcgcgaaaaagaacacagagcctcctccgtccattcaggatgcctctgatcgggtttctcctctcgttcctaattattactttttttttcgatttcaattggaagaattcgtgattggtgttgtggttttgaggtttcacttcggattgacctgagatttagatgaattttgaattagagaaccataaaccgtaggaaggaaggtttaagagctagctagctattggaaccactaagatccagaagaagaaaaactaagatttgttttattttggtcagataaataaaagaggagattcggtagaagataagataaagaagcttgatgttgagctctgcaaatacaaagaacagctcaaaaagaccagacctggtcctgctcaagaagctgtcaaagctcgtgctatgcgagttctcaagcagaagaaaatgtcagtcactagacattgttatttaaattgatccagcaagctaagctactctgtttattggatttgcttgataataaaacacctaagtacatttttatgaatttaggtatgaaggacaacgcgacatgctctataatcagacattcaatctcgatcaagtttcattcgccgctgaaggactcaaagatgctcaacaaactgtatgtatttcttgttctcttctcttctaagaggtgttcaatgtttgaatggttgtgtatctattaaatctgctgcagatgacagcactaaaatctgcgaacaaggagttgaaaggaatgatgaaaaccgtcaagattcaagatattgatgtacgttgttaagttacttaacaacatcttggttttatcttgtttcaagcttttctctggtatttgatttgcctgatactacgatctattgatggtacagaatttacaagacgagatgatggatctgatggatgttagttctgaaattcaagaatcacttggtaggagctacaatattcctgatggccttgacgaggatgacctcatgggaggtaaagtgcttgttttgtaattggaagtttaagatcaatcgcttgctacgctatgcgtctctcatatcatttacattcttttgatatatttcagagcttgatgctcttgaagctgacatgggaaacgagaccgaagcagatggaatgccttcttatctccaacctgatacagaaactgattacgatagcgagcttaacttgcctgcagcaccaacaggacacaatggagctccacatggaagagctcaggttaacttttaattcttggaattttgaaatgcttcaagtatgattaccttttgatggttggctaatgagaccgtttaacgatgtgattaacaggctgaggacgaatttggattaccagcagtgccacgagcttctctccggggttaagttccggcgattctcttgttgattggagctactaagcttttttatttagccttagtatcgttattcatttgtgcataacgttttaaactttgataaacctccttttggctttctcattgaatttataaattgtcttatttcacagatatcatattttcaatcatcaaaaacacaaatgaggagaattttctacttgcagaacatatgccaaaaaaaacgttaaatgggccatccaaaatcttaatgggcctctcgtcgctttgaatctccctctccttctctctgtccctttctctttcttccctgtcttcatcgatggatcaaccaccagatcgaagcaagcgaccatggaaattctccaccatcgtctactcttcatcgatcttattccttctactttcgatattcttacttggcttcacaaataccgatctctacaaagtccaaagtctgagattcaccttcactgtgaaccgcttctatagctatcttcaattccttctaggctttcatgatggaactcccaaatccaaatccgaaaccctaaatccagcttcttctacgccgcactgcgtgttatggatggctccttttctctcgagtggtggttacagctcagaagcttggtcttacgttttatcacttcgtaaccatctcacaaaccctagatttcgaatcaccatcgagcaccatggtgatctagaatcagtggagttttggaatggtttagctaaggagacgaaggaggtagcgattgaaatgtatagagaacagtgtagacccaatgagacgatagttgtttgtcatagtgagcctggtgcttggtatccaccattgtttgagactctaccttgtcctccaactggctacgaagatttcttatctgtgattggtagaacaatgtttgagactgatagagtcaatccagagcatgtgaagcgatgtaatcaaatggatcatgtttgggttcctactgattttcacgtctcttcgtttgtacaaagtggggttgattcatctaaggttgtcaagattgtgcagcctgtagatgtcggtttcttcgatccttcaaagtataagcctttggatctgatggcggttggggatttggttttaggttctgggatgaagaatgggtttgtgttcttgagtgtgtttaaatgggagcagaggaaaggttgggatgtattgttgaaagcttacttgagtgagttttctggtgaagacaatgttgctctgtttttgttgacgaacgcgtatcactcggacagcgatttcgggaacaagattcttgatttcgtagaagaaatgaatatagaagagcctcggaatggttacccttttgtgtatgtgattgataaacacattgctcaagttgatttacctcggttgtacaaagcggctgatgcgtttgtgttgcctacaagaggagaaggatggggacgacctatagtggaagccatggctatgtctttgcctgtgatcacaacaaactggtcaggaccaacagagtatcttacagagcggaatggttacccgttggtggtagaggagatgagtgaagtgaaggaaggtccttttgaagggcatcaatgggcagagccatctgtggataagctgagggttctaatgaggcgtgtaatgagtaaccctgatgaggctaaggttaaaggaaaacgtggaagagatgacatggtcaagaattttgctcctgaggttgttgctaaggttgtagcggatcaaatagcgagaatctttgatgagaaaataagaacatgacaggatctcacactttacttttatcaagagagggaacaagaattgtattttgattcaaagattgttcaaaaaagagcaaatatgtcaagaagagcttattctcagagtttcttacgaaaaacttaaaacagagagtttagttttcgatttattttgctactggagatgagaagcgaaagctgacatgacttccttgtacactggcttcttgaactccactgcctgtataacagaaatagaatgaatatgagtgaaagagtagtcgtggaatctaaatgctgaaggtcaaacagagagaagaaaactgtacgtacattttcaacgacttgatcaggagaagtccaggaccattcaccaaactcaggtttctcagtaccatcgccaagaagattgatttcttcatctttcccagtaaatttcagaagaaacctgaggaaacacattatttgaacaagcccgtaatgaaatgacatgattcttgataatctcagaaagactcaccatttctgtgcttgacccttccaatcggatccccatcggaccttaagcttctccctaacatcaggagggaagtcataggttatccagtgaggtgcctacagtaacaacaacaacaaaaaagagttctttagacgaattcttaaattgttgaatgtttaagaagacgaagaagaagaagaagctaaagacacctcagcgagaatctcagcagagtgaactccagtctcttctttaagctctctcatgactgcaactcttggatcttcaccttcgtcgattccaccctatatcaacatcaacaacaacacacgattttattcaagtgattacatagcattttgaatccaattagaggatgaattgtcgaaagtagagaaacctggtaacatgaaagataaaacacaattccaaagatgaaaattggtgaattcgtatcatccattgttttggaagtcataatcaaattttgttttgggagtttgagattattcaagtcaagcagtatgatgcgaacaagtgagtaccattgatttcagctttgtatgaggaaaatggagaaaccaattcgaatcttaagaaattggaatctagagattacctgaggcatttgccaagcactgggaatatccaacctcgaggcagtgaaaatctgcacttaattgtgagaaggagctaatcatcggaaaatagaagaagctgtttccaattatccatcatcaatcatcacctttttggaagaattcatgaggcagacgccgacatttcttctgtatccttcaggaggagattccatggaagaacaacaccgagcggaggaggaggagacccgagacttacggcagcgatgaaggaagggcaggctggagaatttgatcggtttcgaggggtaatttcgtagaaacgtagttacagacggagaagttggatgatgcaagagaaggggtcggtacagtgccatttcgagccaaaacctatttttccacgtattcgggaaattaataagtaactggaccgttatgcccctgactcatcatgaatattacgtacaaagactacacacccttggaatttagaaaacgtttttgatatcattttcttaccacaaaacaattgaagagatgaattacatgctgttttcaattgattgcaactccaaatcatagttcaaaatggaccaaaaaaaaaggttaaaacaaagcaaaagctataaattccagacattaatcttaaatcaaaggaaacgacattaatcttaaatcaaaggaaacgatgttgaatccatactagaccaataaaccaaactctcgtctccgaaatctttgattgaaacccaataaacttagcgttggtatcttcctgcgggacgtccaaacacagcaggtgccatagcttgttgtgtctccacttgagaaatcccagcaatatcagacattcccaaagaagcaagcatctctagtgtctctttgtccaccttaacatcatcgattttaatggctgactcatcgggaacaaagtccattcgcctttcacgctcttcctcttgtagcttgagggagattccacggactggacccttttggatacgtttcatcaagtgagtggagaatccagcaatcttgttgcgtagccttttcgatgggatgattgcaacttcttccaagatcttcttgttggtgtggaagtctagtgtcatccgtgagtagtacttctcaatcacctgacgtgaagacttcttaaccgttttggtacgaacacgacccatctttcacaactttttgacttacctgcccaaattcagacaaaccatcagagaacattcacattatactactttatacaaatcagagaaatgcagatacatcaacttctgactaataaactatgaaagaaccaacaattgacataagagtctcgagtaactacaaatgaggattcaatttcaattatgccgttaaatttcaacatttgggtattgatacaatctagagagatgcaggaacatcaagagagatccaaaatcgagctgcatctataattaaaagagatgaatttcacaacttcttttatgaaattctcctatgttttcatttatggtgaagtgccgttttgaatgtaaccagaacgtacctgtacggattgaccggagctggagagcagagaagcggcggcaaatacagaagaaagcaaagaaaaagaaaaagtaaacttgtgtgcaagaatttatatgggtaaagttagggtttgttaataggcttgtactctaacattacccaataattagattattaataggttccgttaaattagattccattagccttgaaccgatcggtttaatacggttttcgatttttatgtatccacttctggttaaggacaatgaccatggcggaaactggagatcgaagacagaactgtggaattgaaactgaacagcgaaggaggagccgcttgaagaagaacggggaatgggtcgactctcatgggccagtccgattcagagattccgtttcttctcttacttatctcaggttctcttcgtctctaatgtttctcaacaattcttagcttgagtataagaaagaaagatttgatttttcagatgaagaaactaggacaacaatccaaccaaaataaagttatctcctttagagtagcattgatgatttgcccaagctcctgactaaacgaatgtctcttgtgtttactcttatcttgctttgtagctgaatggaagaagaagcgttttggcttgctctggctaagattcgattttgtgaagttacagtttgattctgacttgcttttgttcttcactccattagctttttatttatctaaaaaggacttgcttgtaccaggttattgcgcttatcttgatgcagagaatgccatggatccttctctagcagaatcaataggtgtgaacacagaagagcttctgatatcacgacctgattctgctgaaaattacggacaaagactacacaccctgaccattttttgtgcaaaacacacccttacatagaaaacgtttttgatatcattttcttatcacaaaacaattgaagagatgaattacatgctgttttcaatttattgcaactccaaatcatagttcaaaatggaccaaaaagtcaattttcgagacaactgatttaaacgggcttttaatatgaggcccattttaaatcagtgggcatagaatctatcaatcggaacaattaagacaatcgttttgaatttcagctccttgtgatcaaattccattgtttttgctgccaaacgaacaacaccaacgttatccatgtttttagttatgacttaacaaattggacatttacaaatattcgatataacgaaaaggaataaagcaaacttgatttgtgcttttattggtggaggtgtataacaatatccgatcttgcaagatgccaaatacttgctgctgtttttagcatctaatctaaagtatcatcccttttctaaattttatggaaatataaaaaaattcatttattcacaaactttattgccatctttatcttctacggtattatccattttaacaaatcactattagatacatgtcactatgatcaaaattcaaaagttgataaatacttttgtcaaaccattctacaattttgtacagttatatttgttgggttgtctttatttagtggctttcgaatatttgtttttgggaggattacaaaatattctatatctgtaaaaagaatgtcaaaatctaattctgaaaatcaagatacaatctttcagaaagaagaagtcagtcaacaaagatggagaaagaaactatttcaagttgcaacatcttcaaaagcaagaaagtgagattctattgactacactgaaaatggacttcactagcttctgtaaacattacatcaacctctactctctctagtctaggctcctctaattgtccaacacaaaatgacaaattcgttttgtttttgttcagatagacaaaattgcatgtcaccaagatttttttccttttggtcaaattgtcaccaagttctgtttattaattaactcaacactctgttaattctttcaaggctttccacgtctttgaaatcaagagacccgtctccttcagcatcatagcttgcatgaacactataaaacacatacacgagcaccactaatcccgagaagaacccgaatctgatatacgaaggagcatccaatgatccaagcaagaaaatgttcaaaaatatcgaaacgcatggagtccacggcatcaacggtacaccccaaaactcagggatcctagcttgaggtacaacacaatggaatatctggacgatggctatagccgtgaccgtgctagctccaagtatgaaccatttaggtgggcccgacggtgcaagttgccagaccaaggtaaacaaaattgaggttatggagaataggcagaggaaggagagtgttggccatggctccgtgtatccgaccgttacgtaacggcgaaatataacagcgtttgcgaccatatagaagacgaagagcgttccgatggagactaggtttaggaggacgtttaggtcggtgaagagggcgagaaccgccgtgaagattcctgaacaaaaagtatagacaagattaaagagttaagcagagggatatgacaagatccttattctttagttaatttaatcaatcagattagtgtctaataacgtagatatattccaagatgtttaaaggtcgattatataaataaaatgaagatattgcaagaatctgttccattagttcacttgtggaataagacacctttttgtgaaagattttgagcttttgttccacgttcaagatctctcttggtctttgttcaaaaatattataaatcaaagtctagttacattagtggatgcaaaatttggtaaactacagttgttttatttgaggcttagagtatgtgtacaaattcttttatttatttatttttttagtttttggtttacagaatatagtatccaaaacttttagaacagcactttaaatttggaataaatatataagaaaccaatgcttataagaaggaatatgcaattgaaaacaaaactgtgggtctagattcgcttccacgactcatgcattttggtaaaactatagtataaaaaacgattccaaaatcttactcaccaatatcttaactaagatgttatacgtaaacgttgcatataaagagttggaaatttgagagcttgaaaaagagaaaatgcttgaatacataaactaaaaaacaaaaaaggaccaaagagactcaacaatatgtcccaaacaaaaccgttgaaaagattgaagccatttggtgaacacgaccacgagatttttatcgtatacgatgctctaaattaagacccaacaccaaaaatcatataagaacaaaagactatggcctacattaatatagatcacacagtcacacagctacaaaccacaatcccaaacaagatcagttggagaaattttatgttttaaatagtaaacaacaaaattcaattttcttgatttctccttccctacgagtatatgtatgtaaaatcacgtgaaaagtaagatcaacaatacaatgaaatccaaaaagatcatggaaacaaacaaacaaacaaaaacccaaaatggatgtccccactatcaaactgtctctttatcacttgatgaaaataaaacagagaaaaaacataaaaccgatctttacgaaaggaaaattccaacataaccttaaaaataaataatatttaacttattatatttgatcaaagatgttaattttaatagaatgaaaataaatatgtttgagagtaaggacaaaaagttaccaagaaaagcggaagcgttgactggagtagatgtcttgggatgaaccttagcaaaccaaatggggacaactcttgaccgtccgatgacgcacatgtaccgagcctgacccaacatggctactatcaacgacgttaatatcccgaaacttgctccaatcccaaccactctcgtcacccattcccatccttccgatttactaaacgccgccgaatacggtgcctccgcatctatctgcttacgtacacacaaccacaccaaatcattcacccacaaaacccatagaaaaaagcttaaattaaaaatgtgtatttgatggtacggaccagatcgtacgggagaagcattgacatagagatagccattaaacagtaaagtacaatgacgattgcgactgagccagagattcccattggtatgtctttgactgggtcttttacttcttcagccattgtcgaaacggcgtcgtatcctatgtaacttagataaaccattgctgctccgttaaacacacccgaaactccaaacgggaagaatccggatgggttttccgggttatcgggtcgggttaaattctttacgtctcctttcgagaaacccatgacgatcacgaatactataaatgcaatgtgtaacgccgttaataccatattcaccttcgaactctctctcgtactgtaacagatgacgaacgtgacggcgaggacgacgataacggcgatgggatcgatttcgttgaatccgtttgggagaccggagacgatgaatctccactccgatgttgagattccgaatgcagatccgagataagcggtgaatcctcttgaaacggcggcgtttgacagtacgtagtccattatcagatttgctccggttataaacgccggaaactcgcctgtaacggaaaaaaatgaatgatcggagaggaaaaaatgaaatttgaatttctctgcgatttgggagttttgattttggcgggagaatgttactgaccgaatgtgatacggatgtagctgaaagcaccgccggcgacggggaggtgaacggcgaactcggtgtaacagaaggcggagagtagagcacagagtccggcgattgcgtaagagacgacgattgatggaccagcgtagagacgactagcacggccggtggtgacgaagactccggctccgatcattccaccgattccgagtccgatgagatcgtaccaacggagagtacgacgcatctgctcgccggagacggcgcggacgcggctcatctcgtcgtaagaggtggaaacggaaacggctcggcgggaaaaacgggagggagtgtcggagagagagttgaggtagacacggaggctagagaaagaggtgtctccgtcgtggttccggtattgggcctccatttcgggtcgggtcaatatgtaacggattataatgtttttgagagtaatttgaaacaagtggttttataatgtgagattgcaaaagactgagagacgaaaaaaagaattagacgctttttggtgtaatttattacaagctttggaaacgctaattattattattattttggtcaacttagttttattatattaaagtagcttctatttttttgtattcataatgatcagtgatcacataagcatcgactaaaataaataaatcacgtaagcattaacacaaatattctataatctgttcggtctcccaatttttattatttgagtttagacggcaaatatttaattcctagtataaataatgaatgcttatttttccttggacaatggtcgataataatcacaacttgtttgtttaacgaatgcaaccaacgaacatggataaaaatgttactcttttaagtatcagagtgaccaaccagtaaccgggatcgttgcaatccgtcgcaatattcacaacttggtgaataattatgattgattattttccttttcgtgtgaagagagtttgaaaaaataaacaattttttgtttctttcatgttaatgaaagttcttaatttctaaagttttgactatttattttatttgtgtggtattaggtctataatcttttgtatgttaaatttttaatttttaacacgtgtgaaaacataaatttgtttatacacgtgttataatctaattggctgtaacacgtatcataattctgattgctaacacgtgtgaaaataaaaatttatttgtacacgtatcataatctaattggctaaaatcgtcaatattataaaacaaatttaataaaaaggatataggaaactaaatgaatgacaataaatcagtagaaagaaataaaataaagactttgtatgcaatatagcaaaatctgaaataaaatttaccctttgaatataagaaaaaggaaggaaacttaatacaccccaatttgagagaagagaagccatatattttttgttacttgagttgatttataagctgccatatcccttacatgagttattatatatactgtagttctccagattcacaccattctgttttgtagacttcattttccttaatttgttttgggaatcatggctgaaaattcatggacgacagaggagaacgagatgttcaaggatgcactggtgatgttcactgcctttttgcttactcggtttgagagtgtcgccgagtatgtggatagatcggtggatgatgttaaggagcattacaaggaattggtcaatgatcttttagagatgggatccagtcgagtagcttttcctaatgaattgactaaggatatggctcaaagttcgtaccaggccgagagaactatatggaccaaagaaacacatgagtaagtatataagattaatgagtgatgagttatgatttttgttagttagtggaatttacatacacgtataagtttcaattataaacataatgattgattagtactggtattggtttgtggatctagctagacgcattctcctcttagactccataattcacatagttcatttctgagattaaaatgtatttagtcctatgatcttacgatttacacattctagcattatttttttaatgtggacaatatagtttttttttttttttcatttgactcaatttatatcgttaactaataatgccatggtgaaacttgattaaaatgggctgatctatgaactggtggaaattgtaatgcagatggtttctgattgggttagaccgatttgggaaagattggcgtaaaatagccgtcttattggattgcaagagcccgatccaagtcgagatatatgcagaaaacttttaccagtggcaaagctcaaagaaaaatgtgattaacgacttaaatgtggcaagcaccgatgtgaatgtgatgaaacggcagggagcaaataacaccaatgtggactcaacaggccaacaagagagtctcgtcgctctggaaatcggtcaccatgctaaggcccccaactcaaagtgatataaatctctatgactgtattaacaaccaaaaaataaaaagcctaaagatattgaaggcccttgattattttttttgtgtggtatgttaaagatttgggatttccatttttttggcaaaccatattttatttaattttgtggtcatctatattattttctttaaccattaaaataatatatatttcaatgtttttattttttgctttatttcatctaggctaaacagaagatacacgtaagatggagctttcaagttaagtacgtagtatatataaagttggggttaaataggaaactaaaataacttgaaattacactccaagttttacccactgcgtacgtctaaacgtaaacgagaagaaaacttctgagtcaagttgtgcgtgtttaaatacgaaatcgtgtttctttttgtaaagtgagggctaattttgtaattttcacccattacttgatcctctataaattgtcaggttgccaaaattaaaacgaacaaacaatcgctcttccgtaacatattccacaaaacgatcttcttgtttcttgaatttttagccatctctttttttttttctcattttctcggatactatggcttcgagtccacgctggacggaggacgacaacaggcgttttaagtcagctctgtcgcaattccctccggataacaagcgtttggtgaatgtcgcccagcatctgccgaaacctttggaggaggtgaagtactactacgaaaagttggtcaacgatgtttatctgccgaaacctttagagaatgtcacccagcatctgcagaaacctatggaaatggaggagatgaagtacatgtacgaaaagatggccaacgatgttaatcagatgcccgagtacgtaccactggcggaatcgagtcagtccaaacgcaggaagaaggatacgccaaatccttggacagaagaggaacacaggttagtcatcaaatacttatgaattagggtttcttttgattgaggaaaagtcttaaatcttgaggaaaagtataagttaacagttcaaatctcacaaaaaatgattagtttgggttttgttgattagggtaacgtatacaagtatttttcttcagatagatgtaattatcaatttgatttatattaattttaacatgatgatgctgattatgataatatctaggttattaattcttatgattttgattgtttaatgatatatttcagattgtttctgcaaggattgaaaaagtatggggaaggagcttcgacgttgacatcaacgaattttgtgaagacaaagactccacggcaagtgtcaagccatgcacagtattacaaaaggcaaaaatcggacaataagaaggagaaacgccggagtatttttgacataactttggagtctaccgagggcaatccagattctggaaatcagaaccctccggatgatgatgatccgtcccaaggtcaaggcacttgtcttggagtttagatgttggaagatagaagaatggtgtgaaatgaaacaagcaacggaacttgaactcaaaaatagataatatatatatatatatatatagatttaatataataaaaaaggaacttcgcttgttttctgcatatgtataggattgctacgtagtttcggtatacaaaaatatcagtttcacttgatgatgttcaagtgtataggataattaatgattctatcaagtatatgttagtttttattttaaatagtttcaaaacattaaaaaagccaagatattatattatatataaagtaagtgaatatgatcactaattaaatgatcaatatttagtcaaaccgtttgtctttcagtatatttaatttacatggaacttggaagcataataagaccaaaattttataagaagatatatactttgaattctttcttgaactgaaaagtaatcttttctttctttctttaaattcaaaaaaaatagaatatttatttctgtgataaaggccgcgcgtaaacacgtttaaaagaaagaaaattcataaagaagtcagtcatacgtacttagaactctttcttgtactgaaagttttcatctttttattttatttttttctgtgataattaaacagacgtataaacacgtttaataaaaagaaagacagcttctgagttctgagtttgatatatataatatggtggttaagaacgaaataaaataactcgggtttcttttattaaataaagcaaagaggagggttaattttacatttttccttattatttctcattataaatctaatatgaaacgaaaaatctcaatgacattatatattgagggctaaatttgtagtttttcttattagtttatccggcgaaatcacctctataaaattctcaggttctcaaaaaataattaaaggaacaacaaaccctcttcagtgacagacacagactgacagattccacaaactatttttcttcattttcttggatattatggctttgattccgccgtggacgagagacaatgacaagcgttttgagttagccctggtgatattccctgagggctcgccgtattttttggagtacattgccgagtttctacagaaacctttggaggaggtgaagtactactacgacgcaatattggtctatgatgttgtgctgatcgaatcgggtaagtatgcattacccaagtacccggaagcctattacgtgtcactgacggaagcgactgagtccaaacacggggagacgaatcagataccgaggataattccttggacagaagaggaacacaggtttgtcaaagacataaatttagggtttcttttgattgaggaagagtcttaaatcttgctggagttgatgcattaagggttagtcaaagacttatgaattacatatgattatgataatcttggtggttgattttctgataaacgtctttagattgttgaattaagatgatgaataatcgtgtttgtgagagaatgtttttatttgaccttgataatgacgattatgggatcttgatggattgaacaagtatgggaaaggagcttggagtatgatatcaagggaatttgtgacctcaacacaagtagcaagtcatgcacaaaagtatgacaaaaggcaaaaattggacagtaagaagaggaaacgctggagtgtccttgacataactttggagtctactaagggcaagtcagattttgttaagtagaaaaccctccgggtgatgataagttcaagtatatgagtatatgatgagttttgcttgacgatgatcaattgtatagggggatgttgatgatgatgatgtactgatgtatatatcggatgatgatgattgatgaactgtataagaccggtttgaacaaactataaatgttttgggttgctttgtaaaagtataaatgttttaagaccctttggtatgttgagcaatatggaggttaaggacgaaataaagataactccggtttcttttgctaattaaagtaagacgagggttcattttgcaacattccctattattttctcactataaatctgattagaagcggaaaacaataccctcagtaacagattccttaaagttctcttcaacattttcttatttttttgcttatatattagattcctgatctttagcgatctcaagatttctctctttttctttggatactatggatgcagcaattccgatttggaagagggacgatgataagcgttttgagttagctctggttcgattccctgctgagggttcgccggattttttagagaatatcgctcagtttctgcagaaaccgttaaaggaggtgtactcctactaccaagccttggtcgatgatgttacgctgatcgaatcgggtaagtatcctttgcccaagtacccggaagatgattacgtgtcactgccggaagcgactaagtctaaaacccagggcacggggaaaaagaagggaataccttggtcaccagaagaacacaggttagtcaaagaattatatgaataaaaggtttctttggattgtggaattaaagttcatatttaaatctttgaattagagtttctgttgactaggggaagtatatatcataacagtttaagtcttgctagggttgatgaattagggttttgttggttagggctaggaggaacctatattatatatacatgtctttgctaattatagatgatattgttgattaataataatgtgctcttaatggttatggacttttggttgattaataaatgataatattttgcagattgtttttggatggactaaacaagtatgggaaaggagattggaagagcatatcgagggaatgtgtgacgtcaaggagcccgatgcaagtggcaagccatgctcagaagtatttcttaaggcaaaaaaataagaaggggaaacgcttcagtatccatgatatgactctgggagatgccgaaaatgtaaccgtccctgtatccaacttgaattctatgggccagcagccacattttgatgaccaaagtcctccggatcattatcaagactacttctcccagagcaatgtaaccatccctggatgcaacatgcactttatgggccagcaaccacgttttggtgaccaaattcctccgggtgaatatcacccctactcccgggacaatgtaaccgtcactggatccaacttgaattctattggccagcagccacattttaatgaccaaatttctccggatcaatatggccgctacttgcaggaaaacttcgggtttttcgatgatgatggtgaagatgatgggagtttagcaagctttcaacaactatacaaggcttaagctttttgatgagattttctggtttagggttttagagtttttgttctagtctagactttagttgaatagaaactacctacatagtgattgcgtgtcttgaaaagtaaagaacagtttcacaatctcgggatgttcgagttgatcaagaacaatcctctccaatttgacataagcggttttattctctttggtgataaactttttgtccatgatctttaaggcatacacagttccattatccttcttcttcgccctaacaacctgattcaattacacatacgtaaaatctccaggatatgaattgattcatgaatcaaaccaaattgcagaaaaaggtgtgatttttacaggaaaaaaaatcgaaaaaatgaatcctttgaataagagccaacgccatagatcttgccgagctcgaaatcatggtaagtgaaattctcctgaggagccttaaaggcgaagcttttgcttctgtaaatagtttcaccattagaagatgaattcccttgaagtgtaagctttgaatctgaaactgtaatcccttgcttcttcgaaatccaaacatacgaggatttatcccatattaaaaaggcaaggagaaatatagataaaacataatatgcaacgggttcttaatcatgttcagtgattacagtttgatataagtggagaagtttgggaaaactaagtttgaactttgaatagaaccaattatgaaaatatttgagtgttggtttggtattacataggcattttcaatgccaaattttgatccatcttcatgttgtggtgcttggtatggattgaattgctgcaagaggattcacttggtatgaaaacgcaagcttccagaaatctactattgcttttctcgtggactccatttgcctgcgaatgatcctgaaacaagtaaacaagtttcacaatgtattttttcatcacacaacttctgatcattcaagcatagaaacaagcttataagaattcttaccttatcaaagcagctcgttttctcttcaaagcataacatatgattaatccaacaaggcttacggcaacctttcccctggacatgctaaattgggtattaccaaccttgaggcttagaggatgggatgaccaaagtgaccaaggttcatgctgtttagatagtttcaggaaagaatcaatctcatcattcttttcattacccaacgacttcttgttattcactacagcataagaagaatctttggaattttcctcaaaagaactagctgttttgagagaaagtaaggaatgcaatcttctcaaaatcccctgaaatagacagtttagtgtagcatcatagttagaacaaattcacaatttcatacacaactcacgaaaatattcaatagttagtacctgtcgcctttcctcaggcaatgcagctttttcaacccatgaaatggctaggcccatgtcatttgaaaattttgcaagaactccaaaagtatacagctcaacgacttccatgtactcatcaatatctaaacagtttttcgcatggaatccttttgtacttactccagcatcatttaggatatagtggttgtccttgtaaacccatattctaaagaactcttccagaatatcacgtacacccaaataggaaccatttgatatttgaaggcatactctaaaagggaaaaaaagggaagaagatcaataaactagatttcaacaatcttgttctgtgacttttgtctatgctaatgcatccagagagcagtattgtactccccttaagaagaaaaagtttgcaaataaaatgaatgttattgtactccccttaagaagaaaaagttagcaaataaaatgaatgtattttactcctagttttgaaaaataaactgcaaaaagaaccaaatattctccttttaaagcatcttaagctgtaatactttgaaagatttagaacaagaacaatacccagtaagaagaacttgaacaggaatagctgcaacttctccaaacacatctcttaactcatttacaatctcaactgtcctgcatgaaaaaggcatttgttggcaaaaactatcacatagccaaaactacaacaagcgtccaagactctaaagtttctttagagcatccaattccaaacagaagtaagaggcaaaagaactactcatgttataacatctgaatacagtaaatgaaatatacctgccgattccatgcaaggattgaactaagaccataccagcagattccaacatatcatgaaattgatgatcaccttgagaagcttcgtcggataaaacatcaatgttgccaaatattcttttcagtatagaggaagataatgactctgcctcttcatacatagagcacactaggtaactatacacatccaacaaaaaaaaaaatgagtaatgaaattggtactgagccaatttctcaacttgaaaacagataatttttacaagtatgagataaatttgagtggacatcatcataagcaatttcatttgaacttgtttcttgtcaagtctgtgatgaatcgtttttctacaaactctatacatgactgaatcaaagccggatagataattatcgtgataactaattctgagaaaattttgacttctccttatacacatggccaagtacggaaccaaaattcgcaagcatgaaaaattaaaatttaagcaaattctcaggaatacctctcagaacgttcaatttctccccaaatatcagttgcctccattgtagaggtattggaagaagcttatccaaagcttcaattagacacaacagagcgatgagattgattctgctcgaatgaagaacgaggaagaagcgagggagaggaattaattgggtatttgctattgggccaatataatgggcttctccttcacaaatctaatcaaagcaagctaagcccaaaaatgatgattagcattattctggttgttaatgggccattagtttcgcattaaaagtgaagtagaacagtgatacattgcgtgaactgttatttcaaacattcaatgattcatgaacatgcaacaagattagttaacaagttaaaatctgagctaacttttgcggctcaatgaaagtccagcatcacattcatgtctttttcatttttgacatcgacatgtctcttctctttatagctacttggccctactttcggtgtatgtacgaaattattagtgttaagcacaatctcaaggtagctcagttttacattgaaaaaaaaaaaaaaaagcaaaatcatttattgatgtgttttgacaataaatgaaatcttttactagaaattcacaaagcacttgacaaatttcaagagtataggttccttctttaatatataagcacacatcgttttcataattaaacaaatttagacccttggcttaaccatggctctcaacggtttcttcattaccaccgtaaactccaatttcccggcgaaatcaatttcactttccggcggataagcgctccactcaaactcttgaaccatcttcgctagcatcaaatgcacgtgtacggtcgccatcgctagccccggacagatccgacggccaataccgaacggcatcattttaactccggttacaccggttatgtccgcttcctccttacccgaaataaaccgatccgggttaaatttcttcggatcagaccaaagctttggatcctcatttattcccggaagataaaactcaacgttaatcccaacgggaacatcgtaaccggcgaccgtcgtcggctccgtgacggaatgagtcaacgtaaagtatgtcggaggatgtttccgtaaaatctccttaacaacggcttgtaaaaagaccattttatccacatctttttcctcaacctcacgatctccaaccgttgatttaatctcatcgtagagccgagattgaatctcaggattcacaatcagttgcgctataccccactcgatcgccgtccccgtcgtatccgtaccaccgttaagaaactcagagcagagcgacacaagctcttcattagacggcgtcgttatacgaccttcggttttaaggtcaaagagtgtatcaagataagaaaaagacgacgccgttttatcagtccccggcttctgaatcgctctccgtcgtctctcgatgagtttaacgatgaaatcaacttgttcacaacgaacctcgagagctcttgctctctccttggaataaaacggagcaagaatcgggagataatcatcgagtcttggattgagtgtgatcaacactttcttcatcacttgatccatattcaatatcgattcttcatccatttcgattccaaaacacatctccaaaagaatacaaaacgcagcgaatcttgcgtttcttaggacccaaacaagaccgtcgttgtctttagcttctgatttgatcctctcgacgagtttatccattgcggattgtctcaacgacccgaattctctgaaccggatcgagcttaacatgttctgtaccatgttctttctcagggatcgccatactggaccgtacgctgaagcgttaacggtgaaagtgttggagctgaagatggttcgggtcggattctcggtgggtcgggttgcgaacattggtccacgttgaatcagaacgtcgtggacgagagctgaatcagagattatgatcattgttcgacttcccatcctcaacgtgtagataggaccgtattttttccttacatcgtcaacgtactcgtaaaactgcttcccggagcgcgcgaattggaagaggtttccaaccaccggccaccccggaggacctggaggaagcttcacgatctttgatttagcactccggcgcgtgaggatcagtagaactaaactggatataaggatagtgtagaagagtgaaggagagatgttaaagaaagtgtgaggaaacgaaaggatagacatttttagcttcttgtttttcttcttcttttcactgagctttgtttgtagctatggaggattaagagtggaagggaaaagcagaggaaggtataaaaacagagcagagcatgataatttaggtgaggagaatttaaagtaaccagttttgcgattggtttcatttaattttatgaggctgagtttggtatgcacaagaagtacgatggaaatttaaagtcttgtctttcatgactagtacagtagttgtaatcgtgtaaattgtttgctaacacacggtagttatcttctaacgtgtgattctgcatgtcaacgtttctcagttaagaagattatgttttttttttcttttctcaatgtttttggctttagcatcataaattgtaacaaacaaaatactcatatctcaagtttattttgtattctcccatttttagtgtttagcatgacagttgttttaccaaattctcattctaagcttttattacaaacatagttaagtttttaccctcaaagataacagaattctaaaagattcttaatggaaaacatgacttgagtaccaatatgcttcttgtattcatttttacatgagagtgtttatcagtttatgcatgtattccatacagcatttattcatttttaaaagttggatatgctacaaacctgcggctttcattgtaccctaggtctcaccatggccctcaacggcttcttcatcacaaccgcaaacaccaacttcccggcaaaatccatctcgctctgcggtggataggctaaccactcgaactcttgaaccatcctcgctatcatcaaatgcacatgtaccgtcgccattcccatccccggacagatcctacggccaacaccaaaaggcatcatcttcactccagcaactcctgttatatcggcgtcttcccgccctgataagaaccggtcagggtcgaacttttttggctctgaccagatcttcgggtcttcactaattccgggaagataaaactcaatgttgaccccgacagggatgttatagccagagagagtcgttggttccgttacaccgtgacttaatgtaaagtaagtcggtggatgtcgccggagaatctctttgactacagcttgtaacaagaccattttgtccacgtctctttcatcgaccgcacgatctccaaccgttgatttaatctcatcgtacagtcgagattgaatctcgggattcgctatcaactctgcgattccccactcgatcgccgccccagtcgtgtccgtaccggcattgagaaactccgaacagagcgttacaagatcttcatcagacggcgtcgtttcacttccttcgatgattctaagatcaaagagtgtatcaagatacgagaaagacgataccgttgcggtccgaatcgccttccgtcgtttctcgatgaatccgacgacgaaatctacaagttcccgacgaagcttaagagcacgatttctctcattgtagttaaacggcgttaagatcggaaggtaatcgtggagttttggatcaacggcgtttaatatcgccgtcatcaactgatccatcttctcaattgattcctcttccatctcaactccaaaacagatatctaataaaacacaaaacgcagcgtatctgctgttttgcagaacccagacgagtccatcgttgtctctagcttcagatttgattctctcgatgagtttatccatggcggattttctaacagaaccaaactccttgagccgattcgagctaagcatgttctgaaccatgttccgtctcaatgacctccacacaggtccatacatagcggaatgaactgtgatttcactggagctgaagattttccgggtcggagtttcaacgggtcgggtcgcgaattgtgctccacgttcgattaacgcttcgtgggcgagactggcgtcggagatgatgatcattgttcgagtaccaagcctgagagtaagaatcggaccgtagatctttacgagatcctcgacgtactcgaaaaactgtttcccggagcgcgtgaactgaaataagtttccgatcaccggccatcctggtgggccgggcgggagatttaaatggttcgaattgtgtttccggtacgtaatggttttaagtaaaccggatatgataatcgctagaatggttaagaagacattactagataataagtccagagaaataggagaaaatgataagaatgacatttttaaaaatcttcacctcctctagtgttttcttttagcttcggatgaattgaagaagaagaaaagaggaagctttataattataagactgaaatatttttgtagtaggcaaataatttttgttaggttaatcgtcaatgttataaagccgtaacggtcgttacttgacttgtaaatcttaatttgatgtttgttttcctatttcttcgtataattatctttttaacgccttcgcattattgcttaccatttctatttgcgatatagtttcatttatttacatgtataataatcatattagacgtgtatacagcatgttatagcaatcggttatatgttatatggagtataaaatcattacttagaaacagttagacgttatataatctgatggaaattgagaatgggctcagcattatatggaaacgtttcttataagttactgcaaaaaccacgcaagattgattgcttaaaaagctgatttggccgatcagctcgagaggataacgagttacaatggttgaaaacatataacatgttgtagtgttttttaagtggtaagaggaggcaacatgctatgtgttatagaatattgacttagttaggttttaaagtggttataattttacaaattagtaccgacatatcttttggattgaagtggtacatatgtattgaggaacggacattcgaagagcaccgggaaatggtgcaaaaagtagtgtgtgctttttttttcttttacttttttttttagtcatgtattttctattttcaagtattccggggtttagtgattaattttaatatgctgaaattattattttttaggtaaaaactaatgagaaatatactattataaatcaagggggaaacgattgcggaatttttctgaaccgacagagtgttgcaggtaattttggtcttttataaattcaacttggataattcaggtgacatggctttgaagattattgatgttgatgtttaatacaattcaaattgttgataaacacctgtggattatttagtagtttgtgactttttgttgttaagacggtgacatataattgtgcacaactagagataagttcttctaccgtccaaaatttaactttatataagaaaaacatttcgtacattatatctaatacgaaaaacagtattttgaataatttaactttagttaaatttctaaattagcgttaagataaagaattattatggaaaaatattttggtaaatattttgattgacctcagattattttgccttgattttttttttttttggttgccgataaatacaaatagataacactaaacaaaataaagtacaaaaggaaaaaaacgacaacttcgtaccaaaccaaaacagtgtcgtattaattgattggtgtggcgaaacaaatccgtcgttttgctccgttgatcggcaggtgatcaccagaagcctcgtcaccgtctctttctctcccccctttttcatgacgccgccgagaccaccgtctgggcgagtaaggtcgctgcgtgattattcttcggaatcagaaaagatggatggtaccggtagttgggacacgcttgaatggaccaaactcgatgtaatttgctctcaattctctcctgattcacgctttttccccttttaacccacaattacacagacatcacgtgaatgtcgtttcttttttcgtatccaaaaagctcataatttggttattgtattgaaattgattgctcaaacaatttctgctttggttctcttttgattggtcgcagtcaacttcagggtcaggttctttctcgaatttgagttgcttgctggaatcggagagggtcatcgtcgaggtagagttggtcaaagtgtctcttttatttgaatttttgttaccatatccggctattgaatttgagacttggtatgcaatttgcatttgtccatgatactagtgtgaagaatatgttgttgaagtaatatgattttggactttatttgcagggttatggagttgtgcttattaacaccgatgaggcaggaacccttttggtgactaatttccgtattctttttttggtatgatattatctttcctctgtttcttatatgcatttgatctattttttctggccaatgtaattatacagatcttgaacttacttatatttcactatttcaggattaggcctttagtttttaagtactgttgatcaatatattctttgtttctcttttgtgaagagtgaaggaaccagaaaagtcattccacttggtacaattccattggcaactattgagaagtttaacaaaatggtcagttgctatacacccctggggacagagctatttgattaatactatttaagttaggctctagggttttatattgttaagtctgtgcattttctgattgatgggtgatgtgttcataggttctgaaagttcaatcaagtccccgtcagtctgacaagattccaccaagacgtcttttacaggtcactggtatgtgaccggattttattgtttgctagatttgatttcccctaagttttgtttcacctggttttcacgtcatagcttaatattcgctatgacgttgaattgtgtttcatgttttttttccttgattcttgacgtcccaatattatcttggacaatggacatcttcccacagtgatgttggttgaagtgttttctacttctcttacatctttatttgatgcgtcttgtatctttacttgacattatatgttatgatcactttcatcttgcaggcaaagacatgaggataattgtttatggctttcgtcctcgcaccaagcaggtgaaactctcacttcctcttatgctgccttagtcatttctccgtaaattctgtctaaccttcaaaacttacatttgcagagacgtaatgtgtttgatgcattactgaagtgtaccaagccagagagagtttgggatctatatacttttgcatgcgggccttccaaatttggtaacgcaaacccaaaggaaagattgcttaatgaatatttccgtcttctcggaaaaagttcaatacgagcatcaatggatatgattgaagatggtgcgttcacattgtccaatgagctgtggcgaataagcgacttgaactccaattacaacttgtgtcagacttatccatttgcttttatgattccaaaatccataaggtaggacaccaatatcttgtcagggatttaaagaagtctctatcaatacctcctagacttttgagtggttctatgttcatattttacgagctttccagaataatcctcttcactggtttgccatatctcgttttgcgtgtaaagaccatgttcctatttgagtattgataaataataaaaaaataacaagtcactgttgctgatagtgatgcagagctgctccaggcgtgttctttccgggcaagatgtcgcttacctgtgatcacatggtgtcagccaggtaggaaggcagatattttggacttttggttgcttccattttaattgtggttgtattgcttccaaaatgatatactgattttgatcttaacctcaattgcaggaagtggagctgtgattgcacgctcatcacaacctttagtgggtcttatgatgaatatgaggaggtatataaaactttcaatttcacgaggagacatttttgataacattttgttttagttttggatttcaaattttctagacgcactagattctgactattgatttgttttattttatccaacagtaatcttgatgaaaaactagttgctgcattctgctctcagttacctggtgctaagggagaacgaaggtgagcttaatatggttaactcttacatgtcttgtattttatgtttcgttataaagatttaaaatttatgaatcacgaatgcatctcacaaagggaaattagcacttttgtggggcttgctggacgcgagatcatcttctaaatgcatcaaaatgtctgtttggttactattaaaatacctgctgttagataaccaatatggttgacagttttttttccttttcatttacaagtatgtgttgaactcaactcatgtggtttatagttacaaagatgcacttatctcatcttgtttttgtttttactttgtaggaagctttatattgctgatgcaagacctaggaaaaatgcattagccaatggagcaatgggaggtggctcagaatcatcttccaattattttcaatctgaagttagtgaatggtcttggtggtttgattattaaagtcttgatcttctggaattccatgattttagtgactatgtttctttcttcagattgttttctttggcatagacaacatacatgcaatgagggagagcttttcccgcgttagagattatttagatatgcacggtacaacatcatccgatgggagatcatcgttcttggtaagtactgaatatcaagtaacttttttgacggatttctttgaggggatacaatatgatatataatatttttatgttgcgtatcattaagatatatgtatgtgtgaattctgcagagacacggtggttggacctggggaggaggtaatcttagtagtatgtctgcttcagtatctttacttggagatagtggctggttgatacacatccagagcgtcttagctggtgcagcatggattgctgcacgtgttgctatggagtcggcatcagttcttgtgcactgcaggttagctaccttgactcacatcaccggccaactgcttaaccaatttctgtcctcgtgataagatgaatatacgtctgtttgtagaaaaccttctattatcatcagggtgaaaaagattatttgttatatcatgactcttcgtatgtcattgcgcagtgatggatgggacagaacaactcagcttgtttctcttgcgtgcttattgcttgatccatactacagaacttttgctgggtttcaggtattccctgtgctatttggtgtttctgggttcttacttttgaagtatcatagcataatttaatggtttacaattgtaaaacttttcttggagtaccatatcaaattctattcttagtatccattcatgtttgctatgcaccctatgaagatgttactgtatcattcatatgttctttccaactaattgtgcatcaacattctatatgagattcttgttccctaccctgttgtcttatttaatcttttctattaacctcacatcaggctcttgtcgaaaaggattggcttgcttttggtcacccattttcggatcgtgtaggaatgcctaacatatcaggatctggtaattttgactttcctaggcagtcttcgtctgctggaagtttcccttcatctcctgtgcgtcagtcttcaggatcagcagcctcacaatcttcaagctcttcccatgggcataacaattattcacctatatttatgcaggtgaccgagcaattattcctcttgcaattatagtaatacttttggtttgtttagatctatttcaatgggttggcagaccaacagcttatagtatgtttacatctatgtgtttccagtggattgatagcgtttcacagctaatgcggatgtatccttgtgcttttgagttttctccggtatgtatgaagtcaaacatatttctgaagatttcatgttcaacttcttccagtaataatagtgtagtcatttgccttcatatttggtgttgcagactttcctggtagattttatggattgcttgctttcatgtcgttttgggaacttcttatgcaacaggtaaaactttcttttgaagctccaaactgaagtgattctgaaaataattggtattatgatttatcaatatctgagctggtgtaaatttcagtgaaaaagagagggaacaatgtgggattgctgatgcctgtggatgcctatgggcgtacttgactgatctgcgttcatttagtgcaacttctcatgtccattgtaacccattctatgatcctttgaagtatgacggcccattactacctcctgcagcatctctagctcctaccctttggccccagttccatctccggtgggcttgtcctgaggaagctaaagctgcagatattggagtccaatgtagagccatgacagtgaaatattccgaaatgcaaaaggtaacttaattaactaatctcccttacctgctctctatggctctataatgtatcaaagtttttaacattctaattgatttgaaacaggagaaagaagcagcagaaagaagagtggacgagatatctttcgcaatggagtcattaagtgcagagttgctaagagaaaggcatttgagttgggtagctagagaatcagcaaatcgagctaccaaggaatatgcagctttaacccgagcagtacaatcactcgggtgcaagattaacttcaccacatctgatgtcgaagatgacccaaggagctctctggagaataaccctaggagacgaaacagacacgggaacaactcagatgtttctgtatcaatctcactaatgcctgaagaaaatacatctggaaacccgaaagggcgagtttgtgaagcgttgtgtccattgcgtacaagagaaggagtatgtcgatggcctgaagtaggatgtgctcatgtcggaagtcagtttgtcgggttaaaagcaaattttgatgcgtttgatcggcttgccatctacgatagctatttccaacctaaatgagtgaatcagaatccgaaggaagatgtaatttttaaacagaataaagccagtggaggatcagaatcatcaataaaaaaccgtcggaagaaatggcgggagcataaccatataaactgacacccttagtttttggaacaagggagtcacatcttcttttttttttactcttgtgtatagctaaaactaaaagcatcagtttttcttaacctcaaaatatttgatttagatttatgattctttttggttaaaaacaaaaattgaaagtgatgtacagtttcatataaatctactattagccttttaagtttcttataataaccctagttgattattcatctaagagaatcgaaacagacaaactttggtacaatttgtgttgtgtttgcgcaagttgatgagtcgtacaataactcttttaactctctccatctctcttcatcttggacagaaaaccgaatgaaagaacttaaaccaaatataattgagtaacacggaaccaaaccgaaattgaaacagcaaaccgatccatattagcttaggttttacacttttactttggttactgtcattcataaatctgacactggacccaaaacagagtaatgcaactcttagttatcatcttctgggatcggagaagaaacctacggcccgaggcatgtcttgaatgcagagaagactcttcttctctttgcatatgagatgtaatcaattgaattaaagaaaagggaggaaaaataaaataggaacttaatgaattgacaccatcagctacgagtctcaacggttttgaagagtttcgattgcctttttccactgcaaagctctttgcttcgcatcttcaaacgataaaactttcttcggctgccaaaacaaaaacaagaatcaacaatcacatttcaattgcagaggaaaaaacctgaacaagggagccattggattgggtattactgtgcaaatcttgaaatgggaaggacttgagacttgaacgttgaggtcgttggagttatcagaccagataatattcccttttactacaagctttgatgggtcaacgtatatcagtcttggtttgttggtgagtattagctgcaccttcttacttgtgattttctgtagcttcttcactgctgatatcattagaaccgattctcccggttctagaaactgttgcctgttacattacgattcaaacattagaaaaccaagttagattttaaaactgagagttttcgtgaaaaagaagtaaaagcctaggagagtctcaccatcttgaatcgaaagagtctatggaggcaagccgagttatggaacctgaggattcagagagtccattgtgtccatcgttctgcaagactgaggtatctccaacatgtgttggattccatggagaaccgtccctctcaggagatgctgattgagactgaaaaagataaaactgactcaagagaaggacaagacgggaatttttttggtgcggcaattagaagtaactaaagaaggtaaataccgcaggatctggagctagttttggaggagtttgtgaccttaggttcttccagtcaactcccttgaagaaaggatgtctcttgagagaatcataaccttctgatccagctcctggtcttctactaggatctgtatcctgaaatgaaccataaccacaacaaaacaattataacgatgacttttgatctagaaaagactggctaaaagtgaagcctatcttactagcaatcggtcgatgaggtctcttgctgcttctgagaaatgatttggaaactttatatctctagctataattctttggaaaatcagccattcacttgcatccttgaatggggaagttcctgaaagcatttggtacagagtgcagccgagtgcccagagatcatttctgtttgaataagttccagaaataccaaagaaaaattgttctaagtaagaggatatgtagtaatccacataactaaaagactacttcaaaaaaaaaaaactccatatattcatcacatagtggtcaaagtttgttctaacacaaaactcttacccgaacgttgctggagaggagtttagaacttcaggaggaacatatgcagccgtcccgacaaaagtgcacgccttatcatctgcataattcacaagtttacacaactatcgaaaagaccttaagctcaagaatatagaaaaaggatcatgaacttcatattaccagaagccgcattaggaagcactgtgatttggctgtcttgcattggctttacgctaccaaaatcagcaatctttatgtgcccatctaaagttaacaacagattctccggctacacaatcaaaattaagggataattgttagcaaaatgatgcccttgttggatcttataagagatgatatgtgaaagagaagctaccttaatatctcgatgtatcagtcccatattatgtatatactcaagagcatcaacaacttctgcactgtagaaccgagcttcatcctcagatagacgacctttctgccaaacacaaaacaaaaccataacgcaactacattttgagaatatgaatcaatctcctagattctcaaataatatcttactctggtgatttggtcgaaaagttccccaccttcacaagactcaagcgccatgtctacaaaaatgagaatgacccagtatcactcataattacagcctttcaaacacacacactagtgaaaacaattaatggtctactgaaacaaagccacttgaatagaaactacctacatagtgattgtgtatcctgaaacgtaaagaagagtttcacaatcccgggatgttcgagttgatcaagaacaatcctctccaatttgacataagctgttttattctccttggtgataaactttttgtccatgatcttcaaggcatacacagttccattatccttcttcttcgccctaacaacctgattcaattacacataagcagaatccagctaaagttaacttagagcaatgaaaaagttttccatttcccataaaaaatctccaagatatgaattgattcatgattcaaaccaaattgcagaaaagatgagatttttacaggaaaaaaaatgtgaaaagaatagaaaaaatgaaaccttagaataagagccaacgccatagatcttgccgagctcgaaatcatggtaagtgaaattctcctgaggagccttaaaggcgaagcttttgcttctggaaatagtttcaccatttgaagatgaattcccttgaagagtaagctttgaatcaaattccttgtccattgtcaacatctccaaacttgttctacatttcgacgagacccatcagaagaaaacacagaacgacccaaattggatcttgaagcttatgatgttatttttcaggtgctgctgtgagtttccaatttcgaagaagaaagacgagaaatttcaaaaggatgaaaagggaaggagagaaattcgaagaaggggaggtgaagaagaagaatcggaggaatgaatgtgacactttcttcatcatttcttcttcttcgttaattaaaaataaaattagctgtaagaaaataataataataataataatggagattttgagtaggccttggaaacactctctattgggccataaaattagataaaatgttttcgattcgaacccaagcctatcgacaaaaatctatagctcgaaccttgaacttgatccgttgttcgccagccagcctatatttatttgtcctaatttttatttgcacctccggtccaatggggaagtggtccgacgcatggaagccttggttaactaagagggctttgattatctcacttgtacatgaacctgttgaagaatgaatgtttctcagctttttattttacgatgcttctgtattatccggttcccgtcgaacttgctgttccttgtgttataaacttctttttcttggtttagtttataatcatggatatatcatttaaattgtatatacagaggaaacaagtatacaattacacaggagaacaaaaaaaagtttaacctaattacacagaagatgagggccatcaaatgtagtatcataacttttttcttacaaaaaatctgctatgctcaatttattattgtcaatggagcaactaactagtgaacaaaaaatgcagtttagttttaaagttatggagtcatatagttgttatttaagttgggttctttttgaaatacatatgtggaatgttctgaaaagaaattaaatctacatctacggtgagaattatttaagtagatatttcaagtaaaagaatttgttgtcttcaattgaagtactgcaactttttgcttaattgtttattttgctgatttgctatttcatattgaatagaattagaaaatataacatagcctcattacatagttcgatgttctgtcttcctgtctaaaaacaaaacttcaatatcgtaagttcgtaacaattcccatactacaaaattgccaaaagtgaggagaaagataatcaaaacgctcaagcctcaaggtggaaaacccattcagtttttcctggcaaacctttttaaactcgttggtagctcagcagcagcatcttctacgattcttctcttcttaatcgcggtattgtgctcttgctccgggaatgttcgctttgcattctccaccatctctttcttcttcttagtccgcttgctcggcttattccttcctttcgtcttgttcttcagctcagtgctctttgctgcttctatggccacctccttctcagcttctatctctcctcttgatggcttctctttcctcctagagggtctcatcgcaccaatctttgaagggtccagcatgattgtctcaggtggaagtttatcaagaagcgaatggacttccttctcccgtctctgtttcgatgtttcaaatggattagccacccaagaatcgaaattgggttctccagaccctggaattagaatgctagaccaacccatcgagtgaccaattccaataacatcctcatatggtctgaacataaccttctcgatttgataacctttcaccatcgagtggttcatgtatctagtgtagttatgtgaagaaccaccactcgaatctcctaaaatctgaacaaacgatccagttccagctgctagcaaacctttctgactgaaactcagcgtttttgcatgaaaactgtgaatagtctgaacttcctcgaatttacgtaaatcccagatcttgattttacgctctttaccggatgtagccatgagatgaccatttggatgaaatgcgacagatgacactggcccagggtgacactgcatctggacaagaggtgcttggctagtgggtttccacattgtgacagttccaccggaatgtcccaagccaacaacactattgtaaggattcacttccattacatctgttcggcctttacctgttcggatactagcgaccatgcctccatgggttacatcttgataatgtagctgcccagacatgtttactgatgcaagcaggaaatggttctttaggaaccgaagtctggccactggaccacgttcctgggatagacaaagtttagagtcaataaccaagaacactaggcatatgtttcttttgttcaaccgaaatgtataatctcaccttcaaacaatgcagctcagttccatctctcccataaatataagcatacctgccaaaattcgacaagataagatattagaccatgcacctccaaatcacaaggcccaaaaatgtttattgtattagcattgaaatacatactttttctgtgcagctgcaaagaattgatcattgtgcaggaatgcaacatcgcgtactgtttctcttacctgcagatatcatcaatttctgttgagaaccaaataaaattttacaaataacaagcactgataaaaattatgataaaatagaaaagcagacctgaatctctttaattaagctcatattcatcatgtctaaaagagcaaggtgacctttgcgaccaccagctaacatatgccgaccacttgcagtaaaatcaagtttgtacgggccaaaatctacatatgttcaccggtgtcagtaaaatgaattagaagcacaaactgcaatgaggatatttctcccacagactaaccaaacttaaaattttacatagataagatatgattgtctttcagaaaaagctattgagcatatatacctgggagcactatgtcatattggtttcttgaacttaatatatctacttcgttggcaatatctgtctgctttactcgccatgtcttctctagaccttcagtctccaagtaacctgcctcagcaggcaagagccactacacacacaaaaaaacacaaccacgtcaaaagacaataattaagaactcaaaacaagctgaaccatcaagaccagaagaattaaaaacagttgctcgatgtgaaaacagagatacacaacagattatctcatcttcacgaagcaccggaaaaagggtcaaacaagatccacacagagctaaatgaaggagtaaacttaccttctcgattttagcagcagctttggcagacttcccatacaacttttctcgtgaagcaagttgagtctttagtttcttatctttcaatgtctgtggaacacaaagaaaacactcaaccactgcatttcacaaccaaaagacacaatcatcaaaagctatataaacatatatatacctcaagattagcaccttctcctctaagatatttcttaactttagtctccagctcaacatcactctcctgcatacaaatttgaatcaaagtcctcaactttgccaaaacccacaaataataaactgttaagaattcaaaaccaaccaagttagtacctgctcaacaggaggcaaaaccttctccataagattgttatcctctgaactaatctccatcttgatccttatcacctaaacgaaccaaacaactcaattacaattaaacactgataccaaaccagacagataattcagaaacccattagataccgactaattctgattagcaccggagataaatcttagaaaagacatgatttttcgaaacgaaaccaaaggcaaattgaagaaagaagcttcacctgagattagagaacacgactcggagaaagaacaacacacggcggcggtgaagctttgattgagaattagaaaaacggcgtgaagctatttagggtttagcagataaattgagttaatgcgtgaaaggagatactgtgagctccgacatcgatcctcgctggtagactgaatttgagggttttgtatattttagggttttacgagaagaaaaaacaaaatattacaaaaataaataaatgatctgtccgaaaataaaaatattggagatattattgagtaggccttagaatactttatattgggcctgatacccacgaacaagttatctcaattaggcctgagttgattaaaaaaaaataaaaatcactaattaattagtttactagttagtgaaaactcttctactgtacagtgaaacaaaacaagtgatcctgtttttcagaatgttggagaaatgttgttttgttaaatagcaacaaaaaaaatctaggtcccactcccatatataaaggattattcatgttttgtttacattttcatatgagtacatttaaaaaatcaaatgtactttcctgattttcctccagatccaacataaccagactgctttaaaagttctctataatataaataaaatgaaaaagattcttgttatgggaaataaaagaaccagatcttggtcccggcgtggccgcatgaacctgctagtttgatgggactcttggcggtctaataatgagttatcaaatgtaacaattaactatcattcactaatctaagctattgcgatatttgtttttggttagctctaatatatatgtcaaattaatatatatatatatatattgtatgattgatacagtattactcgttcatctctcaaagctataatagggactagggagacaattggttacgaagattctaaaccatccaagggagagcccattatgacccttatctttactttttggtgtcgattggtaatatattctttggaattttatggtttttctatttattattgcgatatatagctaaactatattattatagaaatgatattttacgaataagttcatgatttggaggccatgcacgttacgtttcacttgctttctttgtcgacattgtacattacaacgaataaaatgttaaaacggcagtggatgctaaacaaattcatttttaaaattcacgtcaatacaaaaactgtaattaatataccataactcagatttgcatgtcgctttacgtaattacgtttcacatgcgatcattacaatatatccgctttacaagaaaaagaaatgtctgtaaatgagctctttacatcaccaaacacagatacacatggaacaagagagttaatctatatttagaatacgtattttattgatcttgtttaaaaaatatttccttgaaaagaagaaatactttcttttaaaaatgtaacaacgaaatttgatttgcgacttattacgaatttgaaagcattttttaattagtaaaattacatattaaattccggtctaatatatatactcaaacagtttaatttcatgtgatagacacatgattatttgtcttcttctatatgggtgtgtactaattttatgcatctaacttatataatttaaagttaacaaaaaaacacggtcgaaacaaaagaacaaacagaaatgatttggaatcctatgcatatgcaacaaaatttggattgccaaaaaaaaaaaaaaaaaagacacgttcattcttatcaatttaggttcgttttctttgttaccaacctgtaacagtgattcttgtgtctacaatgttcgttccttgttatcatcctgtaatggtagggccatcgtgtcttatgcctcgaaaatatatgtgagaatctttccttcaactcaagttgttaaactgtctatattatgaatatatatccttttttttctgagtgtatagaacttttaatcgattgactaagtaatagaactagatctagaagttctctaatctgatttattatatatgtcctgcttttgttcattaatctttgcatttctaggaaatatgttgaaactaattcagacaagatctattttgaattacataaattatgattttattgcaaggagtttttttaatataattaattattattactattattacaagtgcatttttaatttgtaggacattgtgagactttaagatcagttgttcttatttctcgattccttttccatttacattccatttaaatctggtattgcttttagacgattcgttttggccaaagttttaacaaccgtaagtatattggaccaccgaaacttcaacatcgattataattgatggattctaaatgctacagattgtttgattgtgatcgtatggtttcgtggccttacaaaattacatcgacttatcctaattcctcatatacatatctctctttccgtaaaaatcgaagcaagaaaacgtgtcaatgtcaataaacaaaaaaacaaattacagtaaccaaaagaaaagagagagaagaacataataagagaggaagaagggttgacaaaaaaaagggccagagattgagatcctgcgagagagatcatatagatctttccatttctgtacttttttagttagatattaccactgactcacttacacagatctactctatatacagtatatatcatcatcacatgcttttctacgtggcatgtccaaaatatgtcatattttgccgtaaaattactcagcaaatgtaataattaattacataaatatacagctagcttagcgagtttgtgtacatgttaagagtactgataattctaagaatgaagacaaaaagaacatcaacaacgtatagcaaagtataaactaaatttataatcgtaccaaatctatttttcggttgtaatttaataattagattttgtaaaccaatgtagatcttacattaagttgaaaaacgcaaagtgtttaggatgagtaagcaaagcaaactcatgttacaagtctaataattgttctatggcatggcaaaggcttacatttttttctacattattaaacttggcgtgtaaaacgttgtgggtccaccgtatatgttgaaatcataatgtcacataaaaattatacagcttctcacattggacattaagtaattattaaagtagaggatacagaaactgatgcaatcaattgtttacataaaatataatgatgcatggactagttttaaatctaatcacatgccatgtttttaggtttgtaataggtacaagacacacatttaaccaaactttatgtttgagatctaagataagacattgatctaaaatttgtatatatatgtgtgtacttttctttactacctatagatggtattactattactttgatggttcgagtttttttattaagtaaaagtttctatatagacacactttaatgttcttgttgagaccataacccacacgtctttagataggagaccgatggtacgagaacaccatttgcgtttgtttcatgagttatggccctccttaattcactcgcacttccaaactttagagtttcatttgtcttttgtaaactttttgggaaatctccagtcatttttttcacttttttttattattcaacaaatattacagtacaaaacttaatatagctagtcatcttactaaggtcatcccaaaggttttaagcaatcactaacaaaattaggcaacccttacaaattgtgaatcacatgtgctctagctagttttgtacataaacacaaatacatacaaactatacaagtaacttaccatccctagtaaataatatatttttttctaaattcggaagttacgtccattttcccttcccattttatatagttttaccttacttactccatactatattttatattttattttcgttttccatgccaaaaagtaactctcatttctaaatgcgacattctaactttatgtatgtatatacgtgtatgtaaagacacaaacacatataacaaacccttctcaacctctcacttctccaagaagttttctctacatccacaaaagaaaaaaagtttcccaaaaaacaaaaacatacacaagtttagatatggatcttgaattactacaagatttgtccaaattcaatttcccaacacccatcaagatccgatccaaaacctcaaaaacaaagaaggacgaaggtgatgacgacgaagatgacctccgctgcagcacacccacatcccaagaacacaagattcccgccgtcgtagactctccacctcctccgccgagaaaaccccggccaccaccgtcagcaccgtcggctacggcggctctgatgatcagatcgtgcaagaggaagcttttagtgtcgacttgtgagataatcatgaatcgggaagagattgaccgtttcttctcctccgtctacaatgagacgtcgactacggctaaacggcggagaagttacccttattgttctcgaagatgaggcttaattcaatatttacatttttttacagttttactggaaatattgtgaaattaattatctgttggtgttcggttttaaatatttttaatttaattatgaatatggatggataattttctgcaaccgcgcatattaatttcgcatggaggggtcgatgttgtaaattgagtaataaatgaaatttaattccaattgccaagttttctatacaataatgtgatatttatgtcatttataagagacaagatcgttttatcatccaacttcatggaaaaaatagtttcaaaacatatattgtcgacttctaaagttgaagaacgcgtttacctactatgaccgatatgatgtaaaatatccgcagccaatatgaaggatcaaaatatctcctggtaaaaaaaaaaattgtgttatatatgacgcatgcatgtatatgaaatctttgaacaaacttttgtatatatgtcgcctgataaaaagttatttatcaatatattaaattacagtgatgttagctagtgatcaagcattgcttgcttcatgagcaatgggtggtacatgttcttttaaatataaaatcattgcatttatgtgagaatatgatggcaatcaaatcaaaagataactattactcgtatagtctcaaacaatataatgtcatagagtttattttttaatatacaagtcgatatttgtacatttaacgtttattatgttactgtatcttagattccaatttcattcatctaggttgaaccgaaaacgctttggtacctctcacaatatatatttttctcagttagataactgatgtacataagaaatcacaattacataagataccagtcgaaaaaacattaatattgtgtagcgtttcgaaaatatactctgtttgaaactttgaatataagcgggttttcactgtaagatgttaaatttagaaggatttttttttaaatctatcgtaatattaatgacagcaataaattgggttatcaaaaatgctaatggcgtttaaaagtttttaggtgttaatttggtaggagatgtatcagttgcgtgtcctacgtgtaattgtgaaagcaacaacgcaaagaaaatgaagccttgatgaaaatatatgtttaaaacaaaattaattgacggaaatagtatgttttaaattaatgttctaattgtacaatagaaaaagcatgtacatgtacaaaactcagttatattgtaatcaaatttattgatctgtaattcatgcttgtttatgacttttttgaccggccgatagagcggcggacgcaactttgggatctgaagatattaaaagaaaatgttcctaaagaattctaatatcgaagttgattctcatcgtttcttactttatttctttatgatctcaaaatcatcaccctttagaaaatttgtttcatgaccagaaaatatgcaagtgttaacatgttttaatttagactgttttcaaaatttacagttgttatttagtaaaatttagcaatgaatacaaacaaaacgatacaccaaattaatgtttgtagtatttactatttagtaaatgcatggtactgtggtagactcgctaagtaaattgcatgtgttacattttaatatgtaaccagtaacctcatgcatgtgtatctctttcaagtttcaacaacctttttgttttttagaagtaaaaacttaaaattctttaattggcggacagaaagataaggcgattactcaccagaccaacaaaattaaatggaaattaaatacatatagagtaattaaatggctctgtgaccaaaacatggaattaatgggcgttattcattagaccagtaaaattgactggaaattaaatatatatagtaatgatacgatggtcctgcgacgaaggaggagccatgtctacgcaactcatccaataagcaacacaagctattcttttttacttctttcatgattgtcagtttcttctttcatttattctatcattgcttgagatatgtattctttaatagaagttaaatagtgtgtacatataccatgttgtcactttttaacaaacaaaaagtcatatggtatcatcatcatgtcgcatgaagaggagctacaacatttcttgattcatgcgttacgtggtctaacaaagggaatgtgatgaattgtcgctctgggagtaatttcgaaacgaaagttttcttacctaaaactctttattaattatctgagtttctgtagagagaaatagcatcaatttaaagcttgaaaagtttaacacatctttgacaaaacaaatttaggaagaccaaaaccaaaataattactatttctctctatctgttttcagtggggggacgaaagacctttctttctttttggtaatgggccgggccgggccggtttaatccaaggcaaatggcaagatccgtagagttttacatacaaactttactctagtgtaaacaagaaagtcagaaaccgcatgcgttatagttagtgaaaggttcgatttctgtcaggtcttcgcatccgtcacgtttgctatctcgaacttcagggagcatattacaaacgtaaaagaaattgatatattacgctaattaatttattcccgttgttgtcaagaaactaatgtcttaattagccttttaggttaaaccctaatttttgtcgatttaagttttgaaaaacgaattttgattgtttggattttggtaaaaggagatcagagttcatcgctggtaccatgttggttaactggctcgccgggagacccagcaataagttttatgctctccaaaagtcaatagacgagctacacaaggtattatcatatatattggcaattgatgtttttaagttcctatttatttttctgtgacattgaatctattttcaaaagcacccaataatgtggttctcattctttttttctgatcactaatgtgtgttcacctcaagacgctcgagtctcttgaacaaaaagaaaaggtttctctgctgccgtacagtacaaggaagcgaaaacatgttacctggcaggttacaaaacatgttacctggcaggttacaaaacaagtatgaaacatcttttgattttgaagcacgaaaaagtaaaatatcttattatcttttatggatcaatttaaaacatgtgtgttgaatcttgtcatgcaggtgctaaactttgtttgaaagagaagaggattcacgagcgaacagctcaatataataggaattgtcagcttctcttacatgaagctgtgagttttttctttttctttttgtgtcttactaaattatttttttattaactactttttaagcgatgaattgaatttattgtcactatttttctttcttcttaattatacagctgattttgtgtgaaagtagaaaagaacaaatgattgaagctatgcgggatggagattttactacgcagaagacaatgcaagtttttatttatctttgtttgttccttttaatcttaacttatttgtatcaatctaactcatgtattatcctacgtctatctagactgatcggacggacataatgtgtatccatatttcttggctacgcgtgtccaccttttagagactatgcctttaggtagtagatgttttactacaaaataaacatatttagtcaaataaaataaaatttgagagaatcttctacataagtagctcacagacccaaccaaaggaccattgaataccatatatatatagatacacagacatataaacacacaaatattcgtgtttttttcaaactgtgagagaaaaagaaagagagaaagagatgggagagattgggtttacagagaagcaagaagctttggtgaaggaatcgtgggagatactgaaacaagacatccccaaatacagccttcacttcttctcacagtaaccatatatacttagttatatataagctctttacatgttgtttatatatgcgagctaatgaacaatataattgtgataggatactggagatagcaccagcagcaaaaggcttgttctctttcctaagagactcagatgaagtccctcacaacaatcctaaactcaaagctcatgctgttaaagtcttcaagatggtaattacttactttccgattttccacatctacatatatgtgaatcacttgcatatactgtatcattatcttacacttccttaaaattgaaagtagaatgtttcattatttacagctaagaatctttatttactcattatataccatttatatataatagaaaatagtagtctgaattaacttttcttgtcatttattgacgcagccatgtgcacacaagttgcgattttgtttgaacttggctagttggctttgtcttcttctttgagaataaaaatctcatactagtaaagaatactctgtgatattttatttttaagaacaaacatagatttctctgtcaataaagaattgttactgaagaatccaagtggttcgggtcgctttatggatttttacttttttgctaatcttattataatagaaccatataaaccaaattccgtttactttttaaatttgggtttatgacttggtttggttcaactcacttttggcttctaagactttgcataacatgttttagacagacaaaaaagaaaaagactttgcataacatgtatgaatttttattttattttgtttgtgtgtagacatgtgaaacagctatacagctgagggaggaaggaaaggtggtagtggctgacacaaccctccaatatttaggctcaattcatctcaaaagcggcgttattgaccctcacttcgaggtctgttatgttaaaaaaaaatatatatacacattaattttggctgattttgattttcgatttgaacgcattttaataaggtgtgaatgtgaaagcaggtggtgaaagaagctttgctaaggacattgaaagaggggttgggggagaaatacaatgaagaagtggaaggtgcttggtctcaagcttatgatcacttggctttagccatcaagaccgagatgaaacaagaagagtcataaaaccctattgatcatttgggtatcgcatacatgaatctattccacatacatgatacacatatacgtgtttctgtgtgtgtactatgttgctctctgactttctacagttcactattttaattataaagaaggatcttgtgctatcattagggagatacgtgatactgtagttcttcttgaaattgttattcgtgagaaatatcatggtttgaagtatttattttcacaagatggatgttaacgtggggatcattttacaatcattctacaaataattttacttctccagacacaagattttggatctattttagttcaattttttctttttttaaaaaacagtacactaaaactattttttatattaataatgtggtattagtctgatgcatgataaattttatgaattttaagatttgccccggtaaaaaagataatacacaatttcctagtaatatgttatatataaatctatctacaatgttactcttttttctgaaaatgatgaaattttgtgggccaaatagaacaaaaattcttgaaacagaaaattagttttcattttttaataaaataattatatgtattggaccacaactagacatttataattttatagtaattaagaagcaaatatttgatctaagtaaaatataaagaaaagcaccatatattaaaattatgaaagatttcctatttataaattaagatatcatattgaaggttaattttaagttcataaatggaatagaattcactaagaaaataattaaatttaaaataattgctaacagtaagatctcatcggataaaacttgtataattatgtttattcatgaatcatccttgcacctacgtatccatcttttccatcatctcatctatatatatgtacatttgcaaagctgagaagaaaaaacatcatattgtcgattgagcctatctctttatattatattgggagatgctttccgaagacgagaaggagaagacaccaccttctgtgatgacgtcaattccagacgacgtgatcatggagtgtatagcgccacgtgtcccgaggtacaaccattcgatgctatccctcgtctctaagcaattccgatctctcgttgcgtcgcctcgactatacaagacacggtccctcctcggctgcaccgaagattgtgtgtatgttctcatcgaagattgtatactcgaagttgctcgttggtatagtcttaaccggagaaccaaaagaaacatgcccggcactgttgaaaaccggttggtccttatctcgtcactcccgcctatgcccacagcagcaagctatgttgttgtgggttccaacatctttgtaatgggtggaagatacgactggaatgttgaggagtgggaagcccaaccgccatcatcgattgcgttatgcatcgactgtcgaactcacacgacccgtcttgttgccgacatgccggttgggcttatgacgaatgtatctaaggtcattgacgagaagatatacattgtcggaagggtgtgggcatcggctaccattgtggaatttgatttacgaacggaaaagtgggcggatggtacgaaaccaggctgggaggcggatgataggtggctcacaagtttatcaacgacggcaggcaagtttttcatatttttttgataaatgacttagaccaacaagaaaaaaaaaagaaaaagatccctagtgaaaatcaataaaacaactatagtttaaatggttttgtttattctttatttctgttcttcaagtatacacccaaggatccctatttatgttggtcccggtagtcactaaaacaacatccctctaatcgtcgtacttgggtctgcaggtaggggccccagcagttttgagaataactgcgatcacaaactaatggaagatatattaatggacaaggaggagatcaagcattatcatttgttcgacaatgaatgtgttatgggaaacatattgtacgtctacgatcgccataaatatattttaagaacatatgatcccaagcaaagaacctggggggtggtgaagggtcttgaaaaacttcccttaggtggtgatgagtcatacattgttagtcgcggtaaaatgttgatactttttttgatagtggtattggaatacgatgacgacgcttcttttcagaaaagagaattatggtgtgcggagattactgtggagaggcgtgaagaaggagagatttggggaaaggtcgagtgttgcgatcttttgcttgaagggggtttgatcattgggagttgtcttgttgttactctctgattttaaaatttaaattttgtaacaattacaatggattttatttctgttaaccgtagttcgttcatatattggtggtcctccacagacaagctaatctacttaaaacaatagaagaaaagaatccaaactaaaatcaaattaagaacccgattcgaacatacttatacaatattttgtatttgtgacataaaatgcgattttttggggtgtcaaccatgatagaatatggggtttattcaatattattagagaataaaacattgaacactgcaagttcatctatatcaatgtacaaacacaaaagtcttgtttgaacaagaaagggttacctatcacctggaagagaccaaaatgctcactttgaaactaactgagagtagaagaacccagaaacacatgaatattaacattgcccatgctgaactattccctgatttttcgggggcggtattcccttggaccaaccccaaagaaaggatcaagtcaaggttctcgtttttgccgtatgaccagcccatgttgctgtctgatatcgtgatcatacctgcggttacatgaactgaacctgatgattgtgctgcgtgtaaccggatagctgcatcctttgtagggaactcagaagcatttgcaagcggagcaggaatagcacccaacatgtggcttgccttctttagtaacgggtacttgtaatctgcattttcagaaattgatccatcatctaaacagaacacgtcacacctattaacaaatgggggtaaagtctgattgtggtaacataattctttacctggctcaaactctgttgcatctgcatcaacttgttttgaacaagatgcttcatccttttccttttcttccaccacatgtttgcttcttgaagtctcctctttctctagttccttagtctcaacctattggttgaaacgtgagttaaaaaataaaggaaacaaaagcaagtggaaatagaaagttttatacctcttgaaagagctcttcttgatcgaaaaaaacatcttcatttcccatcagttgcgaaggatcaaaagtttcatcaaagaaggtaagataatcttcaaagtcgaaaccatcttgctgagtactactgagatcatttgtttccaggtacagaccatcattctccagaagattactgttcggatccagaaacgcctcaccaatcaaatagttgctctcaactggaaaatcattgtagcatgatgtatcagtcccaaagatgttgtcagaagattgcaaagtttccgagtgcttgtcctggaccccacatccaattccttcattttgaaggctaccatcacggtcacggatgataggcttctgatctttctcataagattctgctggttgctcaaagtagccaccagagtccatatagtttcctgtttgttgtatatagtttatggagtctgagtagtttgtttcaacattattgctcgactccccgtgaataaagtttaacggaataggaatggcatcatagaccacaaagttttcagacttctgcaagatataaaattcgaatcataaaattagaagaacataataaacagcctagatggaactctgaccaaatcagggaatgagaaggagagattttcacaagcttctttcattcctcaatgaatacaaaggaacacaacattcgaccaaaagctaatcaagagatatcaaatactagaacacaaacctgatcaatgtcatccatatggacataaacatgatcttcacttccaagatcttcttggtcaggtacaaatgtcatatcatcctcctcctcccactcctcctcaacaaacggagcaccgtactgctctccatttttaggtccggagccactcttctgaaaaatcctacaaagcacaaacgcatccttcccacaattccacaacaaagtcaacaacacaaatcccattaaacaacaaggaactcaaaaagatcaaagtcttacttggtgaacaccagttttatcaaggtcttgatcaaccaaccgatactcatgcataacccaattggttctttcgccacgaggagctcgacctttgtgataaacaagagtcttcttcatcccaacgacttttgaaccattaagaatctctcgatctttccctgtagtcttccaatatcccatctcagtcgcacgattcgtctttgatccatttctatacttcttatcaagcatactgaagaagtaccactccaagtctctacttttcagcctcgacttgtctatttcccaccaaaatacaaaacagaattcaaattctatcatcggttcctatacaatatcgatcaaatcatcaacatattgaagaactgacctgggagatcccaaggctcagatttgtatacatcggtaacagagatagcatcgaacttaaaaggtttattgcagatctttcgtttcagatagtaacgaacgagttcttcgtctgtgggatgaaaacgaaacccaggagcgagcgatgttactgagccacgacccatatactcgatggaccaaaactcaaacacaaggtttatgaataacttaaaagagctgttctgtcgaattcgaatcaaaagaaagagcaaaacaatgatttcgaaataaggggtttagaaattgaggaaaatgggactaaatagagagaaaaaaaaaagaagcaaatcgttgaagacgagtgatggtgacgacgaaccaatcggagctaagcgaccgtagctagaaaatgtgcgaaagaagtttcacgccgtgaggttttaatattccaggaaagtgtgccgcgagagcatatcatgtgactggctgtgactgttttcgggtgacagtctttattaaactgacacgtggaagtcttgcactagtcatcaattttaaagtctctagaatttgttgaggtagttggttggttcgcgcaaatgaagatttatccacttcaataaatatcaagatgactaaaattctatactatatgcaattttgtttgaatagagtaaataaatagagaatatatttgaagttgaaaaaatcgtaccaaacactttttcgcttttttaaaattattgcaaattacgtgtaacgaaagtcttctaacgtcgctgacgcatccacattcgtaatcctagccgaaaatatccttaccattaaccacggtattaccggagaccgaacataattcccaattattttaaacaaagaaagttcttcttgtctggaaatctaaatgataatgcaaaggaaatgacaattatgccctcgtacctaaccactactaccccagagaaggctcagtgtgttatgaagacaacattctcgagacaacttaaagatagtttttgtctgaaaagactagatagatagatgatatatgacaatggagcaacctaaaaaatgttctcaaaagatgcaagaacatccacacaaaaaaagaagaaggataaaacactcagctcaggggctcgaatccgttttatcctatgttacaacagagattcacacagttcgcaatctgtctagaggagctatgtagatgggtcatagtattagggagattaaagctaaataaaaggcgaagggcaataagaagtaacctggagagatgtttttagagcctttattgtccattagcattgttcttcttgagttcctcgttctcctgacgcagcgcatcgatccttgactggagaatactgatcatagcttctgcactcatcatttcaagcttgaaagtttctctttcaacagacatctggtgaatctccttctggagatcattaaccttctcttcaggagatgcaagtggagtttgaggaggcaaaggttccttgtgaggacgtagcggttgctgcggcttttctttcttgtcggagatacccatgagtgagaactcaagcaatgcagagatggcagtgttggtggcagcggcagatgatgagattaaagtggttgtattgtcgacagttgttgttgtggacgaacaatggtcctgtgtgttcctgcttgagttgttgttggactcgctttggcgtctacgtttgtattgcagaagaggtaatggagcttctttgttgagaacgcatacaggtcgaggaggacgctcctcttcttccatctgctcgcgtttgagtgtttcctcgttttcatcataattattattgttgttatgctcctccggcttgaggtcattctcatgatgattctgttggtccgattcgatatccagtggagctgtctctctcggtggctcattgatgttgatgagactcttgctggctgactggatttcctacaacaaattacaagtgaaccccagacgacgcataaattatctgaaaccaaatgcttcaatcaattttgctgatgaaggattaaaactgcattttcactaaaacaacaaatcattctacttctggtcaacatttactgatcaattaagtgagttcatatgatgcacagtaaaattgctggtcaaatgaggatgcaaagtttgaacgatcttgtaatcagtatgattaagaataaagcccaagaaacaaaaaaaaaaaagaccaccgaaaattcagatatcttctaaatcaagagagttgattcatcagataaacctataaggttgatttctacaagagttggttacagactaaatggagttactagcgtcacagcccgctgaaacagttattaggagaagcttcacttcaacacagagttttgcagataataaatataatatcttgtgaaacaagagaaatgatgcatcagataaatttgtacatttgcactaaataacgttgaaatagtagattggttcataaatagactaatgcagttaaataaactcactcagcccaatggaaaactaagaaagagagtatttcaacagagttttttgcatacaagaaatattgaatgaaactaataaggtttgggtaatgaagccagagtaagaagaaatcacaaacctggtccatctggtcgtttccattggctactggcggcggctctagcctgagcttaacgtctattcctggaatcagagctccttcatcatcagcccattcctcttccatgaacggagcatatctgttcccacttggtggcccaatgttattcttgtggaagactctacacaacacatatgcatcttgctgcacccaaacaaagaattgagatcttttggaaattatcagataaaccaaattcgaaagtaatttggacaatacagtaccaccaggtttccgtttttctcggtttcatattccacaaggcgatactcatgcataacccaattagtccgaagcccgtctggtgcacgcccactgtggaaaacaagtgtctttttcataccgagaagcagaatgtcacggcggatttctctgtcttttccagtagctttccagtaccctctgttagttgctcggttcatcctagcaccgtttccatacttcttatctaatgcactgtagaagtaccattcttggtcccttgtcttcaatctcgaaaacacttaaacacacaacacaactaagaaattacttaaaaccagacttaactcaaaacttcaaactttttacatttcctgaaccacaagcaaacaaaactatagcacaagtaagcataaaattctaacggaatctggaaaaaacgaatatttgaaccacttaagaagtcgattagatgaaatactaccttcacggtgttatagcctaaacatagcaaaatgtaacaacagagaatctgcaacaaaatttcccagaaaaatgaatcggaacctaaaaaggtaaaaccttttttccaagaattgagtcagaagaagcgagagaagcccagaccacaaaaatcccaaatcagaagcaacaaattcacagaaaacccccaaatggaagagatgcacagaaaccaagagagagtggaagtgaaacccagcgaacctgctaaatcccagggctcatgcttgtatatatcgacctctccaatcgcatcgaagcgtacaggttggcccagaaccttcctcttcaagtaatagctcacgagttcctcatcagtcggatgaaatcggaagccaggagcaagcgaggtcgccaccgaagcagtacccggagcagtcgccgagggcggcgcagtcacaacagccacagattcgcgacccattaaagcaaaatagagaccgtacttgttctagggttttctcaatttccctttcaccaaacctcacctgaagaacaaaaacacaagttgggcagatggtttgacgaagaagaaaccaaagagataagcacaagatttgaggtaccttcaattgcaagaaaattttgtctttcttttcgcgttcccagaaaggcaggctagtagagagcaacaaaaaagtattttggattgcgataccaattttcgatttacatttcattatgtcgcagtaataaaccctagcaaaattttactgcgtagctttttgtagtaaattatacttgggagtaaataatgaaaagtaatttagtaaattacactttcgtagtcatcttaaaagtaaataatgtttttttacaactctcgaataaagaacaaacctaccaaaaagtacaatcattcagggttccgtgtggaaaaaaaaaagacaggttccgtataataggacgatgtagttaaaagtaaaatataaacaccaaactctataacacctacgaaattccattgcctagtaagatatgaaaccatttcgaaaatacgtctgtgatcaaaacttcttcttgaaaacttaatgggagagagatggaatccaggcttgaatcgtaccaagcgcttttcgcttttagagaaaaaacaaataattgcaaattacgtgtaacaaaagtcttctaacgtcgttgacggaaccacattcctaaatcgtaacgctgaattagtcaatgacgattataccctcaatcatttccactaatcacgactttacctaagaagctctcttccctgtggactgtggagacagtcacacagaaacatcaagcaacagagtggttcttgtccggaagaccagaaggtcatttcaaatgacaatgacgattatgccctcatatctgaccactaatgattaccccaaggaaaaagctttctttatggagactgaacatttcttgagaggaaaccaaacaaaagcgagttcttgtctgaaaagactagatagatagatgataatatacgacaatggatcagcctgaaaatgttcccaaaagatgcagaaacatccaaagtaaaaaaggataaaataaaaagacctagttggttggctccgttccgttttatcctaattttacaacagagattcataaggtttctgatccgtctgaagaagctacatccatagctcatactattaagaagattacagctaagaggcaaagaagaagaagaagaagaagaagacacctggagagatgttgcggtggtttaactagcttgtccactggcgttcttcttcttaagttcctcgttctcctgacgcagcgcatcgattcttgactggagaatgctgatcatagcctctgcactcatcatctcaagcttgaaagtttctctttcaacagacatctggtgaacctccttctggagatcattaaccttctcttcaggagatgcaattggactaggaggagaagtttcctctttctgctggttttctttcttgtcggagatacccataagtgagaactcaagcaatgcagagatggcagtgttggtagcagcagcagcagatgatgagattaaggtggttgtattgtcgacggttgttattgtggacgaacaatggtcctgtgtgttcctgcttgagttgttgttggactcgttttggcgtctacgtttgtattgcaggagaggtagtggagcttctttgttgagaatgcatagagaaggaggacgctcatcttcttctgcgtgctcgcgtttgagtgtgtcctcatcttcttcataaccactatggttgttactctcctgtggcttgaaggcactctcatgatgattctgttggttaggttcgatgtccattggagtagcatctctcggtagctcgttgatgttaatgagatccttgcttgctgaatgcatttcctacaacaaattacaagttatgtgaaccccaacagacataaaatatctcaaaccaaaacgcgttgatcgactttgcagattaaccaaaacacaataaatatttctcttgttgagcacctttaatgccaaacgaagattgtaagtctgaaatatcatgtaatcaaaggataaatctcaaagaaaaaggaccataaagaaaaattagatatcttgtgaatcaagagagacctttcattagataaagctgtaaggttgagctgagttctacaaaaggtgatagcaaacttaatggaattgtgcagtttaagtaaatcagcccactgaaacagcacttagagaagcaaagagcttttgcaataagaaatataatatcttgtgaatcaagagagatgattcacattagagggatgtatcacagaggttatgcatataagaaacatttgagtataaagaaagtacaaacctggtccatctggttgtttccattggcttgtggtagagcctctaccctgaccctaacgtctattcctggaatcagagctcctccaccatcagcccattcttcttccatgaatggcgcatatctgttcccacttggtggcccaatgttattcttgtgaaacactctgcacaacacatatgcatcctgctgcacccagacaaagaagtaagataagataggattcttacaaaatgagataaccccaattcaaaagtaactcttttggacaacataataccagcaggcttccgttagtttcagtttcatattccacaaggcgatactcgtgcatgacccaattagtccgaaggccgtctggagcacgcccgctgtggaaaacaagcgtctttttcataccgagcaactgaatatcccggcggatttctctgtcttttccagttgctttccagtaccctttgttagttgctcgattcatcctagcaccattaccgtacttcttatctaacgcactgaagaagtaccattcttggtcccgagttttcaacttcgaaaacactgaaacacacaacacatcacaaggttttttttctttcagatcatacttgagaacacttcagatagccaaacacacaagcaacaaacttcatttcctgatccacaagcaaacataactgtagcacaagcaaacataactgtagcacaagcaaacacgaaattcttaaagcaatctgaagaaaattcgactttcttcagttaagaagtcaattggatggaatgtcttcacagtgttaaagcctaattgcctaaacttagcgccaggtacgaacagagaatcttctctgcaacaaaaaatttcccagaaaacgaatcggagcacgtaaaagctaaactcatttcccagaattgagccagaagacggaacaaccaataagcccaggcgacaaaaatcccaaatcagaagcatcaaattcacagaaacccccaaatcatagagataagcagaaatgaagaagaagaaacctaacgaacctgctaaatcccagggctcatgcttgtagatatctacctctccaatcgcatcgaagcgtacaggtttacccagaaccttcctcttcaagtaatagctcacgagttcctcatcagtcggatgaaatcgaaagccaggagcaagcgaggtagccgacacagcagtactgggcgcagtcgccgatggcggcgaggacacaacagccagagattcgcgacccataaaaagaaaaaaaaaagaccgtatttgtttctaggttttcttctcaattttttcagacaaaccagaaatatagttgtcaaaatgttttttttaatatgaaaccagacaaaccagaaaaagagaagcaggtaccttcaattgcaagaaatttgctttcttttcgagttcctagaaggctagaaaaaaagtaatttcggattgcgattactatttttcattttcaattttaataataatttctcatttttgagtgttgcagtaataaaaccctaaaaaatgttactgcttagctttttgttgtcgttctatgcagtaaaataaaggaaccactagtcctagtgtgtggtctgaaaagtaagtatccaacgataaatattttttaaaaagtaatatgttagacagatgatgaaaaaaataatgaaaaattaaatattgcttatgtgattaataactctttttaaaaggtaaagtatttttttaaaagattagagtttatttgtttcctttaatgttaaatgcattgtatacatctttagtataaaaatcttatattgtatttgataaattattgtagttcaaagatttacaaacgctaggataaatagaaaataatctggttggaaaatatgtaatggttttgtgcttatcaaaagttaaatgctgacatgtacagtaaaacctctataaattaataacttctacaaattaataaattattaagattccaaaaactagtataaaaagtgatatatatcgatagattaataagataataattattttgaatgttctatgtaaatatatggtctcattaatatcataaattaataattatataaaagtatcaactatgtatatttattatatgtaaaaatattctttaaaatttatttttaatatttttttgcttaaatttgtattatttttgtttgaaattcagttctaatagttttactatatcaaaaaattttggtattattttctatacatgaagttgaccaaaaaagaagaattaatgagaataagatagaaggtgaaagaaaataaaaaaggagtgacagatacgtttgcttgcaggaggatactttaccaataaggcaagctaaaggggaggagagacttggtccacacgaatcatcatctttcccattttctgttactatttattattcttcttttctctatttattttctagtacaagtcctcttcaaatttgtaattcgtagtttggttttcgtttaaaccatttgcaattctcaaatataaacattaactacgatttgaacttgaataatttacttgtggggtttgtattactgtttaagtcaaggtgacaaagacaaaaggttactttcttctctctttttttcatcttctagtaaaatggaatatttaaaacaatattattcgacatgttgaattttgttgctgtcgacatttcgatattgaaattctatataattatggtgtacgggggtggaattgatgaggcgtaccagaaaactatatgatatttttgcactattttcttcttttttggtacgctatgtctcttgtctcttatgctttgtatgcgtaactaattcgaaggcagaaattaaaacgaaaaatatccaactcttacttttacacatattattatgaaactaataaagaaagtaagagtaaaagaaaactctattttatttatttatttatataggttgtcagctatctgacaccactgtctccaaaaaggacaaaatgctaaaatatcaagacttttttttttggctcaaaaaaaatatatggtttgtgcctcgtgtttaagcaatgggccaaatttcttctaagttagaatattaaaagcccatgatttatttgtagcccatttcggtgacggacgggtgtaaatcaagcccatgctaatttattcttctttttcttattttcataaacgcagtttctcgtatcgagactagaacaacatgcattcgtcttcacgaatgaaacactgaatcttgaagagctgagaatagtgtgttatgaaatttcaattccggtaacaggttgcatatttcagggtaagatttgtgatccgttgcaaagtatatccataataagatatgtgacattaataaacaaaatatataaaagcataaattaagggcataatacattgcattttgatctctcgctctcgacctgctatttcaatgtcaacatgaacaagtaatctgtttaaattgcaaatttaaccaaaaaaaagagttggacccgtcacgctcttttcatgagctttattttcttaaaaggtttgagctttttttttttccaatccaaaaaaaaaaaaacattctttaactaaaagtatacatgaacgtgacataagtttttagaaaatgatttgaatggatcaactgaaaataatagtatagagaaattttttatttctatgtattttagttgattcatttaaatatatacaaagaaggatgttgggaatgtggtctctttatgagaaagccccaatagtaaacgaatgtggtttttattatttatattgtgtaaccaaaagatcttacattaacttggatgtaattacaaagcattgcatatgcctaatgggagtatatatatttgtataatatatggtttttcctttgaaattaaggaagtaagaaaggaaaaaaaagagagaagaatcttgcaagtcttgtacaaagcaaggaatcagtaactttcttaaaaaaatggttcatcaatttctgcttaattttgtttgattaggtattaatgaattttgattttagtaatggcaatccaccaatgtaggagcagaagacaagacaagagacttttgttcttctctctgtttcttctgttgtgtttgttcatgttcttgttcgtgttcttgctttgaagcaaagcttaatccgttgacccgattctcatcttccggggcaggtagattcagatctaaatctaacgacacaaccgcgctcctcgctctcttaacgggagcctgaattggaccctccgacatctgatcaaacgacattggcgacaatgacaaagccgtgtttgcagtagccggaatggccgcaaccgatacggtggcggtagaggcggctgctgcggctaccactgcacctctatggcgtctcatgtgaccacctaatgcttgcccggatgtgaattcggctccacatatcccacattcatggaccttattattactacctttgccgtataccacaagcgatctatggttactattgttgttaggagttgtggtgagaacgttgttgagatggagagaaacggcgtcatcgtagttagacttcttgtggtcatggttagagtgaagacccatagcggctttaggcttcttgtggctggctctatgcccaccaagagcttggaaagacggaaaagtccggtcacatgttttgcactggtaaacatagtaaccggctctgcctccaccaccgttcgttgtggtcccgttagatgaagatgtctctagaaacctcctgctgctagatctatacgcattgttgttgttgttaccggaatcttggtaactcatcataagctgtcttgtttgttgttgggggtgcggttgcggttggaggtggggaagagagtgaccttgggcgaggaggatcaaacaattagccatatcttgatcttcttcgtcagccgtggcctttaatgtggcattgttgttggaagatgaagaggcagaagatgaagatgtaacaccattgatcaaagtattgttattattcttgatgttattgttgttgatttcatcattgagactcttctccttggaaacaagactagtagactcttcttcagcatccggttcatgcgaagacataggaggaatgatagagaaagggattggggactgaggacgttgccgcttagtccgtttccctttaaggatcaatgattgctccctagcggctgatacagcctccgcagctgcttccattgagtatatagagagattcaagaaaaaaaggacgtaatattggaattgatcaatcggaaaagatgaaatagagagaattgaaattgaagatggagatgatcagctttaaggattacatatatataaatatgtatttgtgtgttaagagagatgtgtgtggattgaaaagatgcatacataaatagagagtgatttagggagaggagtcaaagagagacaccacattctcaagtgtgtggaatatgttggacttgtctttttgcagcctctaaaattttagtacttctgttattgtctctattacaatcttcccaacttggcaaactcatcacaatacacaagagctagagagaggagagagagagagagacaaaaaaaacataacaaaagatgtgtaaatttagacaattacttgagtgatgtatgttttgtctcttcattatccctttaatttactctgtataacaacttatttttggattggttctgttgaaagaactacatgttttgtttttgttataatattcagtaaatttcgaaaattggtttgattttttttaatgtgatcctctattctaccatcgttgagaaaatattaataatcaaaagataagaaaaagaaaaaaaaaatggaagtagagagattactttgggtgaacgaatgtgtaaattaatgatagtgcaagcctggctctcacggaatctacggctctctcttcgtcgtctctctctaccattactccactccattttttttttttttaattttagtatcgtcttggcatatttctaatacgtatacgtacgcatctctacgtacatacatggtttaatgaataaatacactattcttattaatttctaaaattgatacacaccagaaagaaagaaaagaaaaaccttttaagtccaactaatttgtcgtaagagtacgacgacttattccctcgacttgagacaataatttgggataatgaccaagtcatctcttagcttgaaaacaattccaaaatatagtagaatttcttaatgaccaaacatatattgtatcaagtgaaaatagattatcttatataaccaaaaaagaaagaaagtggaaatcgatctatgaacaaagactttggccttatagactgtaactgaatcaaataccaaacgacgtatcacgtatgcatgtctaagacttaattaatttaactttgttagttatattacatctgatgagtgcaagtaagttgataatgtttgtagtcttgtagactttttttttttttacattttcaagatacatgcacattcgcaccgcacgtattatcaactagtactatagtttgtcctaaaaaactgtaaactgaaactcttgattttgttataagatacagtttcaaaatataataatatgactaacacatgttggcgtgtttatgtattatgaagtatatgccgatttgttaatggttgcatgatgtgaagagcacccacttcacgtaaagaatatattagtaagtaaaaacgaatcagcaagtgcagctcatcgtatctccaagacttttcagattatcaatcaatatttttgaaagtggacaatctggtaactgagacaaaagataatgatttcgggaatggaaatggaccaataggcttgaaatgttttttatttattaataaacgtttagttatctttacagattaatttactttaatgtaactaggatgaatgttgagtacttgataatacttttgaattaaatatacattttattcaatttagtatgtttggttgataagtgaccttttgacatgttcacacacacacacataagacatatatgcataaaacaaggccattatccttttcttatagatgaaatcagggtttatttttctctgagttaattttatataaagtctactctccattgttggatgtagctaataattacataaaaatgatagtgactaattattgcttattcccaatcattagggaagagtcgactaacatggactgcatgtaaccataatatatatacaaatagacattaattagtacatttcttttttgttaaaagacattaattagtacatactttgagtaatcagtactatatacataagtaagttttggaaaaagaaataatcaaacaaaactataaggtgatgtcaaaactaatcaatcgaaatctataagagaaagctgagtgttcttgttgggaaacaatttgtttacgagtgcatgtaaactagcatttttttttactgatttttaataaaagaaaattttccttgatcaagtcattgataagtgttcattgttaatatatcttggatgtttagtttatttgactgtgcctattcagtgtctttctgtaacattatttactaaattagtatccactcttcataatccattgtttatgtccacacacaaaactaaaaacaatcgttttgttatcaaaaagtcagatattcacccatcataggcggtcacaaacaaaattatgaacaactacatagtctacattaaattattggaagatgaagtagtattatttaccaacattgtactatttcaggatattcatatactgtattgcagatatgcatacatcttatggcaaaatatataataatcatagtacgtaaaatgtccccattatttgaaattacgtagcgatattgtagaatttttgtgatgatggactgatggtactataataacacaatcaggaccggctcaatgtttattgggacatttggacccatgacgacaagtttaaaattcaatattttcatcttattattatctacgaatatataattcagagttaattttgttactactagtaaattaaacagtttataaacactgtttatgatactctaactcgaccacaaaaataaatatatgcaaacataagttttagtgtttgtataattcataactttcatataaatcatttaataaacattttatattgtttattttacaaccgaaagaatccccacgaaaagccacaaatttatagcatatctaattaatttggtatttagttgataaatctctgattattaaagtataaaactcgttgcccattttttttatatagttttagataaatcaaagaagtagtacaaaagcggtgtcaagagaggataatgggagagttaaggagagcaagtcggttggtatataaatttccgtttaactagaagaaagcttttaattattgagtgagtagttcttgatctcgtgtctgctttcatcgtcgcacgtttctgaaatatagaaatcaaaagagaaagtagaagtaaacagatgaaactgagtatcccacacttttcaaccagttatgagtagtagaaaatgctttgatcaagaataagcctttccttgtctcgattgcttgaggttttctttggggtcaaattatttgagacatggacaaagagaacatcattgtttctcaaataaccctatgttctgagggttggaactgaataacacatttcttgtgtaattcgatggatttgggttgatatattaagaagagttttcaggtggctatatcataatttagtctagttctgtcaagttttatgagttttcaagtaaacatcaatagataacgagaggtttatgtatagtaaactcttacgatttgcggtgaaaaaagagagtaattggcttatatatgtatcctatgtattactcttaagtattttctaatttagaatgtgagatgataacaagctaaacatccctagcaaaactaaatatacagtgagattctcgtatagattagtttttgtttttcgtcgacatcttagattagatattagcaagaaataacaaatttgtttagcaacgcaaaccatgtcttctttcataagatatatgacagcgagaaaggcttaagggaaactcaagcgaagcatgttactagttacggtctatttagttatctgaaaaactaatgactatatatatttatacttttgtctaattcaaaaattaattaaaattagattgaagtagtaatctatcatttaaaataataattaacagagacacgtacataatttctaaaatatgtaggtatatctgattcttacatcttcatcgaatcaaagagaacatataacaacattagtaggaattatattacagtaatatacataataattagatggggaatcataattaacaatgaaacccaaatttaaacgtgaccatcccaattatacctgaaacggaatctctcctcaccgttaacattttgatagatgccagattccctggccgaccacctcacccaattgtcgcgatgaggcaaatccctactttcgtaggcaacgatcaccacatgatcctcccagtttttacctttccatagatgacaccaataaagcgtttttccaagtatatgatcagtgaaagcgtaattgtaaaaccgaccgggccgtctcacgtggaaaccaagattggtgtctccagatttgcatttcacttgtaaatagtgtccgtggggcaggttgttatagataaacaccgatcctcctatcacattttcggtgtataaacatacaaccatcagaaatatcgtcacacgtaacttcattctttctttccttttacgtttttttctttctttctaagtaatggatatttttgaaggatttataaatgttttcaacttttgagtaaatgttgtttagaaggctgcccgtaaaaatctgtctttttttttctattttatttgtgtattttccattcacctgattggcattttacccattaaaaaaataatggttcttaaggatttcaaggggatattacttgaattatactataacaaatatatagtactattcaaagatttcattagcgagcggttctgccacaaaaatagaaacttgcaatcagcgtgttcagtgttctatattttttttttcttcatcttaatagttatcaatgcagatgatatcaagattggctttgtgtgatatatcaatatatcatataactcgacgtggtacggttaagattaccgttcggaattgatgacatttctgatattgacagatactgttaagattacctgagagatatggtatcccatatcttggtctgtggatttgcaatggactatatataagatcgtttttgtcactcagtacatttctgttcctaacggatcctgtgttactcatcatggtaaggccaaaggcaaaaacaaaaaaagagaaacggtacaccattcatcgataacgttgtgttggactttgcagtgaattttctaatatgctttgacaacaaatattctttagatatgtaaaactttttttgaccaaacataaatatttagtgaaaatatatatatgtaaatttttgatttttatatgtatatctcaactaaaaaaatttgtggataaattgaaatgacagatgctctaaattgatattctgttaattaagctcacgtacggatcaagcaaccggatcccacagaaacgcaacacattcgtgattcgtcgcattaatatctcaaagtcaatccgggttcaagacggttttcaagcatcacccggttcaggttttggtttgtcaaatatttggattggaaatttgataaaatctaattaatatcatttattcttttatcattaatgtattagttttagcgagaatatgactcccattttacgattttcttttccgtggtttgatatttgttttattcaacaaaaccaatcctaccattctccatatctttagcttactttatcaatttcacacaaaatatccctatttaatttttgcataatttttaatttcgtttcaattttttaatagatatagaaaaggtgagatttgtaaacttataatgaccaaaatttcaatgctttaaccgttagaaaaaaagaaaaaaataaatacaaaagaagaattttaaccagtaaaatagtgtgcattaaaagtttaaaaccatttgaagtactttaggaatccatcttgagttgttgacaactgggccaacatttacttagcgaggatacggggcaactattactgtgtttacattctttttgagaaattcatgatctataaatatgtcgggcaattattgtatttggtttcgatttatgaatcatatatattagaagagtgtgtatttgtaaatcataacaaaaagaaaaacctcactgtagcccatgtttgaaagaaacaagaaacaaaaaacaaatcagaatttatgctgctttaatttcgtcaccacatgttagacacaaactgtgtaaatcttggtcgatgagatcaaattgaaaatgtagatatgactcataaaccgaaatcaaaagaaaacatagatagatccattattctgttgtcaattctaacacacaaaaaggaaacataattatttcataagatgaaatgagaatttagcttttcgaacatcaacctttaatccaactatacatgagtttctccgggttatcgttttctgacaagtaaatagcatcatctcttatatcccatgagtacaatgcaccacatctataaagaagatcaccttcatatgctgtaatattcctatgatactccatcctagctcccttccacaagttacatttgaatatcgtcgtgaaaaggagattatcatgaaaactaaaattgtaggcagtatcttgaaatttcacaaaatgttcgcccaaatcgtcgcttctggatttgcaatggacttttagaatactatgactttgaaaaaggttgttttgaaaagctacagtgtttttatgacatttatcttctttggacacacaacacaaaacaaatataaaaaacagaaagctaaatacaagattcattattttgaatcaatctagttaaacttggggaggatcacaaaatacttattacttatctttgtgtatgtctttggagatatttatagctaggcttcatatgtttttcaaagtttttctcatcctcaacaattgttgccagattatgaatcactttggtttgatgtttaaacaccatttggcggagatatatagaatcattggtgtctctgattctctaaaagcaaactttaagtaagtttccttaaatcttctttgaatttttgtcctaaaataggttaaatttttaatgatagtatttcactagttttaattcttcttttttttttttcttttaaaagttaagaaaatgaattaaagttttagtaagttaattaaaagtaaaaatctcatctgatctttctgatttctattaaaatacatatctttattttttttaaaaaggtcttcacatttacataaattcctaattaccaattaagcaccaaaatgcaagaaaacttgagcttcatagacataaattagcattaaggaaaagaaaaaacattagtttttcatccaacgttgatcgagcttttctggaccagcatttgcggataaataaatcccatcacgttttgcaatatatacacgtaactcaccacatcgaggaattggagcacttcctctgtacgctctaaagtgttgagaataccccccttgttgcactaagcaatgccatgttgttctttcaaatgcagcctcgcggaaattaattcgaactgtatcactttggaatttcactgtgcctgtgactcggtttttgttgttcgattcgcagttgactttgagaataataccaggactgaggttgtttcgaaatactattgtgcaatcttcgcaagctttatttaatccaaaagacaaagcaataattaacaaaaaagctatgagccgattcatttttttttacaaaagtctaaaatgttcttcggagtaatatgaatttaaagaacatgaacgaaccattatagttatttatagttttgttttgtttatttacgttatagaagttttaaaggccatgcaaaaattagaacacaaacttgaaccatttaaactcttgtggctgagcatttagtgccaacaatagttttccaacagaccaaaagaaagatttaaacatttggacttattttaatgatttctctggtttggagaaaacgagaaatgtggaattgctttggcttcaagttacaaaggctgaccactgatccacctttggaacatgatataactctcctctggtttatactctggtgtgtgtcctcctccctataacaaatccacaaatcaattaagaaacatattgtgaaaactgcactcaaaacgttgatttgaaatgaaactaaaggaaaagacttgctttgatagtagcaaatgccatcttattggcataggtcctcgtgtatctgcaacaaatagaagagtctaatgagttcatacaacaatagaattagttaacaaagagagcccatcgaaacaaaagaaacggtaatacccagcgatttgatctcctatcatccaaggtctccagtcatcaatgagagaataattaagagacctaatccaagcttgagttccaaggtaaggtacttccatgtcgtgatcaccactgtttacacaaaaaacttcacaaagtttacaaaaaagtatttgaattttgaagtaattcttcaaaagctagagtttaaacctgacctgaagatgagagatgcatatccatcgatgctgttattcatgtggtacggtacactgcttttaatgtcatgattgtaaggtatctcaaaataacaacgtacccattcccctatactcccctgcaatcatagattctcataaagagttcgacactttgttaccaaaaatatgaaaaatttgaccttttgtcatgtataatattaccttattgacatgaagagctctttgcacattctcatcattggcccagtaggtagttaacaaataccgatacatctgcaaacgcaaccttgtaaaatacgtctcaatggttgaaaagagtacaagatggattacttacatagcaatcaggagatgtgtctacacactctggcgttattataagtgctttgtttattcttttagtgcactacaaataacacaaaagtctctattagtgattactaggaagaacagaacatcatctagcatttccatgagtgtgtgtgtgtataccttctgatattctccaacgagtttcaagcattttgtgttacgtggatcaacattttcatattttcctttgcagattctcttcattgactgcaagaaaataagatttttgaattgcttattatctactttcattgtggggacaagaggtcaaaacatttcatgtttccatacctcatagagttcatcagagatcagtgccattccatgagcatatggaatgcgataattaatatcaacttcattttctgttgatgggtttccaagaatatagccctgtttttttgtcagtgtaccaaggacgaagtctatcaatttttcaatgcttaataagctatcatataagaagcaacaaacaccgatgaacctgaagatttattggaggtttgcagcatacatagtttcctgcatcatcatgtttatactgttataaagagaaatatttgatatagaaacagcaaagggcttggagattgatttgcagaaataaaatcataccttttgagatttcttgaacgagtgccggaatgaccataccacaataagaatccccaccgacatagaaagggttggaggaaaactcttgatgcttgcctagccactgcacaacaaccagaaaaacctcctaagtatctatgcacaaagaaaaaatgttttcaagagacaattaagttagtctttcaccttgtgaagaaactcgtggattctcttggcttctcctgaatcactgggtttgttaacaagtttagttcttgagtaggagaagccagttccaacaggctgatccaaatatattatactcgaaacctgagaaaaaaatgatacacagcttaaaagatctgagcatagaccatcatgtggaaacaaacaccttatgctaccttagtccatgaatatgtagtagagaccaaggaaggaagagttccattgtaaacctcaatcttcacattcacaggccctgattcaaacatgtggagatgagcacgtgaggatcaagctaaaacgagaccaatttgaactctagttagtgtgagaagaactcaagtcggttgtttgcccaaaaaaaaaaaagaactcaagtcggttaaaagcttggaccacaaattggaacagctgtttttgctctttgtccctttgtgatatcaaggcttaaaggtgtgtttgtcttatctcaaaacgcaggaaaggttggcatctttggcggtttagagacacgagattcaatgttttctattctattaagtaaaaaaaacagagtgtacatcgtttaaggtttgagaaagacaatcttttaagctccaaacctaacaaaacaaatcacagaaaacgaagcagagagagacacaacataacatgataactatgagttaaaaaaagaagtgatgtgttagatattaccattctcgtaaagaagaccagagatagaagagcaaccaggtcctccacttaaccagagtagaagaggatcttcttgtggattcctctcagacttgataaagtagtaaaacaactgcacttcctcttcctcaccaacaccaatataccttttcattcacacagaatcatattcatacatacttaagattatttccaaactcagaacaacagataaaacaatcacaggaagagaggaaaacaaacccggtttcgagttcaaagggaagagggccatcaaaaccaggaagagacttgacgatagaggcagaatcagtacgctgactcaagaagataaggaggctaagaagaagcagaacagtggaaacgtagtcgttagccattcgtttatctgataaatcaaaacctttaaagtaacaattattaaaccttttataggaaaacaacaagaaaagaacaaaaatccttagaattatcttttaagaaataaggcggtagattgcgtaccgtgattcacttgtgtacttttcactgtctcccaatctttgaattatggggttcgttgtcaactcaaaactgtcaggtttttgttttaccaccgctcgagttttattacccatgatataattagagagcttgtttttactaatttatttactgtaagaaaaaaatgaagaaaatattatttcacccctttacaaatgagattgtgaaagaatttacttagcagagtacacagaggggttctccatcaaaccgaattaaaccgtccaatccgcttcatgtacagtagcaagaccactcgctagctttatctacaagcaactacgaatatacattgtgatctacagcattgagcaatagctcactgaacaaaagtgaagtcgcagaatccaatacatacgaggctgacgagagggtattcgatcttagcaagactcagaagccccctcgcatcttctccttaagtgaaggttccttgtacgatttgattttttcagcagcttgccttgaaggtcttccaacagttgtttttctcatttcctctgattcgtcgcctgttggtttcttctttgattctcttttaagctccattgaaactgaacatgatatctgactagactcctcaacattgtcatcatgcaaaggcggatttgcaggttctttgatggctctcggagtttcaatgtttgcagattgtcttcttgaagagactctgtcaagtataccagtttagataaaaattcttacgtctttactttaacggaatatagaaaattgatctatattcactacaaacctgattttcccgattctctcttcaatgtcatgtggttctactgcttcgggtttagacccgatagactgttcacttgcacagcatctaaaatgacatccataaagaaatcagaggaagtagcataaatgtacttggtttatgaataagttataagtcaagaggattggaaaaggaaagaacatgtgaagctactacaaacctggcatttgcagcaatcgtttgatcatcatgtggaccattcaagttttcagtcacgcccagctcttggaaattaaacctcgcagactgtcttctcaaagatatcctgcggaaaataaaatcgcattagataacagtcttaacactttagtctgtaatactgcagaatacagacaattatctatcactacaaaacctgcttttcccgattatctcttttgtgtcatgtggttctactgcttcgggtttagacccggtagactgttcacgtgcagagcatctgaaatgacatccacaaagaaagaaaaagaaaacaccgcaaatggcataagtgtacttggttcagggatatgttagtggaaaaggaaataacatgtgcttctacaaacctggcctttgcagcaatctcttgatcatcaggtaaaccgttcaagttttgaataacgcccagctcttggatattaaacatagcagacctgcaaaagatcatatcgcactatatcaaccttcagaagggtacagtagttataaacagagcctaaccttattgccgacctcctcctcttggttgtctctattgagtcatggaagctttcagatggctcaggttcttgagattttaaccgggcagaacgccttctcaaagggaacctgcttgaaacaaagagtgcaaaatcactagtcatttccaatagtcttcacaggctttagatgttagtccaaaatttgaaactggaaaaaggacagttaaccaaccttgactcgtataggctttcagatggctcaggttcttgagattttaaccagtcagaatgctttgtcaaagaaaacctgtttgaaacagagaaagtgtatactcacaagtcagttccactattcttcatccactttgaatgctattcccaaatttgaaagtggaaaaaggcagttaaacaaaccttgcatcccccttaatttctttggcgtcaaccaccttttgcaaggtttctgtttggctggcttctcgagtcttagaactgctactctgtcttcctgcacaatatctgtagcaaaaacaacccaaaaaagaagaagcaaaaataagatagtgaaatacaaatatatatttacgttatctaatcgctttgaataaataaaccttttgctttggacattgtcatttatatggttttcagcatcattgtcactatcagagaccaacttcttgttgtcaatgttgtcttccatctgacatgtctctcccgatctgccaattatatctaatacctcggaattggcgggattcttccttccagaaactctcctataaagaaaagcaagaaatccaggataacaagattgtccaaaagtttttataagacaatggttgaaacatcaagagagacccaaccttttactgttggctttctcatttctttgcaatgagttagcgttggagctcccggaagctgaaaatgaaacaaaaaagtcaataagggtgatcacgctaagagattcctagaaccaacaatgaaaaccgaaagagttacatttcatctttgactgtgatttatcttaccatgctcatgatctgcatcatttggctgaaaggttttgcaagccccaccacaagcatttgcttgagcctgaaggtcacaacaatgcagaagaaaacataagaacaatggagcagtagggtcgaaatgtcctattccataagtacaaaagccaataatcataagtaccttgacttttgatgcatgacgcgtacatggaagggtttgctcctggaaagaaaatgtggcaattttttaagtgattaactttttttttttttggcaaacgagtgattaacttagtttacaattatggtgatcgaaaattacatacaaatcgataacataccttaagcagcattttcctggccatgactaacccattcttgcaaccaagttcgtgctgaagtaccttcagctgaaatgcacagaaatttcagctgaggaacttataatcaatgatcaaagcctgtgtttgagcaagttaagttccagaaaaagcatacttggtctttgcttgtattgaactcctgccaggaaagaataatgaaaaataaatttgaaatcacactcaattctcaaaatcatctccaattgaaccatacaaagatgagatgtaccgccaagatacgagtgttagcctgggcaagtagcaaattctgttcttgaaccttctgaaattcaatcctaagtttcttcagatcacttttgattccactgtgtcacaaaacaacaataagtattagcaacaaataaacgtacacaaaactcataagttttcatattttagaacaaagattactctctctccatgacgactttcatcagctttgtgttttcctgcaaaaacatgttgataaagagcctgaataagcacagtcaaagacaaggaaaaaaaatccatttctctatatcgaacagaagaatttctcagtgccttttgaagattttcagcgttttctttagaagagattaatatagcttgttgctgatgcttcgctccctgattcattagattcttctgattctgcaaattagtaatatcccccaactttcgtctttgtgcactgttcatcggaggttccagaaccattttctctcctttagctttgttagtacgcacacctaccgatttcaaacaaatctaatcgtaattaatcatggaaaggctagcattctcgtgtaattagagcaaaaactgaagaaacccataaaatcgatgaaaaacaacattgcgcccataaattccaagcaaatgaaattgaaacaatcgaatgcgaagagaaacactaacaattagcgaagatccacaaaggtattattaggtttctgagactcaatttagcatctaaatcggaacaaaaccatctgaaaatcccgagatgtgagctctctatttcaaattaaaacacagaactaggaagacgaacagattgcgaagagagatttcgtaagcaagactagattcgaaccttcactggcgtgatcaccgacattcagaaccgtcgctcgaaccatcgtgaacccctctaacaggatcgaaatttgaatcccggaggaaaaaatgagagtgagagtgactaatgactatacatacgagtttggtcttcatttggttcggttgaaacgttgccggttcgcttgctctgtattactaaaatgaggataaaccgttaaagattcacaatgtggttcggtttacaaattgatctcttgtttccctcttcccttgttcgcgcttaaattcttaaaccaaactgagaaaacgaaaaaggaaacaacaaaaccttcataatcaagaatcaatgtctctgattcgattcaaatccttttgcaaagagcgtccatggattccataaagcgtttgttgcagccgtcgttcccacttgatgtagtagaagatatattttacaagattcccgccgaatctttgaaaccgattcaaatggacgtgcaagcaatgatactatctcgtcagcagcaagagattcatgtacaatcacttggataagtactctccggttccaaaagaagaggtagatatatgagggttagtccttctaccatgcaatgcaactatgttgaaatcaactgaggtactatccagagatgttattgacattaattaactaccagttttcttatttgtaatgatcttgagaagttttaggttttggtccagattcgcatatgtagtatttattaaaaccccaaaagcagagaaactaagcatcattatcgaaagacctcaacacttccaacgaacaaatgtaacatttcaattgtatgttcatcatgtgcatacttggaaaatagatgcaatgtttggtcatatattacgtccaaaaatattcatttcacaagaagttatgcaaggatcttagtaaaagcacccaaaaattagaataagaagaagaaaaagcaggagacttacgagtgaaagataacttagaacccaagaaaaagaaattaaattaccctaaatacttactatatgagatccggttcaagggtagccgattcgcttgctttttcacttaaaaaaccatcgccattttggtttggttgaactgcaactggttcgtttgctcaagttgatgaatttaacgaatttcggttcactcacaatttaacgaatcccaaaacctaccggataaaggagaaagagacaagaattcttatccaagtcaaaacttttgctccttaattttcaggatcagggttcacaattttggccttaatttggttcggttgaaccgtaaccggtttccttgctcaaataaaatggtcaaagtcaaaacttttgctctttattttcaagatcatggttaaagcttcacaattttggttatgttgaaccgtaaccggtttgcttgctctgttcgatgaggttaaaagattcataagttcgttttcttcttcgtcatccgcgcttaaagtcttagacctgacaagagaaaacaaaaacgaaacctttattattcaagaatcagtctttgcttcgattcagatcttttcacagcgagcgtccatgggttcttctttgccatttgatttaatcttagagatacttcagagaactccggcagaatctttgctccgattcaagtctacgtgcaagaaatggtacgaactcatcagcaacgacaagagattcatgtacaagcacttggataaatctacgaaacggttcttaagaatcgagaatcgtgagagggttcaaatcttggatcccgtgaccgaaatcctcgccgtttcaacaatcccaaacgagcttcgccacaagtattttactctgattcactgtgatggtctaatgttgggcatgtgttacgaagaactaggtagtgaccccaatcttgcagtttggaatccggttatgagaaaaatcaaatggatcaaaccgtcaccaccgttggtttgttactggggaagtgattacttggggtttggatacgacaaaacatttcgtgataactacaaaatcttgaggtttacttatcttggtgatgatgatgatgatgaatcatatccaaagtgtcagatctatgaattcaattctggctcgtggagaagtattgaggctaagtttgatggggaaatagatgttgaggtcgacggcgtgtctgtgaatggaagtatgtattggattgaattgcaggagaagaaaaacttcattttaagtttcgatttctccaaggaaacattcaaccgcatatgcgattctccactctattgggatatcaaacgattaggatgtttcaatggagatagactttctctgttacaacaaaatgaagcaacaagggagattcatgtgtcggtgacaaacaagttgagtgatgaggttgtttcgttcagcagatatttcagtgtgactctccctgatattccgttgttccggtccattgatattctgcctcttccggggtgctttattggcaagaacagaaatatcatagcatggtgcgagcaacttgtaggaaaatatgatgatcatactagcatcattctttacgaaattggcgaaggtggggttacaaaacgaattcggacaggacgacatgaagcggatgaggactacaatgacctggataattgtagctatgtctatgttccaagtctgattcccgttccagaataagaggtggcaatgagagttctgttttttggtctttctgtatgttaacccttctaccatgaataatgaaatcaactacgatactatatgcaaatgttgttaaaattgacctctggttttagtttttgtattacgatcttgagaagatgtgggttttggtacagagtttgtatgtgtataagaatcgatcatttcaattacattttcaagcgtgtacgtggaatatttgagaaatttctatttattaagaggtaaggaaatatctacagattgcacactctcaccctcaatgttacagagttaccccctcgggtaaataagaaagagcattgcattggtaacacataaattgcaaatgagaaatgatcaacgatataaacagtttatttaccaagacttacagtaaaatgtacaatgttcaagagtgtccccaacttatgtagtatgtactgtagtccatatgctgaagtcagacatgtcaatccttaaggaaaggaagacgagtacccgtagtccccatgctaccatctgctgatttttggggggatgaagatgtcaacgtcttcttggttgatcggcgaggaagaatctgaaggcgcggattaaggtgagtgccgaggttctcaactgcgagttggtaactctccaccagctctagctgccgaactattatatctgatcgtctaggaagaagctccactggttcacctcccgggattacaatatattcgattgctagacggacttcctgcgtttcagaaactggtatcagtagttatactcgcaagtctccctaatctatagtcactgaactgtattagtagttacatgagatgtaggaatcctaatgaactaatagttggtaggtcaaagagactgatctgaaataacaagccatctctattgggaaattccgagaatagttacaggagggggatgagagttacctcaagggcatcgagttcttctaaactgggtttgctctcaggagcatcatctttgatctcgatatcatcaacagaagatttttctatggctttaggggctgagccaaatgattcccttccaaggatcattcggactgccttcaccatctgagccatagtagttgactgcaaggtaataacaggacgaaagaagtgattcaaattaataaaacaaaggaatgcgctgaatcataatcagccatgcaaaaagaaggataccttaatgacaaatatcggtagcttgtgtaatttggcaacacgacggattgatgaattctgtttcaattcagaacttgaggctagaatgacatctgcttctccaacatcatctgtcacttctatttcgtcgtctagacccataacttcagctacttggaggagatcagcttcaaggacctagaaaacaatcagatgataccacatctatagtcagtatctttggttgtttaagatgaagattattttccaaggataagaaaaggaacatttagaaactaggcaataaaagatcaggttctttacattgtaagtatacacatgaaccggtgagcttcttgggctcgtgtatgtgttacttctggccttattagaccgaatgagaagaaaatcttcatcttcatcgtcagacagcaattcacttacgaaatctctgttgagcaatggtgcaggctcctcttcaaggttctccaaaggaatgggagtcactaacttatgaggaacatcgtcttcgccacgaatttgacggatctcaaatggagcggatttccctataataacaaagaagtttgttcggtttggttttaccatttgttaactcaattacactttattgggagaggaagtcttttaagttttaacttaccagctagtatagcatcaacggtaacatctagtctttgatgaacacgacactcagttctcgatatcatctctacagcacaagtgaatgtcggaggtccttttctttcaagaattgtcttctgcacttttcttttccttgcttcttcatcaccaagagtcacactctgggcaaaataaattcaaattaaggttagagaagataaacaacagaacaaaataagaagcaaagttgttgtctaaggttttacctcaattccaccaataagaatctgcaaagaaggatttttgattatgttgtctatagtcatcccatgagcagttgcaacaagctgaacacctcgttgagcaatagtgctagcagctaaagcttcaagctcagttcctatctcgtcaatgatgattgtctcaggcatatgattctcaaccgcctcaatcataacctgcataaagaacttgttaatacagcaagatccttttgattccatcctacaccatattattacaaggttataaagttgcgagacatacatcgtgctgtaaattcacatttggaacttgcatccgcctggcacgaccaattccagaatgaggaacatcaccatcacctccaatctcatttgacgtgtcaacaatcactacacgtttcctgtgttcatcagctaacatccgtgcaatttctctgtacaaaacaaaccaatcttgtcatataccatttatcaatcacagttttaacagaaagatcatcacattataagttcatattgatgtacctgattaaagttgttttgccaactccaggagatccaatgaccaagatggatcctcctccttcaatcaagtctcttataatttctgcacttccagagactactcgacccactcgacatgttagaccaattacttgcagtttgcgattacgtatagcgcttatacgatgcaaagatctgtcaatcccggatcggttatcatccgaaaaatcaccaacctaaattcaaaacattttgattcagacacagaagagaccataatcagtataagcaagtcttatcagtcttgaagaactgcaataagctaaaacatttgagaaattagttgcatgtcttagatcagagacacacatacctttgataccgcaagctccagatcctggtgtgtcacaggctgctctgagatcacccaatcgccggaagggaatctagcaagtggctttctccctaaatccatcactacttcgatcaattcctcaatcgcctcgtgcttaacaagctccttcctcgtcgccggaggaagaatctctaggaaagcgtcgagctccaccgtaggcggagccgtcgtcggtgacttccgtgatgagatcgatgaatcagatgacggtgaccgaacatcgaaactgaatccatcagatggtctccgaacaggagacggtgacgacgccggggatttcgatgaagcgattctctgacgcgcaccacgtgtccgacggaatgaggaagaggaatcagatgaaaaagcggttgcggtggctgagattaaccggcgcgaagcttgccaggagctgttgatgtcgatcagaactagccgcgaattcaacgccctcatcacgattaattaattattttttttaattatgtactttcaaataaaaaatgaattaaataaaagattctgtcttttcgttttagctactggtgtgtatatctgtctggaaagcagaaatgaagaagctaaaaaggaaaagctgaggaggagaagagctatgaagcacaacgaaacgacaacgttttgagtattagttcttttttcatttcatttttttggaatatgatgatgcgtgaagactgaaactagtggaagattccaaaggatcaaagcatctaattacacagaaactgcatctgtatagaacaaagtagggtccattgtagagggaaagatgataacatagccgttcaagcaactggttcacgtggcgccacgtggagagttggacaatcttgttgacacgtgtctgactatggagctaccgtttattgccaattcgtttggaactctttgacaaatttagcccaaagtcggagttggtgtttctcgcacggcagatgcaaaagtcgtcaactttttagctctgcaaattgagatttgaaccaaaattgctgactaaattaaaccaaacaaaaaccagactaaatgaatgaaatacaagtcaacccaaacattgtgtatctacaacgacggttccttaatttcttgagtcatcttcgttttttagccgaatgggcttttaggtgctttacaaatagtggtttaggattgggccttctaatcagaaacacaccttgtagaatattacattcactataaaatgtaaggtttacattcacgtgaggcccataagtgtttttgtaataattaatttaatatatagtgtaaacttaatattaatatcaaaccgaccttagctcagttggtagagcggaagactgtaatgggtaattccaaagaaatctttaggtcgctggttcgattccggcaggttgaatatttttaacattttatttcacttttaaattatctgggacccacactcatccatcttttgcttcacattcaactcgcgtgcctaaccgtcgattactacgccaaacgttatctttgttgtaacgtaacagattcacccactatttctcatatttcgcaaaatagccccaactttctcgggcacgtatcggaagatatttctgtgatagttcctgccacgtgtacattctctcctcccccaaattgttgtatacaacaatctcagaaaaggaaaaaaaaagaagcacagttgaaagaaccaaaaatggagaaactaacttttctcagccttctcctgcatttcgtcgtcttcatcgcttcaacgataccgtcttcatcgttcctcttgaatgatcgcacctttgagagatcgaacttgccgtctacgcgcgcggagaagctgatccgtgagctaaaccttttcccgcagcaggatctgaatgtgatcgatgtcgctgatttgcctctcactgctgcggagggaccggggattgttgaacggaagttcgtattcccgaatatacttgccgatggtggccctactgtcgacgatttaggtcatcatgctggttattacaagctcccgaaatctcgtggcgcaaggtttatatctgactttagattttggttcataggtatatagaagcttgcagctagctcttgactaggttatgtttgattcgattagaacattggactgttggtgacgtttttctaattggaatctcaaagtagtgggaatagattataaatgtttgtttgctttgtttgttgatttgtttgcttggtgtgtgttagcatgttctacttcttcttcgagtcacggaacaagaaggatgctcctgttgtgatttggttgacgggagggcctggatgtagtagtgagttggctgtgttctatgagaatggtcctttcaagatcactagtaacatgtctcttgcttggaatgagtatggatgggatcaggtattattactttctattataatcccaaaccgccttaatattccagattattgcacatgagagttgatagagagtttgtcttgcaggtttccaatcttctgtatgttgatcagcctgttggaactggtttcagctacacgacagataaaagtgatatccgtcatgacgaaactggagttagcaatgatctttatgattttctgcaggttaggtcactggatcttctcttgaattcctttctatactgcacttttctgctttaaagctatgaattggataaacaacaactctgttagactgttttggttttcttgagtcttcgaaaaaatgggaatctgcctttgtttgcttagctgtgtaacaagatcttgatgaagtttgctgatgttacctcaggctttctttgcggagcaccctaagttggcaaaaaacgacttttatattactggagagtcatatgctgggcactatatcccagcttttgcttcccgagtccataaaggaaacaaggctaatgagggagttcatattaacctaaaggcatgtgactatttcttgtttctctcttaaggtgttaatggaagtctgtagtactcacaagtataaccttgcagggattcgctattggaaatgggcttacagatcctgcactccaatacccagcctatcctgactacgctttggaaatgggtctaatcacgcaaaaagagcatgatcgcttagaaaagattgtcccactgtgcgaactatcaatcaagctttgtggtacttactcctttattccttatcaatttatctttaaaattgctctgtgtttgatgaatcctgaatccgtgtttttgttttaccaggaactgatggcacaacttcttgtttggcatcatatcttgtctgcaactctttgttcagtggtgtaatgagtcatgctggtggagtaaacgtaagcccaaaagaactgctcaatttttattgctcgttggatttctagatataattcgttctggcaaaccatttctatccttacttgtagaaagaaattgtgtttcatatttctgcatttgaagtaaggaaacaaggctaatgagggagttcacatatctttgtgtagtattacgacatcaggaagaagtgcgtgggaagtttgtgctacgatttctcaaacatggagaaatttttgaatctgcaatctgtgaggaagtcacttggtgttggggacatagactttgtctcctgcagtacttcagtctatcaggcaatgcttgtagattggatgaggaatctcgaggttggaattcccacgctcttggaagatggaatcagcctccttgtgtatgctggagaatatgatcttatctgcaactggctcggtaagttccaaaacatagataatcaaatccagacatgaaaataatgaaatagattgatttgaactgttgagggaaacaaaattggagcaggtaactcgaggtgggtgaatgcaatggagtggtcagggaaaacaaactttggggcggctaaagaagttccgtttattgtggatggcaaagaagcaggcttgttaaagacttatgaacaactcagtttcctcaaggtcggcctttcttgcataataacaacagtcgttctttggttctactggttttcttatagtatgtaacaacaacaaagggtttgatgatttaaacataaaaacacaggtgagagatgcaggacacatggttccaatggaccagcctaaagctgcattgaaaatgctgaagcgatggatggagaattcacttatcgaagatgctactgtgactgttgctgctcagggaggagaggaactggttgctcagatgtgatcacatcttcttttgcgttgcatgaaaacaaaaggcagcaaacataaaacaatgtgtgagcaattgacgttttcttctgtaatttgatctcataagtcataagaaagatacagtatatgtaggggttgcccaatttcgttataaaatcaaactctgctgacaccaaaaacataataattactacgaaatgtgttatctatgtttgtttccgaaataacgaaatgtataaaacaaaacttaaaacgttgtttatacaaaataaagccgaggtaggcttgcaagagtaatgaacaggttttgatgcggtttatgtacatgacacatggcaaaacatgattggctacatgaacgattttatctaacaagcaagatagagatgagattaggagacaaggagcaatgtcgatttcttcgttggggtctgcaatctcaaagccaacttcttcatcatcttcatatacgtacttaggaagctcttctcgcatctttgggctagttacgtcttctttgttatggacaaagagtaaatctcaccacacaaacacaaagctcaagaagcaaaagctatgtgttagaaattcagctcaagagattccaaagacacttgaggaagattccaagtttgtacctttagatcctcaagatcctcgattcggccctccagtcagtttatttgtccctttcaactttgtatactgttgagtgttgatagatagtctgtgatgatgacaaacactttgattcaatctttttttgcaggttttgctgttgcttggccttcaacttcatgaagcacaaaaggtgatatatacattagatggatatcaaacttccaaagcttttttgagtctttggattaatccatcatcttgtaatgcagatacaagaacttctcaaggaactcgatggcgaattcatggaggttatctgacttctctctctctctgactcttgcatgatcctaaaacttttgcagatttcataaaaccttatgttgctgtttggaccccagattgtgttctgtacagacgatatgatcaagcgttcgttatgggaagcagttaccacaaaacagcctgacctgaagagagtgaaagtaagtggcgtttcaattccacattcaggttcttttgtcttgtttcttacgtaaatccgctgtgcagatcgcggaatcactgcctcggatctgcttcttatctggtttgacaggagaggagatgatgatgttcattgatgcattcccagaaactggtacctacaatacaaattcaaaatgaaacaataaaagggagactttaatgcatgtcattttaaaaagtggtggatcaaatgcagggctggaaccagttgtgtttgcagctatggttccgaacagtgctgataaacctatctttgagttaactgaagaaatcatgggagatcatgagttactggttagtcaatcttaaaaatgttgcaccaaagtcacctatggtcttaaatctatgcataaataatgaaacacttgttctctacgcagaccgggagcagttccagctgaaagttttgagtgaggaagacagcaggacagctttaaaattcttcaggtttctgcaacaagactcttaagactttgtgcattacccaaagtatattgtacaacagtgcagtcttcaaataaaaaagtgagctgcacaagaatgcaatcagaaattaagaacttacacaagttatatgagtcaaaatgtaacttcacttggacatatccagtcatcaaacaaatgtaaaatgaagacgaaaccaaatcaatctcttttttctctgattggtgttgtttcacaattcacatacctgaaaaaatgattttactatacataaactcaataagttgcagagatacaatggactgttaagaactcataaaaatcaagagctaaaatgcattgatgaacaacaatgtaatcttcaaaccaagaactatatcactcaagacagaacaaccagagtcatcaaacatgatcacatacgaagacgaaaccagaagattgtaattgttcctgaactttgatcaatctctctctttcagtattcacaaaccataaaatgaatctaagaagctaatcttcatcatcactctcatcactaaagtagctaactttcttctcctttctcttcatcctcctctcttcttcttcctctgcttctctttttctcaacctctctccagcttcattatccaccaccgaagcccaattctcctcctcaaattcctcctccgccacagccaacgaaggcgccgccgcagaccaactaatttcctcagcctcaccttcctcctccttccgccgcccccttttcttcggcggcggtggtctctcccttggacctaactgatttttagggcactcgtacgaaagatgcccttcgtctccacactcgtaacacctcgatttatccttgtaaactctcttcttaataaactccgacgcacgtccattatcagcggcgatcgaaaccgtcagtttccgaccattaagaatcttggcgtccatagaacgcgccgctttagccgcgtcttcacgagagacgtagagcacgaacgcgacgccacgagattggcgagtgtggcgatctttgagaacagtgactctcgcgaccttgccgaaagtggagaatagagtgtggatgtcggaattggtgagggagaaatcgagattggagacgtagagtgttgattttgaaggagctaagccgccagatccgccgccgggagctgatgatttggcggaggaagaaggttggtgtttagggttcgaaggtggtggtgccgcgacggaggaatagcgatagtagaaagtgtcgtcctcttcgtcgtcgctatgatgaatcttcctcttcttcatttccacttaatttcaatttttgtgttccagttttgaaagctgagctttcaaagggtatttgtatttatattggtaaagaacaaacaaaaaaaattcgatgtaatgaagcaagaaaaaatcaaatattttctttttacatttgcaaataaaaagtctggaaacataccagacaaattatcattaggaaaaaatttataacttaaatttgttagttgttacaatagaaatggattatgaagtacaaattttgtgaactacagatgttgtatcaaacagggattctccaaaagtcattgttcaatctttttcatcgtctcaccaccaacatgtaaggaaccacctacgtgtgagttattatcgatgtaaatgatcagaatttcaaaaggaacaaagaagttacgaaaaatgaataccagaactagatgcaactcctgtgctcaaagacttgctttccccttgcatgctgctacctcctcctatcgactctactattctaggttgttgttgttgctctaaggatttgccattacctaaagactctgattttatactctctgagacgccattgttattactttgcttcagcggcaacggtcctttaatccttctgtgcaacagaaaggttctctgtaatgttgtttttgataagtgagagaaattattgcacatatgatttcgtagcaaacctgatcatcttccgcttcaatgcaccggattttgcttttaatatacctactcaatatagaagaagttagagatgttgctactggttctatccggtaagtaaggagtaatcaaatcaggaaattacggagcctaaccagattttgtgcctgaggtagatgatgatggtagcttgcgaccagttcgctcggctttaatagaagcaatgactgaatcagctccaacaccaagaccttttctccccaccagtttcactccaagtgtctcacagagatagtatagtctcttttcatcaccacctctgacttctctcaggtcaagagcctgttgtctagttaataatgtatacacctgaatctgttgctgctggttgaaatgagactgaagctgctgaaacagtatcttgtttgagtgctgatctgcttttgggtcctcgtttctcttacgaggctcgcttagagttaccctcaaaatagcaggagattttgggtctggattcctcctactaaagattatgcaaaaactcccaaattccagatcagggtccctaaataaatctgcaagaagaatggcacaggaatgagcattccttgatgggttcctatcgattcttttccttatgcctcgggcctttgcagattgagccatgtttgcagcttctcgcagaccagtaacaaaagctccatgcatggttgcagggtatcgccttgttgtggcttctccggcaaagaaaagccttccatctcccacactttctgctaatatatcgtaatcatcgcctgaagctcccactgcaacattagagtaagatcctaaactgaatggatccccaccccatctggtgcagaccgtttgaagtggatcagggacatttattccttgaggttcataaatacctgatattcattaaaatggaacttgcgtcagacgctagcatcaactttaacaaatctggaatacaaatcctcaactaataattcttgaagattgatattgacaggtaaaaattgaaattcaattaaatgacaatcaatagatagtgaaatctattacccctaagaatatgaagaacacgagtcactgcgtcagtgggtggcattgtctcaaacttatgagcagcttctcccgcaaccaacgcgatcaagagagcaccaccagcaaccggtgcgtagctatagaacagaaagaattcacctcgatagttcggatcctcagtaagatgcccaaaggtatcgagatctgtgctccaaaatacatacggaaagagcattgcaactttattcagtaacccaaaacctaatctctttatacaatcaagctttctctgaggtaattcgggaacaaatttgatggatccgttcttaaggacaccaaggggaactgtacacagcaccatatcaccctcatacacttgatttccagcagttaccttgacaccatttgaaccatatctgattgtttggacggtcttctcatataatattggtacattttcagccaaagcctgaaccagccttccatttcctccaggcagaaagcagtgatctccacccatatcatatgggtcatcttgatcccagaatgcaagagaaagctttgatactaggcccgcatttgcatactccaagttagcaagatgccagttaaacaaacccatctcctcggtggccacatcattcccagaaacctgcctgaatgtctcgagtgctgccccaagggagacatccatggaaacatcacccatcaactgcctaagtttacttgccttgtctagaagctggttaaacgctacctcaacctttatatccacatctggatcaaccggcttaccatccaccctataaagaggacacttgtctcgtaccttatagagagaagaaccaagctgtctcgctataatccctaaaggatttcctaatgttccagtcaaaacactcccacctaaatccgctgcagcacctaccctattagcttccatctttttggtataaacccgtccaccgggtcgtttcctaccctccaaaaccgtgactttgaagccaaacctcatcagttgcctagctgcagccaacccagataaaccagcaccaactataatcacactagacttgcttgactgagcaggaaacttatctttaatcgcctgtgctattccaaaattgatatatccatgtgtaaccaagtaattataagccgaatctaagagactactacaatgtttaggaatcgaattaagaaacatctcctttgtgacccaactagatatattttctcgccatttggatataatgtggttcctaatcaaaatgtaattgacttgttcaatgcctccaacaataggcaccacaccgaattcaatctcttcctcggtaagcgaatcagcaggaaacccagcagtgagagcaagcaaagcttcagtggtagcttccttgttaatcgtaatgatctcatcaccaatcccaggataacttttcacagtctggtttgatccattgacgacctctacgttaaatctaccggaagaagaagctgaagatgacacgaaattactgttaccaggaagaagacctacgttagggacgggaagggaattaagcgaagacattgagcgctgagaacgtcctctccttcgtttctttggtgcggagaatgagaccatctgctcaaaactagggttagagattgaggtagagatcgaattc

SEQ ID NO: 405 - DNA, 101284 bp, Arabidopsis thaliana
gaattcattgtgggtatagaggaatttagtaacggattattgattgtttgtttttttttggtttgggattttctagattttgaacctggagctgagttccgtgtgtgattacttaattcggttatggctgcaccaaacgttcgtagtagtagcagcttctctcgcaacatatcagttgtgtcatcgcctcaaattcctggtctcaaaagtggtcctaatggcacagcttttatatcgtcagggattcgtgatcttgacagtgagctttctcctttttatttacacatcaagtctcatgaggataagagagtctggttttggggctaaaaggtttgtattttattacttttccagggatactaggtggtgggtatcctttgggaagcttagtaatggtaatggaagatcctgaagcaccgcatcatatggatctgttaagaacttacatgtctcaggggcttgttaacaatcaaccacttctttatgctagtccttcaaaagatccaaaagggtttcttggtactttgccgcatcctgcatcatccaaagaggataagcctactgcgcccgaccctgatcaggtgctactttcttgtctgtaccttcgttctgtttgcctttttcctggctagttaaaaattgggtagtgtgcacttttgtcaattctgtagggagagagcttgaggattgcttggcagtatcggaagtatttggaaaaccagaagaatgctattggtaatttagttagtgcggttatatattcatttgcatatcattcaagaataaattgagctactagtaagttagatatcattctttggaaacataatcctctttacctattctggatcagatgattactccaatgactttgatatgagaaagcccttggagaggcaatttctgagcggacggcccatagattgtgtcagtctgttagactcttcagatctttccattgctcaggaccactgtgctacgtttttatcaaaatttccaaggttgtgtggcatcctttcttatttgatctcaattactcgctctagtttcgaatcaataaattttgttggtcatacctatgcagcaaattctgctcaagctcaattctttttacatctctcttatacttccaagctcagtttgtttatattgttttagtttgttactgagtcagttattgttcaaattcttctcttatttactggctttgttaagtagattgtcctttttttcttaagaacctgtgtattgtttcccacagaaacagcagtaacattgcatctattggccgcatcgcaatccagtctttttgctctcccctgtgtgagtattctgaaaaggtaattaggagagttttctggaacttttagcctatatcaagtcaacaatgctttctaacgaaaattctcttgactctatagttaatgatagctgaagcttgtaccagtatcacgtcgttatgtattatattgttgattttttgacattttgtttctatcaacacaggaatcagacatgctctcattcataagattgctgaaaagtatgcttatggtttcaaatgcggtagccattgttactttcccgccttccctgctctccccatcttcctctaaaagactgcagcatatggcagataccttgctctctatcaaagcaatcccaggtttgctttccctgattttcttattcataaatagattatcatagttgtttcttgacaagtatccttgcctttttttccagatggtgacaaggaattggagaaactcctcactggctacaaggatataaatggattcctcaacatacacaaggttgctcgtatcaacacacaggtatttacaaattgtgtaattctcaatttatatagggatattattaccctgaaacctgtaagcaagaacccctttgtattttgccaagtcaaaaaaacatattcaatggataaaagtctgatgaaattcaaaatgtctactgaacaacttatccagaaatccccatctaatccatttttctctcttttgatgagaatgacatgaacttgcttagaaaccgttgaaaaaatggattcactatggtcctaaaccactggtttgatctgaattgtttaatggaacaggtgcctgtaattcttgaggcaaaaaccttctcaatgagcttgaagaagagaagattcttggctctagagtgtctgaatcaagcccctgtagacgggtccagtggaacatcgtatggcacatctggtagctgctcatccaaatccggagcactagatttttgagttgctgagttagtctttcttttcttcttcttagtttttttttttccctctccattgagttctctaagttcactcactaacctgagcagttacattattattatagtctttggtcttaaaaacagttttgacagcaatatgttttgtttttataatgaaatttatttcatttctgtattatatatactcttatgaaactatgaccaatgatagatgctagttactaaacgttcaatgtaatcacttcaacatgttcacgtggttatttgttgaaccatccatatatataacatataaagaaagaaggtgagacattgaatgaagagttcaaaaatatggttgatctatatttggtgctcctttaattcagtgttcctttacttaccaaccaacgaccatatcatttgaattattgctcataaatctctctctctacccaatctctttatttagtaccctattcttcttgactttgtttctttccaaagcttatacaagagatattcattcttaaactaagattttcatatatattgaaaaagaaagaaaagatttctcatcattttactttttggtagagagcatttcaagtaaaaaatactttgagaaacaaaaagagaaaactagtatgagaaacaaatccttaaaaaaggaaataacagtaatgcacgtgatgatataacaaaaggttttgttttgtttgtttttttattgtttttttcttcttttatttgtctgttataataatcaaaaaacaagaagaaaaaacgagacgttcatgcatttaatctcgcaccttacgacaaagagtgagagagaggatcgctcaggtttgttcatcttcaccggacgattagcttttgcggtgggagaaagaacggcctgtcttcagctctgaaacagaggaacagagaggttaggaaggagacaatggttggacccgcgcggcctcagatcgttttgtttggatcttccattgttcagatgagctttggccatggtggttggggcgccattctttccgaggtctacgctcgtaaggtatcgtcagattcatcaatctctctctctctgtggcttctggattcgatattcatccttggttagattactagagcgttgattctacaagtagatcgcttattctaattactctgtattatttattattttccctaactatacatttgttcattgaaattcgtcttttgttttacgattgtaagcgtgtattatgcgaaccataatgttatttctccatttggatgttatgtgtataggccgacatcattctgcgaggatattatggatggaactcttctcgtgctttggaagttgtcgaccaagtgttccccaaggtactctttcaactccctttttttttgcttcttctctctttagactattagtttcttcaatactagattatgataaagattcagcgttttataggtctttatattagtccgtataggttgatgtgtgcttatcatttgacctagtaagaattctttgtgaacattattttactagttcaaaatgtaccccaaaaggattacacaagtggctattttagttgcatagtctttgatttagcatacaagactctgcatctgtttcaagggagatgtctctgtttaagcataatctgtttcatccgagttttcttgatatctcaagctgttttctcttacccattataaaaaaaatttggtagaatgagcttaactttgtagaaaaccatcatattcaaagcttctgttttcttccactttgtcgcctaaaaattgcaacttgttacggatgcaggatgctgcagtacaaccttctctggtcattgtctattttggaggaaacgactcaatggcgcctcactcgtctggactaggacctcatgtaccacttactgaatatgttgataacatgaagaagatcgctcttcatcttcaggtttatacttcctttataattgttagatttattatttatctcctgtcagtcacgtttaaaagccatttcaagtgctaatttcttcctctattttctgtttcagagcctttcagacttcacccgaatcatatttcttagttctcctccagtggatgaggctaaagttcgccagaaccaaaggtaacttccctgaatttcttcactatctctctgtttctccttattctctccggccttattaatatagatgtgcttctttttctctcacaagcccatacttgagcgaggtaatccgcacaaacgacctctgcaagacttattcagatgcttgtgtagagctgtgccaagaactcggcctagaagtagttgatctcttctctacttttcagaaagcagatgactggaaaactgtttgcttcacgtaagtattttttgagttctgaagaaatatagagagacctttgatatatatgactttctcagagtttccaaatgcgataaccgggaatggagtatcgacgatgttcattgaaatgttttaacggtatagtctggtttgttacagagacgggattcatttgtcagcacaaggaagcaaaatagtagcgggagagatactaagagtggttaaagaagcggaatggcatccatcacttcactggaaatcaatgccaacagaattcgcagatgactctccttatgatcttgtatcagcagatggcaaacagacagtaaattcttcagaatggacttatttctgggaagaacaatgggactaaacatttcaacacacacaacaacaacaacaagaccctatcttcacataattcactgtcttaatgtgataaagctttgctttagattgtttacattacaagtgtctctgctataatctgattcagtttcgctcgaaaaacgttaccattttaaagtttatacttatctaaatcttaaatcacagaaacacaccaagtttgtgttcaagtaatttctttttttcttgtttacattttacagacattaacaaatgtctgaaactcatcacataacactcctccagacaggggtttagtgttttgaaggtaaaatcacaaagtaactaaatttgggccgataacaaaaaagtcgcttaggagattggacttatttgggcctaaaacctaacacttaagggcccaactaaaatgccatttacctaaaaagcgacgcatcttcgtctactaccaaaccttttcgctgacgcaaccaaactcccaaaaataaaaataaagtttttattttctctctctctcttatttttcttctccttcttgttccgtctgcttctctccatctccttccatatctattgttctctctctcttcatgcccgaacgcatcgggtctcaaaaaccattgatacagacatcgatccttgtcaactagtactgatctataaatcttataaaaatctgtagagatatggccgccgcagccgtttcctctaaccctcgcaccgttgaagagatcttcaaagattattccgctcgtcgtgccgctcttcttcgtgctctcactaaaggtctaaatcctctctctctctctttctctaaatttcccagatttcttcgtaatgcctttggattcgtcctttaacttgttcgtttttgtgattttttccagatgttgatgatttttactctcaatgcgatccgggtatgaaagatttcgacttttagatacccttttatgtgttttattgagatttgatttcaatttttgggtgtttgtggttatagaaaaggagaatttgtgtttgtacggacaccctaatgagtcatgggaagtgaatctaccagcagaggaagtgcctccggagctacctgagcctgctcttggtatcaatttcgctagagatggtatgcagaggaaagattggctttctcttgttgctgttcacagtgattgttggttgctctctgtttctttctactttggagcccgtcttaatcgcaatgagaggtatttctctttttcccaacattttgattctgcattctcattgttttgtgttttcttaagccatgtctccaacttttacttgatttcaatggattctgtgttgttcttacatgaaaccccatagttgttttccatcctggctcttctcatgtgaagtaaaaattgaaactttgtgatgatgatggagttcgtttggaatgagattgtctttgaatttgcgtgaaatgagttttgttttgttttgtttttttcgctattcgtcattcatatctatggagtattgtttgttgcatgacttcatctgtctaaactttttctcagctcttttggatattgtaatggctaaacttgaaacttgattatcctccctaattttaaaagcctggtatttgctattctatgaaatctgaaaacggatattctgtggtcgcatgtgctgaatttcaccatttcattgttacatctgaacacccatcttagtaactatggaatccaaagaactttactgacaaaggttttgtgaaagttaaattttgacaaaaaaaattgctatttgattagtactaatgagatcattttactgtctgtctgtcatatattctagaaaacaatgttattttggttattatctgtttcattgttcttcaagagagaagtagttgttggcatttagataggtttcaattaaaggtgcaagaaactggactttgttttctcaaccagtagtttcactataccattaacaagtctctaaagtgatcctctaccattttagtcctctatcttatttacactagactagtaaaaagcatttcgtaagatgcatttccaaggatagagaatttaacccgacagagctgcaaacaaataatgctagataaaacatcacaattgtgtgttgtactgatatgaagattctggttcgtttttcctcactttcgcttgctaatctagttcttagcttatcttagctgcctttttcaatgtgttgtccactcatggagttatattattcttttgatttgcaggaagcggttattcagtctgatcaacgatctcccaactctcttcgatgtagtgactggtaggaaagccatgaaagacaacaagccaagctcggactcaggaagcaaatccagaaatggcactaaggtacacaaaataaggagcctcctttcttcttttttgttatctggtttccctctttgaaatcaaaaatcgtaattagcagagatcaatagacgggcagacaaagagctcaacaccgaaactaatggaagagagctatgaggaggaggaagaagaagacgagcatggagacactctctgtggaagctgtggaggtcattacacaaatgaggagttctggatttgctgtgatgtttgtgaacgttggtaccatggaaaatgcgtcaagataactccggctaaagcagagagcatcaagcagtataaatgcccgccttgctgtgcaaagaaaggaagacagtgatgctgatcaattgatgatgatgatgatgatgatctctcagagagactctggttctcatgttttaatcaatatgttaatcaactttttttcttttcttctctttttttctttaaccttcttaattttaaagcatacaaaactctctctttagatctcaagaaagggatttcaagaagttgagggagagagtagcaaactgtttgaataatattattattattcatattaaaaaaaaaaaaactgggttgtgtcatcaattgtgttgtgtcatggggtttgtatatgttagacttagtcaaatctttaagcttcgaaccgaattttgaacaaatatgtttttaatcttctgttaggtcttttatctgtcttaagatattgtttttcataattttaaagaatattattatccaatattatgtgatatgtcaaagtgatagtcttctcatttggccggaattgtaaagagccaacatgttttccaagttctaaagggcaagtaaatgtgatcgcaagccttagaattggtaagttttataattaaccatcaagattgtcacaaatcatctctaaatccaaatctaaatttttcaatcaaatttgcgacaataatcaaatatttttattttttaaaaaaaaaaatactatttatttagcatcatactcaataagaaattcatgaaatgttaatagttgacaatcgactgaatttaactaaattttaaactcatcgactgaatatttattcgacgataatgatttgtagcctagtgttttggtttgtgctaattaatgcatgttgatgataataataataacaatgatcaatattcaaaatcaatacaaatcaatttataaatgtgatcatgcatgtatgtaatatcaagaagggcgatcccaagtaaagccagcatgaagatcacaaattcacaatacaaaaatcttagttttgggtattcaaagtgatatccgtccaatcttcttcgtaaacgttacttacaagctcccccaagtccccaactatatatgataaagaacttaaatcggatctaacaagattctgtaatacatggtcaacacgaattatcctttttatatacattacttaatctaatatgtgtaccatactaccatctttagatactagatatttattgcgttcacatgtccgtcattttgtttgtcaatactaatttttcttaagaaaattaaattgtctaatagattagttgctcaatcaatacagaaaagactagcaccgataagctccattattaatgttactaatcatagagatagaggaggcataattattgatagacatgcttcaacataaatcacggatattgattttgcataatagaaatacaatagaacctaaaagaactaattataaacatatataattcactacaagggtgactacaaagtaatttaacttaaacaaatgtttgatagttctcggtctttagtcgattcactttgatctcaatatatatgtatatatatcttcattcttcaccaatcttttggaatctctaggtagttctttaagcttccatagcttcggtatccttcagtatatagcacataaaagagattaatgtatatagatgcactcactagtaattgagctgcatatataaacaagaaggcttacaattattctatttatcagacattttatgaagtagatatcaattaacgaggagatatatgagactcaacgtgggattttccacgtggaccttgcgttctaatgaagagtctatattgatcaaaggtcatgggaggatacaagggaggcatcgtagaggtgacaagttgttgcattggttggatcggaatgtcactcttagggttatagaagaatgctagtgaaaccctttctttttccgaattcactatcactcgatgttccacgctcttgtatttcgaattgcttagtatctgccggttttcacaagagaaacatatacgttagtattgaaaattgcatctattgcatgactaacatatattgtacttcattaaacgttaataatactcaatttgtgcatgcactttcggacaatttgtcttttgcaacatgattattgtctacgatggtactctaaaagttaaaaccacaaaatatatttctgcattttatttatatttaatttagtcttgtataaaatcaaatcattttgatggcttgacgctacgaaaatgacataaatcattttttggaaaaacttagtagttttattatttaaaattttggcctgaagttgaaacggttagtcttttatcgctattctaagtcatgtctaaaacgtggaactacaactaaggaatatgatcctctatcagtagttcagtaccaactatatcatgacaattattagtgttttaccttttatgtcaacattttcatgtaagtatataacgtaaaaaggaaaagaaaaaaagaaaaaatttaagaggttacctgaatttgatcgccgatattgacgataaaagcgtggcggagaggattgacagtgatccacgtgtcaccgtgacggacctgaaggccgacgacttgatcgtccggcaagaggatggtcatgccgccgggatcagaatgaggggagaggccgagggcaagctccggttgagggcactttgggtaataattaaccctcaaacatgcaccaacgtcttctccaccaaatgcttcttgaagttgttctgctcttagccccaaatttgacgataagatcgtcattagtctcccacctagcttcactagttccttaccgtactcatcattcatttctctatatccattttaagaagtagaaataagcatattatacaaatatattgaatgtttctgttatatattaatatttaggaaaacataatcttttgttcaaatgtagataaatttaacaagaaggttagtttcaattaaaatattcaactctttcttggaaatacgttaatttgatttgatgaagtgcacatttaaaatactataaattgtttgtaaattagaaaaaataaccaacatggtgatatattatgtaattaacatgattgccaatcaacataacaacacatgaatcaattttcttttatattgatttatttctaaattatttattaaagaccagaatcatagttttggtcttctttatatagaaaaagaaaataaagaacaactgaaactagttgctgacttcagtctcaagcttccctataaaatgatcggattacaattatactagctataaattctcaatttcccaaaactcataggaataatggaacccaaaactaattcgttaattaattatcaaataaaactcataaagacataagaattagagacttagttaattacctaatgttggaaggtaaagaaggccatttgttgaaatccttcaaggcaagaggaagaaaatggagatagtaataatcattccaatcaagaatggctcctttttccacacccaatctgcttccatatccttcataggttcttggggagtttgagtaaacttctttggcttcaacaggcaaattaaagaagctcttccaagtttctctagctgcgtccatcagctccggcttcacgccatggttgattacctgaaaatagaactctagatgtcaaccgaaccaaatctaaatttttatagactacatgtttctagactaataatttgtcatactaaaaatgcatgtctaaaaataattaaacgtgactatttttatcttccagtgccattcttacctggaagaatccccattcacggcatgcctcggatatcctcttcttgtcgtcttcattgccagagaatagactgtctaggtctatgatcggtatatttatgtcagctacttccggttggtggtcgatgatggtggtttgagggcgttgagacggcggcttgatgtaacggtcagggagactagtgaggttgctctcggctagagattggactcggacgatgggttctggccacttttcgccgaggccactcttgttcttgatttcgatcttgttcttgtcttggtcgctcatgtgcatgttgtctattttgacttcttgttcttgatcgttgaggcaggtcttgctctcgatcttgatctcgtctaggttgttcatgttgtctcttatatggcttattagtcttgctcttttttttctacttgttcatgagaagttgtgaagtgctgttatatatagttggtttatatggttagagggagagaaagagagagagaaagggaacaagatttggattaacataaataaatgaattgtgaatattaactatcatacacaaataaaatcaaactcggaccgacatgtttcagactattctcgtgaatcgaaaatattaattatcttcctttgtaataagtaactgaagaaaatcgtaacgtatgtaggaatccgtaattgtaagtttgtaaccgatgaggaagtcgaatagagtccatacgattaaagtttgttgcttgttagttcaagaaaacgtgataaaaaatgttttttctgatacgtggtaaaaaagattgaaaatgacgtggatgtatttgataataattccaaatgtgaaaactacgaagcattttgcaatgaaaagttttgtagcttccttacaaataattttagctatcacgtggagttcatttttttgttattagctgtgaaagttcgtagatgttttaaccctaacaatataaattaagatcggtatgattttcttctgtttgagaatgtttgggtagcttaacgacgtactcaaccttgaaatatttaatgccttgagatatatactaaaagaatctgacgacttcaacattttaaaataatatttaactttaacttccttatctcagaattgcactaattttattgatactttactacatgtaaagtgatttctaacttacttcagttatcaaagtgctcttaatagttcaaaatgataacctacgcaaggaagaggatgctctttggaattgtacaattctataaaggcaataatatgaaattatatagttcaatagatggtgaaataaactgtatgcatagttcttgtaagaagagagtaacaatggctgtaacttgtaattatctattttcttcaatcgtctctcttttgagtaaaatattacaaaagtagacatatttctagacatagtactgtactaatataaaacgtagcactcaccagttccatctctataaaattaagttatgtataatttccttacatacgtatgtgtaattggacggtgacttttattctgtattagcaacggacggtgactatctaactacattatttatgccacttagcgatgatagttaactgaatttatgactaaatttgagaatcgcaattataatttttaaaaattcaagagtgttaaaagatgattatttatgtgtcatgcaatagcaaattaggcgtacgcttatattcaacataccaatcaaacacttttcgtttataattctaataactacattattaaaaaaaaaaattagttcaagattattgtatgttggattattcaagtagagcttttaaacaatttaaatgtaaaaattccgaaggagagtcgatttaaatatattatgggcaaaacttgtattagtaaatggtccgttgaccatctaaatagaaggccgacgacttcccaataatagaaacatggttcactgaatttggaaggcacatgtggatactatccaactacatattgtgtaacaaatacttatttaaatcccatttttaagttaattaatcaaacaaatttagtgaggttaggaagaataactatgattgattttaaatgtgaaaaaagtagaaaactattttcttaattataccctaaaattattggtatataaaccttcagaaggatgaatctaaaataatatatattgcaatgtatattttattagtataaagcttcagtatcggaaacatagagatttggatctgcttaatttgtagtatatatacaacatctccttcgtcgctcacgtaatgatcttcttttatactttttgctagaatttaaatgtatctaagataatgcaatgtatggtatatatagcttcagtatcgcaaacaaatttgttgtttccatctgatcgatcgtattcagagatactaactctctggtgggtgacacaataaattgatacagtaagcaaaaaatcagctggtctgaaatagaaaaaacttcaatctcaagcctgcttcatttcaatctgctcttactttgacctctccatagagatttggatctgctttatagtatacaacttctccttcgtcgctcacgtaatgatcttcttttatacttttcgctagaatttccagtaaatgtaatggcaacggtccagacttatcaggctccctgtaatacttccctaatactggtttagctgcttctgtctgcataacagtggagcaagagtcagggaaactagcatgaacaccaaaaacacaaacagtctttactttcaatttacttactgcttctactagatgataatgtgggatctgcgggaaaagatgatgtatcacatgagttccaatatcatgatggatgttattgatcaatccgtagtcacgatccaatgttgtaagtcctcctctcaggtaactccactcctgttttgggagaatcatgagatttacacaccagttggctttaaccttaaaagaaagagcgatgtagtcaaagaacagtggaagcagagaatatgtattttaccttgccacggtaccaaggaagcttatcttcatgaccatggtgatgcaggtaagtcacaaagtccaaccacattacatttatctgtatttgacataaaaacctttttgagtaaggcagaggaaataatacacaaattgctcaggctgaaacaggggagtaacagcggcgcattacccagtaaggaattccataaagtttgagcatttgaattggaccgattgtgaagttgagacaaacaagcagagcagccattgcagtccaacaagcagtagaagtgaggacatcctttctctctttagggaggaacaagtcactgtctggatggtaatgagaaccctttttccccggacttcgagcccactgaaacagaagaatagacatgagcttttttacttggtgtggcagcttaagttaccataacaaatagaggagttcttaccaagtagaaagggtatgcaagcatcacgagaggcagtgtaaatctaaagaatctagtcggcttgtccaaagtattgtagattttctcagacatctgcagttacagaaacagttaataaaactgcatctaagaaacaccacaggactaaaacaagataaccaaaaaaatacgtttttgacttacaggatgccaagattcgtcattctcaacatgtccatggttctggtggtgagttctgtgactaattctcctgcaaagtcatatttttacatgaagaagatgagattctgcaagtggttttagagaagaatggtctgaaagcaaaactcaccagccatggtatgggaccagaattgaggaatgaagaagatgaccgaccacactgttcaacttcggatcatttgagaaactaccatgtccactgcaatgtaatcaacataaatcaataattttgttcacaattcaaagcagattacacagttgcaaaaccaacaaacagttgccaattgggttggtctactagcaacatgatgagtatgatgataatgacagcttgttacctgagagaccaattatgtcctaaagctatttgaagagatatggataaagaccaatttgttcgattggttctttggaatcatccaaagttgaccaaatcaaaggctaaaggagactaaagcagaggagaaaacaagaaaaaagttagggtttttaagtttaccagtcatgaccaagaacaaagagagcccaaaacatggttccttgagcgagccaatagagaggccaaacaatccaattgttgaggtaagcagctccagcagccaatgcaaagacgatagcgacgtctctgacgacataactcaaagacttccatggattcttaacccaacaatgcttaggtatagctgctctaatatcagctaaattgaacggaggaggcgcacctggatcgaatctctgtttattatcttcctccaatggagactcctcaaatattggtgtcgttaatggtgtgctcacattcaacgcccaattcctcgtgaacccatctcgtgaattcagaccaaaagacagaggagatgatgatgttttgtaagaagaagaagaaagtgatggtctgaatttgttgttgttggagaggaaattggatctgggtgttgtgtagattctggggagaggtcgtataccacattctgataagaccaagttcgccattagaacttgagctctctccccagagtgaaaagtctctctttttattttttggtgggtttctgttatgaatgagtggtggtaatagagaaagagataatgtgtgtgagagaaacttgtgttttctactttgcttatcgtctctcaatttctatctctgtctctggttcgcacgcttatgtcttatataagttagctacaacttgaaaggagaaggaaatttattagtgatggtgtgatgtgagatttttttttgtgacggtcaatttagacacaagttgaggtttcaacacgggtttgattgatctcgttttaattcttgttttggttatgatgtcatatagtttaaagcctttgaaataaagtgaacgaaaataataaaatataatgaggcatatgtttcatgacactaacttttaaatgacggtagcaaaatttatacacattattttagtgactatataagattgttagacaaaacaagaggagtttggtgaagaaacctatttgagaatttgagtcaattacgtttcaatgtttcacaccctatacctattgtttcaatagggacaaaccaaatctcatgctactagtcaagttacatggacggtgaacataaaaattgaaccaagtggaaattgaaattaaacatgccaaacccaactagttggaccaaattagttggtcagcctgaaataaattagcccaagagatttgtacaaaatgaacaatagtgtcgctcatttgggctagggcccaatagtataagcccattaaactacagaactctcaaaagatccgaccttttttattctcacaaatcgcgtatagacaaagaagaagaagagcgaacgaaccctaatatccgatcatggcaccgaacaacaatctgaggtccttaatcgcgctggtaaattaaagattccgttatgattatcctttttttttttcttttctacagtctttttttttgttgttgtttgtttactttctttgtgcaatctattgaacaagactaaaactttacagtgccgcaattcatcttcatcccaccatggtaacgttctctgattccgcatgaatttctttcagtttggggagaagaaaatcacaaataagaggcgaagaagaaaagaagagcgaaccctaatttccgatgatgccactcaacaacagtctgagatccataatcgctcaggtaaatcgaagatttatatctttttctttcatttttgtgttggtttcttttcgatctattgaacaagacgaaatctttacagagccgaaatttctctacgaggtcacgcggtaatttttcttctccccgtcgtagcagaggtaacgttcttctgatcataatctatcaaaattcgcaagtgtaattttctcggaacatggggtttcgatttgtgattcttctttcgattttgaagggtcgaaaagagccgaaagaattgtttacgtcggcgttgagtttaagaattttgtgccatcggtaatgaacggattttatgctttctgtgcgttgggtaatgttcagatatttcgtcaatttcttttagttttttttttcttaattagagattggaaaaaaaacaaatccttgatcttttttttttgtttccaccagaaacaatccaggtattcgaatatcttcgaacgatggagagagatctgagagaacgttttcccgaagtggtatggatttctataaacatttgggagattttatgagtttttgtttgtttcttaaaaactaaagtgttttcactctttcaggaagtacagcaggatccgtttagttggctcgtccttttattgactccacgagaaaagaaagcagacaattagtttttttttttttgtgaacaaaatgaattaattagattgttcgtttcgtcgccgcaactacctgcggctgcggcagacgcagctatttatgttcgtttagttgccgcaactacctgcggcaaaacgcaaccgccggcggtaactaaacgaacatgctcattataatctgtgattgtgaacttgtgatgttgctttgtgtttcgtcttttgttcgatgttgtgggaaaagaaacaaacttaatactataatctatggttgtgctgatgtttgatttgtgttgtgtgaaatcaaacagaccaaaaccatatcagaaatcagatagtttagctcgtggttttgtggacttctatatcgaggttttgtggagaagttgtaggcttctatatcgaggttttgtggacggccctcgaatagtttagctcgtggcaactaagatgaggattccagtgcttcggctctgtggcaaccacgcaaatttctaagttttgcgagctcggaatcggtgtttcatctcgtaacttggtcttgaacgcttagaagcgatccaaaacaatttgagtagtaatattgtatttatcttctgtagattgttttaatctgtttcatgtaatctctgtaattctgtccaaaatcaaaaatggtataaaacttaaccttttaccaaaaaaaaaatgaaaaaaaaaaacatatcagaaaataactagaggcacacaatttacattcatgatcaattccgtaattcagtgcaaggataatttgtcaacaaagtacatactgtacatataaaatttcaggtgaatgtcgacattaattgagtaacaatggaacagactttgggattcaagtttttttttttaatattattaaattgaatataaactgattgtgaatgaaataaacaatgagagtaactcagctagggcacaatagtataagcccattgaaccacggaactctcgagatatccgtcaatgttactctcgacaatgttacccatttttttgaagaggagaagaaaatcacaaatcagaggcgaaccctaattttcgatcatgccaccgaacaacaatctgagatccgtaatcgctcaggtaaatcgaagattttttcatgattatcccttttgttttttcttttctttgtgcgatctattgatcaagacgaaatccttacagtgccgcaatttctatacgtcccgcagtagcagaggtaacgttcaaatttgcaaccgtaggtttggtttcgaggtatttgtcgcaaggaaaacaaaaatcttttgaccgttttgttgatatcatttgtgattgtagagtggaagagagagatgtttttaattcgaggtccagggatggctctgggattgggcttaggtatgaatcgatgagatatattttatactttagattttctttcattctttctacgagtcgagtcgaaattagtcagcttgctatttttttttgtgtgtgtgtgaaggttatattgtggttgggggaaacgtatcggaacttgaggcagatcggcgacaggttagttagaaaggaaaaaaaaatactaataaaaagacatcgttgttgtgaccattgctattatttcatcttcttctctatgtgtgtttcagtggacgggagaccacgtcgatttaaggaagaagatgtggccagaactaaaggataaggagtggtttaggattacgtcaaggatgtggtctgagtctgatataaggaaaaagatgttgcgtatgaggtctgatctatgggagtctatgggagtcagcaggtcgtctgatctatgggaggaaaagatgtgggattatctaacgaaaaagatgtggtatgatctatggaaaagcatgtggtctgatcgatcttagggagaaggaaaaatcctaattatcttcaagctttttgtatccggtcattgtggagtatttgggatgatctaaggaaaagcatctggtctgattcctaactatcttcaagctttgtaaatgttcaacgtggagaccagaataatcatcaattaagagaatctgtttctgtcgatgattctgatgcctggtttatggattgttaataataaccacctaatcatttaaatgtcgcgcaacgagtaaatcacacacacagtttacttcgacaccggacaagtactgtttcaattcataactccaccaacggatttccattactggatccgagtatttttctcgacatcgagagcttaatttggtgctttttacttgaaagtcttgttgagttaagcaaaggctttccattgacactgctagatacagcaccgagtttgtgtgatcagaagtttgaagaaatcgtttaagaaggaaaggagagaaacgattgataattatgcaactagtctggattgataccatggtccatagacaaccatatccaaagtaagggacatttaggaataatatacgcgaaaaagttgagaatattttcgacaactaaccaaaactttacaagggaacagtgcaggaactttatatagttatatatatgcgcatgcaaataacaactatattacaaactctttgatcatgacagcattccatacactagcttgattggttatttaataggtattttttcttattaacgaaataaatcccttaagttattatttttatttacatccaaataaatgtaatattatttctattaattttccactaccaaaataggaatttcgaactatatatttgtcttgttttagtatttctctgtacacctagctagcagcatctatttatgcagatacattctcatgataagtattttatgattctaatagatacacgtacagatgaggttactcatacatggaaatacatgtttagtaaaatataatatttgtggtaatttcaaaaaagagaatcgttttcccaaatttttactatacaaaagatcttttacttagtttgtatcatattttcctcattatacacatcaacaattcaacaaatatcaattttgtataaagatgattttatcatgtttttcttgtctgttggttatatttgtgtattccttcattttgcgattctaaaatactaataaacacatataagaatatttatcggttcaaccaaaaaacaaatttccgtaattaatcattcctctatgttgttagataacaattttcttaacaaaattgctaaaatctgtaatggcaaacccacatataaataatatttgccgcctctagtttaaacaagcatgtaaaaacgtgttatcggaaaaaataacataataattgtaaaataaatatgcaaaacttatgtcattgaaagaaaaaaaacatgataaatgtacttggtgaatggtgatattgtttttaatttttacaaataagatggtagaaaattaggttatacataatcccgcacgtgtgagtaaagccttatatattccatgcgtacacgcaagttatacatatgttttcacatatacgctctgcctcttccaaagtcacatccatctttcaatggctttctcttcagctcacctcaaccaccaccaacctttgatcaagcacggtggagccacggcggcgcctcctccgaccccgtcatgctcacatctcaacaccaccagcaaatcggagacagcagttgacgctctctccagtcttttccaccgtctccctcctttgctttcactccccaaccgtcgctccatcccttctcttccgatggtatctctctccgccggagatagacttgaatgggacgatcttatctccgccgtgactgatttcggctatttccaactcattaacgatgactccgatattcttttccctcctgggatcgctgaagcagccgagtctgactcactctcgctcttagagctcagtgaagagaagaaggaatcatcgtttccgaagaaatggccgctaggctacgaagccgatgctgaaacgccatcgttttgccttgacgccgactgttcaaccgactcgagcgagttaaatctgagttcgctccgtgagttcactcggactctagagaaagttggactgaagacggtagagatgctggcgaatgcacttgggtttggatatgattcaacccggtttaatactctgatgtgggttaaccaaggtgttcctgatgatgaaccggaggtaaccaacggattttatccttttgttgtttgtttacagtatcagataagggaacagaagtattgtttgctaaccgagtctggttgggtgtccgttttaccccgagttgactcggttcttgtgacgttgggtgacattgctcaggttagttctcttttgcttttgacaattgacagaacacatatatctcttttatttatctataattaattggttagttgtcttccttaaataattatcaaattatcatcctttgtaatggaactttattccactataccgttaactggctgttttaatgtattttaaacattatccaaaataaatgttttccaacgcatcgttcaaaaagagaacaagaatttggatatttccgatatttattgttgacaacaacaacaattgtggagcataaccggggaatgtgttttcacttttcgtttgaaacagatttatggcattgggaaagaaataagaatttggaaatttccgatatttaaatacttatacacatcacatcgcaattgtacttagtgtcctatagaattcaacaattcttttttttttaggtcaaaacctaacagctttctacaatatagttttcaacttttgaacagctaacaaacaacttaaaattggcaggtttggagaaatggagaggtcaaaagagtgaaatatcgaccagtgttgtgttcaggacaaaaagatggtccagtaaagtgtgtaacaatgacattgatgcttacacttcccatggacagtatggtttcatcattgaaggatatgatcagtgacggcgacaaagaagaagagtatgcagaggaggaggaagaagatggaggagcaagaagtgatgagagaagggcatttaggccttttagtttcaaggagtacgcatggagagtgtaccaagaacgtctcttcttcagggatccacttgacagatacagaatcaaatctttaaaagattgacgaaccgatgtttgatttgtttgtttctttcttgggttgaattggtactatagttcttgttgttactttttttcccccataaaatcttttgattttcagcggattgttagcattttagcattgagatatttttgtttttgttcgattcagttcagagaatgttctattttgatagtcactccatcattcaactaattttttcatatatactcatatcaaaactgtcactatttcaaaatcaaacttttaggttacaccaatgactctatcacactaaactcaactcctagattttatatagaagaatctatgactttgatgatgtactttaaaactgagtcttttgagatcataaccaaattctacttcataacttttgttttccaatgttgattatttgttataattagaaggtgacacaaacgcttatagcatcctgtttttgaaaatgaggaaatacagtgttggcttttaatctctcattgaggcagaatatcaatgaatgacttcaaatctacgtatacatgtttacttatttagtgatccatattggtgttgctctttaattttcttgtgagaatgaattatatacatcaaaattgattatatcatttaattcgagttaaaattataagtaatacaatcttcactaaacactaattaaatcgacgtaaatttcttatacgattttttcatgcaacacttaaatcgacataaatttaaatattttggtcttcataccctaattttgataagatataatagaaaatttcgtatatctttttttttttttggtaaaaagtttttttttttttgtttcatctccatatttagaaaatttatttcaaacttcgttctcgtttgtgttcatcttaatttttaaccatgattgagtcattgaccattgctcaaaacatacgcataaaattcccaaaaagtagtgtgtgtcgtgacaaaacccgacccgtcgatttacgcggtttgaaactcgacccgaatactatccgaacccgtaactttggcaaaagcacatcgtacagctcaggcacttgtagcacgtcgtctctcctttggtttctctccttatattcgacgagtgactccgattggatcgctatttcgtcatttctcactttccaaaaagaaaaaaacgaatctctctccaccatcatcacctttctccttcacttgcctcagatctggctgcgatttcaaatcttccttagtttctctcgcatcgctcggccgttgacggtcccgtcctttccgtggatctgattctggccccggattctctcgccgcgatctgaggtcaaacatggcggctgctaacgcgcccatcattatgaaggaggtcctaacggtgagttctctgtttttaaatctccgggaatcgagctaaaattttggacgattaacatgtttctatagttgtagtctctgatttctatcgatttggttctgctcacactgttatatgattgattcaagtttcattctgttctcaattctacccgatcgttgagatcaagttctctgatcagattttctctgcggacgctcagatctgtgttatctgaatgtatatagtccttagttttaagttattgtgttgcgcaatgtgcttatctactcggatcttgtaactaagttaatgaactatgccaattgattacttttgttttggaaattttccagcttccgagcgttgggatcggtcaacagttcatcacctttacaaatgttactatggagtctgataagtacatatgtgtacgagagacggcaccgcagaacagtgttgtaattatcgatatgaatatgccgatgcagcctttaaggaggcctataactgctgattctgctcttatgaacccaaactcgaggatccttgccttaaaaggtattacactgtttccttcgatcgcattatcacttataacacccataagattctccttttgaagtgtatgatcagttataagacccataagtggttcctattaaagttttctccagaactaccattgatagcttctccttcattttgttaactgtacatatgctatttattacggataggatgttttgatttatttgaagtttaaatgactctgtccatgttgtgatgcgtcacttgatagaaaacctatttttattaaagtagtatggaagtgtaactacactcttcgagtttatgttgtagtcctatactctttttctggatttggggtgatagcatgtttaatgctgtagaaaacatcagtatagcgctctctgttttccaacacgtgttatatttctcgtggcagtgttgtgtctcaagcttagtgtagttaaactagaaattttggtttgtactggatgtttccttgtataagctattacttatttcttccttaatttgttgttaactttttcttaaattcgtatcgtatatagctcaagttccaggaactactcaggatcatctacagatatttaacattgaagcaaaggcaaagttgaagtcacatcagatgcctgagcaggtgaattttgaagcaaacaaattgtaacccgattatctttcatgttgtactcttcagacagactctgattttactggtctgaattttttggatattataggttgctttttggaagtggatcacacctaagatgctgggactggtcacacaaacttctgtgtatcattggtcaattgaaggttttatatctttaacttactgtcagcttcttcatatcatgtatatgttgtttctcatttttgcttcgatatttccaggtgattctgagccagttaagatgtttgatagaacggctaatttggcaaacaatcaaattataaactataagtgctctcctaatgagaagtggttggtcttgattggaattgcccctggctctcctgaggtagggttcctgcaccacgtattaggttgaattaagacatcataacggcagtcatgttgtatatttttgacggaatcttgtcattattatcctctgtagagaccacaattggtgaaaggaaatatgcagcttttctctgtggatcaacagcggagccaggcccttgaagcacatgctgcatcttttgctcagtttaaggtaaactatgtgatacctttgctacttcattccatggtcggatcttgaactgtagtatgacaagcgacattattattgataggtccctgggaatgagaatccttcgattcttatatcatttgcaagcaagagctttaatgctgggcagataacatcaaagctgcatgttattgaacttggtgcccaaccaggttagcttaaactactgctctatattttcatggttattgttagttggtattagtctgatgtttaaaggtgggcggctttttttcagggaaaccatcatttacaaaaaagcaggcagatctctttttccccccagattttgctgatgattttcctgtggccatgcaggtttgtagttgcattagctgttcaattaacttcagtaagtttcttgtgaaaaattcatgacaccgacttctctttctcccaacaggtctctcacaagtttaacttgatttatgtcatcaccaagcttggcctgctgtttgtatatgatctagagacagcttctgctatctacagaaatcggataagtccggacccaattttcttaacgtctgaagcttcctcagttgggggtttctatgccattaataggcgaggacaagttcttttggcaacagtaaatgaggccaccataataccttttattagtggtcaagtatgttcaacttttactttgttcttctctatataatctatctattcatcatgacatgctaagaaatctatgcctttatattacagttgaacaatttggaacttgctgtcaatcttgctaaaagaggaaacctccctggtgcagaaaatctggtatgtgataattatcttggatcagatgtgtggatctattttcttggtgaagtcattattgtgccaatttgacgaaaaaggtcattctgatagaaacaataatgtagaaaattagaaatcgagatttgacgcttcctccgtttcaatatacaagtgcatttttgacattttcaagcaaatgaaagaataattaaatgttacatgatatcctagaagacaattgtctcttggatttaaattctatttcacattgttaattaatatttaaataggggtaaatagataaatgtattacaaaatttacattgaatcgtaagatgacactttgaaacggagggtgtacatgttaatgttaaaattctacaaaaaactaagtgaatttgatgataaacctcttccaaactcccaagacatcttataccgatagagactaaagatccataacctatttaaaccatggttacttgaaagtaaacacagttaaaccctactaacctaaaaacacttagtaaatatcataaactccttagacctctaaacccattgctcgaattacatttcttaatgcaaagttcctcatattcaattttgatgttacaggttgtccagcggttccaagagttatttgctcaaacaaagtacaaggaggctgctgagcttgctgctgaatctcctcagggcattctacggacacctgatacggtggccaaattccaggtatatgttccatattcaagcaaagaatcctctgtgaacatgttgtctataatgtatgtttgtaacaccagtctgaaactacaacatcacactttacaattttgcagagtgttcctgtacaagcagggcaaactcctccattgttacagtattttgggacccttttgactagagggaagctcaattcatatgagtctttggaactatctcggcttgttgtgaatcaaaacaaaaagaacctcttggaaaactggttggcagaggataagttagaatgcagtgaagaactcggagaccttgtcaaagtaatcttaaaatgaccattttcatttaaagtgtctcctatgggcttctttagtatgctgtaacggtaatattttctgattcagactgtggataatgaccttgctctaaaaatatacatcaaagctagagctactccaaaagtcgttgcagcttttgcagagcgaagggagtttgacaaaatattgatttattcaaagcaggtaaacaattaagttttaaagtttgccccctccgttgttatgtttaccctaaaggtcattgtgctcaagaggtaccattgttttatgttgtgactctaggttgggtacacacctgattacatgtttcttctgcaaacgatactccgtacggatcctcaggttagtttgctgcacttttgatactttgcaacatattaaactgtggaaggactggtttactagattcttgttccgtaatcacaagaagagtcataaattttggcctgctgttgtttatcaagcaactaagcttttgccctgtaaaagatcaatagtcttttttttctgctaattatcttcttttttttcctgctaattgcagggagcagtaaattttgctttaatgatgtcccaaatggaaggaggttgtccagttgactacaacactatcactgatcttttccttcaggtgaacacgtagaatatactgtgtacataaaattgtatctcattacttgtttcacaagagagctatcatgtgctaatgtacttacttttgcatattcagagaaatctgatccgtgaagcgactgctttccttctggatgttctgaagccaaatttacccgagcatgcttttctgcaaactaaggttgaaaagagttgccaccttttacttctctgtgctttccctactcaccttcctttcttagaccttttagtgcactctcaacacaggttttggagatcaatttggtaacctttcctaatgtggctgatgcaatcttagcaaatgggatgttcagccattatgaccggcctcgtgttgctcagctttgtgaaaaggctggactttacatccaatctttaaaggtttttgctcaatgtcttctttaatattcttggcctaatagatgtatttttttttcccctctaacttcgtttccttttgctttgtgcagcattactcagagttacctgatatcaaacgtgtaattgtgaacacacatgctattgagccacaggtattacctctgaactaattgttggttgctaaacaactcgatgttcaagttgctgaatatccctctactcaaatttgcaggctcttgtcgagttttttggtactctttctagcgagtgggcaatggagtgcatgaaagatctcctgttggtcaacctgagaggcaaccttcagataatcgttcaggtatgtgctgtattgttgtaagatgtgaattttattgtttaatgtgacactgacgtgtccatgtctttgcaggcttgcaaggagtactgtgagcaacttggtgttgatgcatgcattaaactctttgagcaattcaagtcgtacgaagggctgtactttttcctaggttcatacttgagtatgaggtaattttatcaagatcctgctgtcattcctgtaaacaagcaccatgcagcaatttgtatttttatgacttacaatgtcttccctctgtgtgatagtgaggatcctgagattcacttcaagtacatcgaagcagctgccaagactggtcaaataaaggaggttgagcgtgtgactagagagtctaacttttatgatgcggaaaagacgaagaactttttaatggaagctaagcttcctgatgcccgacctttgattaatgtctgtgatcgttttggctttgtacctgatcttactcattacctctacacaaacaacatgctgcgttacattgaaggttacgttcagaaggtatgtagtttctttagacttttgttaaatatggtaggattttcatgaaagaattatatatgcgatcccttttgtaggtgaatcctgggaatgctcccttagttgtggggcagttgcttgatgacgaatgccctgaagattttataaaaggcctcattctttctgttcgttcattacttcctgttgaaccccttgttgcagaatgtgaaaagaggtgcgaacccttttagcatcttgaatttcgttcatatgtatgctattttgttctttaggctctaatatgtatatgtcttctcagaaatcgactccgtctcctcactcagttcttggagcatctagttagtgagggaagccaagatgtgcatgtccataatgccttgggtaaaattatcatagacagtaacaacaaccccgagcatttcctgaccaccaatccttactacgactctaaggttgtgggtaagtactgcgagaaacgtgatcccactctggctgttgtggcatacagaagaggacaatgtgacgaggaactcatcaatgtcaccaacaagaactctttgttcaagttacaagccaggtatttgattattgcttactagacttcttacttatattccacactagttactttgtagactacttacacacgattttccaactgcaggtacgtagtggagaggatggatggtgacctctgggagaaggttcttacggaagaaaatgaatataggaggcaacttatagaccaagttgtgtctactgctttaccagaaagcaagagcccagagcaagtttctgcagctgttaaagcattcatgactgctgatttgccacatgagctaattgagcttctggaaaaaattgtgcttcaaaattctgccttcagtggaaatttcaatctgcaaaatctacttatactgacagctattaaggcagatccgtccagagttatggattacattaacaggctggataatttcgatggtccagctgttggagaagtggcagtggatgctcaattgtatgaggaagcatttgcgattttcaagaagtttaacttaaatgttcaggctgtcaacgtattgttggataacgtcagaagcattgaacgtgctgttgagtttgctttccgggtcgaagaagatgctgtttggagtcaagtcgctaaggcacagctcagggaaggactagtcagtgatgctattgagtcctttatccgagctgatgacaccactcagttcttggaggtcatccgagcctctgaagatactaatgtctatgatgacttggtcagataccttctgatggttagacagaaggtgaaggaacccaaggtggatagtgagctcatctatgcttatgcaaagattgaaaggttgggtgagattgaagaatttattctgatgcccaacgttgccaaccttcaacatgttggtgaccgtttgtacgatgaagctctgtatgaggctgcaaagataatatatgcattcatatcgaattgggccaagttagccgtcacccttgtgaagttgcaacagttccaaggtgctgttgatgctgcaaggaaagcaaacagtgcaaagacatggaaggaagtctgctttgcttgtgttgatgctgaggaattccgactggctcaaatctgtggacttaacattatcatacaggtggataaataacagatcctagttcccgagaaagttttttagttataattgggtttcaatttcaattttgtatgcctttttgtaatatttttgtgctttaataggtggatgacctggaagaagtaagcgagtactaccagaacagaggatgcttcaatgaattgatctcccttatggagagtggacttggtctggaacgtgctcacatgggtatcttcaccgagttaggagtactgtacgccagatatcgttatgagaagcttatggaacacatcaagttgttctctactcgactcaatattcccaagcttatccgggcctgtgatgaacaacagcattggcaggaacttacctatctttacattcaatatgatgagtttgataatgctgcaaccactgttatgaatcattctcctgaagcatgggagcacatgcaattcaaagacattgttgccaaggttgcgaatgttgagctttactataaggccgttcacttctacttgcaagagcaccctgatataatcaacgatcttctcaatgtgcttgctctgcggttagatcacacgcgtgtcgttgatattatgcgcaaggttagaggctgaccattgatttaatattttctgttaaaaacttatcaccagtggcttaacaatctatatctgatgattatttcttgtttctgatctcaggctggtcacttgcgccttattaagccatatatggttgcagttcagagcaataatgtatctgctgtaaatgaagctctgaatgagatatatgcagaagaagaagactatgacaggttgcgcgagtctattgatttgcatgacagttttgaccagataggtctcgctcagaaggtaagagtttaaatctatctatcgagtacacatttatatttccccttaaatactaatttatcgttatgggatggtgcgaaatagattgagaaacacgagcttgttgaaatgagacgtgtggctgcttatatctataagaaagctggtagatggaagcaatcgattgctttgtcaaagaaagataacatgtacaaggactgtatggaaactgcttcgcaatccggcgaccatgatcttgcagaacaacttctcgtctacttcattgaacaggtatggataggtttcaggcaggattacatcgaaagccattagtctattttcaactttttaccgtatatggtaaaacagaaagactattggtactgaagatgaaatttacatccccgttgttgtatgttgtgctggttttacaggggaaaaaggaatgctttgctacatgtctctttgtctgttatgacttaatccgaccagacgttgctctagaacttgcttggatcaacaatatgatcgactttgccttcccgtatctcctccaggtaatttatcctccaatccctaaaataccctctacctgatgagataggaaccatactgacgctatgatcaactctctttgatcccgtcattttttcttcacagtttatccgagaatactccggcaaagtggatgagctaatcaaggacaagctggaggcacaaaaagaggtgaaggccaaagaacaggaagagaaggatgtcatgtcacaacaggtactacactcagacatcatacggtaaaatgtttttaaaaaacaaatcaatatacaaccttatgctcgtttttttctctttctcaaatagaacatgtacgcccaattattaccactggctctacccgcaccaccgatgccaggaatgggaggtggcgggtatggtccaccaccacaaatgggtggaatgccaggaatgtcaggaatgcctccaatgcctccatatggaatgccaccgatgggcggctactaagacctttgggaaaacaagtatccatataagtaattgaaatctcatagtagcgcaatctgccatggtggtattcgcttactagaagactgtgaccgcggaattctgtcggaatgtttccttgttttgttttgttttataggtttgtgtggataataaaccagctttcgtctgtaatattctttgagggggtttaggtgagtcatttttgattgaggtcatttaaatattttcctttggaggagaggagactcctttatagtctttatcattttactctttgaccttttttcatatgagttgttctttccttctttctttcagcttatcttcacttcatttaaacctttttgagttatgttttttcgtacgacaaacttcctcttgttcttgcttcgataaatttcaaaatacagtgtctgatgaatcatcaccacttgataatattcgaaaacgctatctcgtaaccaaaatgtttctatcctaattcctatatcaaataatctaagtattgaccacactttgaaaacatagttctcttgccaaataataataatttacagtctagtttcccaaaatatttcgttcttagtggtatgcgacatgtaatgtataaagatactttgggattagtagctctgattcgtgtaaaatgagcctagccggcttttaattatgggccttatgggcttcgttattagtcctttgttaaagactagcttgcttttacttaaatctcattcattttctctgtaaacgactatcgattaacaatgaattaaaatcactttctcctactgaactagagaattgatctcgagtggaacatgggttgaccaataatttccaaagtttgaatgcgagtgcccattcgttttgggggattgaatcagagatccttcataccagatccactatcggacgtaaagcaaagctaactactggactgcattggtaccgtaaggggccaactagactctattccaggaatcaaataagacaactacaagcatattcactttgttcctatgatcaacttctaaagcatccatagctatatattccctccaatcatcaacatctgaagcaatcacccaaatctaatctcaaaattataattcagagaatagtagaacatcaacatttgtaagatatataatagaaaacataacttccatattaatttggtccaacgaaacattcaaactgaaactcaaaacagagttggatttaacaacgaaagcaaaacacaaaaccaggtttgttcgaaaatctacttagatcgctgtctcatctttcgtctcttcctctttaatctcctcatacgcttcttcttccactgttacaaccccaaaaacaccatcattccgtattaccaactattattccgtattagagaaaattcataatagaaaacatatacaagcccatttctcaccttagccctcatggtgaattcacagaagataaactcttcactcctctgattctatgcaaatttcaggaaaatgagcggccgccaattcagaaagattttgttgcttccactcattttgcttctttatatgacagcaaaaccctagacactcgtttcctctttttccaaatattgggccgatcgatactaattttatgcccaataaagcccataccgatgactttctaaattgtaacatgttttgtgcctttctaaattgtaacgaatacttttattttattgaaataatggatttagaaaaaaatagcatgttatttatacagaaatatagcacagaattttacatgtaactgtatcaaatatgaacatatcattgttttatcatttagttatttacctgaattaataagtccatttacccttataaacatctacacaaaaatgtctatcatcgtatgtttaaaatacagatgaagtgattataaaaacttcacaatcaatgataaagacagaatatgaaaattaaatccttttagaaaaaaccataaccattcgtgtgtgtgtaaacatcatcctccatccatgtccatgcaatacacaagtatatgtataaatctttacccacacaattacaaaaaaaaaaaacaaattcatatcttaatcactatcactctagctgtctcattagcttgacgagtcgacacggatggagactcggcagagcggacaactcgactcggttttaagccaccgatccacacattcgcagtggtaacaatggctacacggaggaagcactttcatcttctctccttcttcgaaaccacctagacatatacaacactccttctcctcctcctcctccgccctttctctccggcaaagcaccaccggcaagctccgaatctccgccggatcaagccctccgctacggcaacgcgtgagtcgatcgggagaggacgcgtggagattgatagaatcccgggggaggcagttccggtggatgtagagagtgagtagtgcgaagaagagcacgacggagaataaagctaaggcgaagaagagtgtccggccatgaatctggaagttccggtcgtcgtattgattctcgtgccagtacaaaagcatcgaggcttgtggagacggtgaagatgacgtcattttccggttggcgatggatggttacttacttaattctggccgttgatatatagtatgtataaaaacagcgtcgtgatgtatatatatagtatactagtgctaatctcagtcacgtgattgtatttccttaaataaaataacagaaagagaatattaatttgagttaaacagcttccacaagtagtacaactgtctgtacaagcaagactcaagtttgaaggaaagtgggatttttttttgttactttatatattgttttaatttgtcttaattagtttaggaacaataataaagactatattaggcaacatgcacgtacgtttgtgtgttttcgagatcccaatggtagcaactggcaagtagcaacatactaaaataaatagcattgtttaattatgcgtacaaacgaaattggctacatttttagttgcttcaccacctatacttgatcatggattagctcgattacttggctgcaggatgtgatatttgatattattgtaaagtgatttaagagtaacaataatcgattgcgtctaagattcagttgacaaactaaattgttttacgttccaactcacatcactttgataacctgtaaatcatgatttatcttttcacatctgcgttttcataagaaagtttgaaatgtataaaagatgcatgtaaaccagtaaatgatgataatgacatatttagtttagaaaactatatgtagtgatgttaatatgggctaacccaccccaattaaacccatcccatttaaacccactccatttaactttaaactcatataaatccatttatttttgaaacccatttaaccctacccatttaaatttagtaaatccatgtgaacccatttaaaccaattaagtgagatattgccttttattaattaattcataaacttaatagataaataacaacagtccataaacattagctaaatctgaaatatttataatttactaaaatatagatttcaataacatataatgataataatattttcaaatttggcaaaaaatatttttttttgtgattttggcgggaaaacttgattttacggttttacgggaaaatgtcgtttacggttttggcggaaatacgtgattttacggttttggcggaaaacactttttgtgattttggcgggaaaacgtgattttacggttttggcgggaaaacgtgattttacgattttggcgggaaaacgtgattttacgattttggcgggtaaacgtgattttacgggtttggcgaaaatacgtgattttcaattttggtgggaaaacgtcattttacagttttggcgggaaaacgtgattttacgattttggcggaaaaacgtcggtttacgattttggtgggaaaatgtgattttcgattttggtaaaaaacgtgattttggtgggaaaacgtaattttatgggttttagcggaaaaacgtgattttacgttttgttttaaatatatttagtattttgctctttattttagttataattaagttatctactttttaataaaaataactaatataaaataaaacataaatgggtacccatttgtttgtgggtaaacccatttattaaataggtttaattggggtaacccatttaaccccatttgatatttttctctaaatgggtttaaatgggttatttttttttgcacatacccatttaacaaatggctattcaatgcccaagttaacatcactaactatatgcttatttctactagctcttcaccaagaccatcgtggaaactttgatcgacagaaaaaacacctcagctcttttttcaaatatttcagcgacattttagtagttatgaggaaacagtagtagttaggcatggactaacatatcaattggcgagacagcaaaaagacaattagacaagacacggcacgaaacatacattatagacatagagtctacgacctaacacgtttgcgatgctctctcttattacctaacaattcgcctgcttacctatttccttaattacatcccaccatttttcacttccaaacttcaatttgttacggcgtaacgtaaatgatcttgttactggaatacacaaaacgtataaattttcttaatattctgataacatttctttctttccaattatgacttttaaaaaccactaccaaaactaatacaacctcatatttactgtctttcctagaatacacaaaaatacacgttataagatttcctataatgacatgaactgatgagattctagccctaatcgttattatcaatcagtctatgagtttaataatgtaatcttatcatcattacccgtagaaacgcattaaaagaagcttgaaattgactataactagtagtagcctagttagtaggactctcaatttatgattaaaccggttttcgataaccgttttcgataaccggtttttcagaaatgagtgtgattgattcggttagcagaggaaaaagagagaggtaggagaaagaagataatcgccgttgctgacgtcaccgccggtaatcaaaaatctctcctttaaccgtaatttctcttttaactttaccaaaaatccgatccaacagaaattcttatcctaagcctctttctccaccgcgcacgttagcctcctctctttcccactccgagatggagacgacgccggagactcagtcgaagactcaccgtctaccggcgggaagagaggattggtggagcgaagacgctacggcgacattgatcgaagcttggggagatcgttacgtcaatctcaaccggggaaatctccggcaaaacgattggaaagaagtcgccgacgccgtcaattcaagccacgggaatggccggccaaagaccgatgtacagtgcaaaaaccggatcgatacgttgaagaagaagtacaaaactgaaaaggcgaaacctttatcgaattggtgcttctttgatagactcgatttcttaatcggtccggttatgaagaaatcgtccggtgctgttgttaaatcggcgttgatgaaccctaatttgaatcctactggatctaaatcaactggtagctctctcgatgacgatgatgatgatgatgatgacgacgaagaagatgatgatgatgcgggtgattggggatttgtggtgaggaagcatcgtaaagttgaagatgtagattcgagtgaaggatcagcctttagggagctagcgagatcgattctgaagttaggggaagcgtttgagagaatcgaggggaagaagcaacagatgatgattgaattggagaaacagagaatggaagttgcaaaggagcttgagttacaacgaatgaatatgttgatggagatgcaattggagcttgagaaatctaaacttgggaaacgaagagctgcttcaggtaaagttttcatttttatgtgtgttttgttgtgattgatgagtttactgaaacttcagttgtgctttgtttgttgtataggtaagaagttgtaggattgtagattgtggaggagttactgatgtgaagcaaggagcaatggttggatctaaagctcatacgatttggagaagatgttattattattgatctttaggttttcttaagttatagcgcgatgctttttttcttcttcttctttttcattctcttttttagcattgtagagttacattggtagtagcaatgcgaattaccaaaagaactctcatagtatctgacatatcaagatgtacttttgtgaagtatcaatgtatgatggtttgtgtatcagtgtctgcagttccaaattgtgctcatctctctttctgtgatctgcaattactcttttgcttaggcaggtttcaggaatgtgtacagacttaacaagatgcgtagaacggttctgaggagaactcttatcagagtcattcataattcagtttggaatttgatcaaacccaccaagctattgatttggatgtttgcttatgtgactttgctgcactctggaatctccaggacaagactcttgtggcctgagggagacgagttgacacatgaggctgtattattggagcctcaaaaaagaacatcatagaagcatatatatcaatgtttcatgtttggtagaatttcgggatgacataagcatgtgctctcctattcatacctgacttacaaagaagctcttcatctaaaacacctcactttactcaccttggcctaccacttggtccaaaactggtaaggactctgaccttccaaggctcatcttgtacctgagttatctcatcgcatgtgatggttacttttgaagttaaaaccctttttcatacatatgatgaagtaagcatctgattatgcatactggaattcatacattagggacagactttagattgtcaaagataacttgtaaagcaaagtgcaaatacagctgataaagagatatatgatagagagataaggcctatacaaaaggaggctgtccaagatcatacaagtaagcatcaagattagtagacccatcaagcaacatcaagtcactataaggtacaagatcaagaaaagcagcaagctcaggagaatcatccaaaggggacacttggctgttgttgaccccagaatgggcaagtagtcgagtgcgagcaacagctagatcgtgttgaagctcgagcatcttcttctgcagagacgctatggctccaatgcaaccgtaaacaggatccttgagacgaacctcagcttcataagccaaggagttaacggtttcttgtctctgttcttcaggaacttcaccgagaagcttactgacgttgctggctccaaagactttatggactttggcgaaagttatcaagtcacttgagcggaaataaggagcgaaaatgcaagtgggtgtgcatcgtctcttcaagagcttgcaggctgcacaagatgagcttgatcgtggctcatgccctctcatctcaaactttttgtttgtttgttttgattttttggtggtaaatgttaggctctcgttttttctaagttttatctcgtgcttcctttatatattgataagagtcttttaactttttgtgaagaagagtgtttttgaaagtaatagagagaaggaaacaaatgggacaaggcatgggcctattcatcatttgtgttggctttgagcttttccttgctaattacatgattggtcgtgagttcgagtccataaatcataatcatatattgaaaaatcaaaggtactatagagatagagagagttaaagtaacaacacatcagctaattttctcttttatagaagaagaaacaagagaagcaagacttttggattagtggaaacaagtcaatcaagcaaaatacaaaatagctttcactttgctccaaattgaagaggaaatttcttacaaagtgggcaccaatatagaactgagcttatatcactttttgtggttcttattgtagattatacatagcttaagcaaaagaaagtcaaataataaaataaataaaatcacaggtagcatataaaaattggagtgtggaaatggagaagacaagacatttgacaagaaaagtgagagaatgagaagcccaccaccatcaccaccgtccccttcactatccattttctcttctttctttggcttcctcttctactcatcattcattttggttgtgaatttataccaataacaagaaaaacttaactcaaaacttaaaatttcttttgttaaatcaaatattcataaatcttaaggaccttaaatcttttaacctttataatgagtacacaaaacgataatattgttatctcttaacctttgtgaatgagtataaatatacaaacaagtaatggtttaaagaaattgctagtagcaacttaaaaagaattgtcatttacttaattaaatcttcttatcttgtcatttcataaattaaatcgtaatatgtaatgctttccattccttttccactatggattataatcccataggcttacctaaacttttctagtagttcacagagcttagcatataatcactccctttccttaagccattaccaaaaacccaaaaactcatcatcaaaacacacttctccattctcgtataaactacttgaaaatgtcgagaatgaaacagcttgctgctgcaaaatagcagataaatgtctaataaagaaccagacacaactgacttcaaatatatccatgtataaggtttagtttatcaaaatacagtaaaaatggctttttgatcaaatattccccaattctataattgctctgtatttctgcgtcttaattgatacgaacaaatagacatacatttttagatacgagagtgcaatggggaaagaaatgataacaacaaactcgcgggaaaaaacaactttacatgtacatctaaagagcgaaaaacagagttgttcaattacaaagttggctaaaaacagagtagaagagaaaaacacaagctaaaccggaaacaatctggatttgaaaatggctaaaagagtggttggttaacgtcaaggagttcgtccggttactttgactttcctcttccagattattcagataggttataagcctataacaacgaaaataagttgttaaaacagaaataaaattcattctgatggaaagctaccaaactcgttcaaaagtcggaacattacctctctagtgggtggtggtgtttctgcgtcgacgattgtttcggccaaaagggttcatgaaccactctggtttgtaggaaaccaatatgtatccaatcgttaatccaaagacaattccaggtatgaatcctattgcggctgctatccagcttatctcttcttcgtcttcttcctctgtttctgtcgtttcattctgttgtgatgctggcgtatgtttatctctgcagacttcgtcaagagaagggccaaaaagtcccaggttattctcaaaggcagagcaattttgccttcgaaactgcgtacctcctggtactaggcctgcaagctggttatgagagaagttcatatacgcaaggaacgaaaggtcccctagctcttgtggaatctctcctgtaagcttgttctgggaaacgtccaatgactcgagagctgtcaggttccccatagatgatgggatgtggccaccaaaagcattgtttgacaagttgagcacgagaagctctttcaatagaccaatggactttggaatctctccttcaaatttgtttccggaaaagtcgagtgctgtgtagattgttagaatacgtaccagctccatcgctaaacctttattcatcaaaaccattgaatcttggtagtaaaggcctgatcccatgtacttttcgttagactggtcttcgttttttccaagtgatgacatagcactccacttcacaaagtactctgttggcaaagttccattgaagtgattatgtgatatgtcaatgattcgcaactcagggaatgtggcttcatgtattggtccatggaatgcattggagcgtaatacaagaacttgtaacttcgacagagaactcaaccagaacggaaacgtgtcgttgattctgttgctttccacgttcaaaacttcaagattagagaaacggatcaaagatcttggaagctttcccaccagtaggttatgaccgacgtcaagcgaccttaggctttcaaatatatgctttggaagacctccactcagattattttgacgaaggtttagaacgaaaagagtactcttgagtttttccatgcaacgagggattgaaccattatagttgttttcagataaatccagagtgtttagagaacgcaacccgcatatgaaagaaggaatcttgcccgtgaagttgttgttggaggcaaacaagtgaatcatagatggtttccggacagaggagagtccatgtttcttcgacgagctttcaaaactgatgaaagtgttgttggaaagattcaagtagaacaagtttggtagcgtccataaccagccaggaacttgacctttgattttgttgttggaaacgtctagaaaccccaattcgtgttgtgttcttaggatctctggaaaatcggtgataccgcatcctgacaagtacaaagattgtatcgattgcgaaggaggatctgaagaaactgaagacttgtttgtggctgaaacaaggttgcctgagatatccaatgaacggagcgtcttgaaatatggtaagatatcgttcaagtcaatcgtagtggtggtcaaataggatagcctaagatcgtcaagcgacttgagatgcgagaagatactaaagtcaactgggcgacattgggtgtttaaatgggaaaggtcaaaaagcgtgaggttgacaaatctggaaagagatctcgggattgtccctatgaagttgttgctgccaatgataaggtattgtaggttagatggtgaagatatattcccaaaatgaagagtgccgttgagttggttatcgctcaaatcaagtctaatcaaaggaggaatgttgaagagagaagaagggagagttccagtgaaagcgttgttacttgcttcaaagtccatcaagtttgatagtaaactgatgttattaggaatcgtgcctgtgaactgattgtgggaaagtaataaagcagacaacctcgtcaaattcagtagtgagatgggaacatttccactgagcttattggaatcaacctgtaagacgatcagctggtttagattgccaaaagaagatgggatttcaccaacgaaattgttgtaagaaaggtagagataggtgagacgagcaaggttcccaatcgaagatggaatctgaccaaagaaatcattactagggagactgagaaaggtgagattagaaagatttccaattgaagacgggatttgacccgaaaactgattagaagaaagctcgagagatgtgagatgagaaaggtttccaattgaggacgggatttgacctgaaaactgattagaagacaggtggagggaggtgagacgagaaaggttttcaattgaagaaggaatcagacccaaaaactgattataagataggtggagagaggtgagatgagaaagatttccgattgaagaagggatttcaccatcaagatcattttgagtaaggtctagaacacggaggttttgaagcctaaaaagactgctattggaatgaaagctgccatagagccagctgcagctaaggtcgagctcgatcacttccccggacttggtatcacacgtgataccctcccaattacaacagtcgctgttattcctccatgactctgtcgtcggatgagggcttacacggctattattgcgatagcaataatcattagaggaaggcttcccaatctcaaactcgttcttgagttcgagaagtgcatccctttgttcgggaagacacaagtgcctagtaggagctgcaaccacgtccgcaaaattgtgaatgaatgagaggagaaaggaaagtgtaacagggatgatgatactcgttggattccaagagcctgtcatccttctctatgcttaattagcattcttgaatatcgattatgaaaaagaaaatatagagatttcgatggtaggtagaataatttaattcgcacccatctgtttaattcacataatagaagacttatattaagatactagggaattctgttaaacgcaaagaataaaagactaagtcaagttgaatagtcaatttccacacatttttgtcgtactataaaatatacgtgcagaaattgaaaaggttgcttgtccagaaactgagaaatccatgaaaaagaatggaaaataaagagtaatctacttattggttccttgaataaaggataaatgtaaaaccaaaaaaggaggaagttttgatggcaagtgtaaactgtaaattttcttagcacagttttaaatttatccaatcaagggttcatccgcatcaatgcatcaatcattcaaccaattaatggtggttcttttctctttattatcattcctcgtggatccagaaatgagaaatccatgcaaacataacaaaaagaatcgactctctatgtaaagttttctcgattcaacaatagatcaaagattctaccagacattgggacacggctttaagaaaaagaaaataatgaaaggccatatcatatggagtaccttgattcttcagcaaaaatttctcaggacgaagcagagaatgtcaagaaaacccctgatctcgcttgatcgtgttcctgtttcttcaatatgtggcagtagttaagctgtctcataacaaaacaaaaacgatggataattttggtgttaatcattgcactttcattcgataaaaatgcataagggagagtagtgatgagaaccaaacctccatacggaataggcttgttggtaagacgattccagcaccaactgaagttctgaatgtctccaagaactttggagcagtgaagtttctaaactcattctctgataacttcgccatattccctgcacaggcaaacacatgaccgtggattcctctctctcttaaccatctcactggcaaatcaaatgagagatccgcaaatgcagtcactgccgcatctcctccaacaaaatcccgttcactatcacctttcctctttggctcactgggaccaactcctctggtcttgaatccccacagcgcagatggcccactcaaggagcacacaggcgatgaattgccacccaagaagaatctctctggtatagatgaaggacggttctggtatccgcttccccacggaaaggagacacccccagacacaccaaaatttatagcagcattgtaaaatccaaacggaacagcataccgaagatcaacttcctgaccaaacaaatgaaaatagatgctaaaactatcagatgtcttagattcttgttattccctctcacagtgagcataaatttcagacatactagggaagatatgtatgaaaacaagggactgaaaccacagaatttgctgtgtaagaacttacaaccttccaaacttaaaataaaggtcatctaaatgttggcaacaagaaagaagaggagaccaacctgcttcaggaagcgtaagcttcggctatcaggagcaagaccaccaatttgagatgtagagatgaaagcatatccattagttggcctcaagcttgagtttctctgatcaaacctaaaagtatacttcaacgcagaaagcagactgtgtcccagttgtctccttattgatactgcagcagcttgtgatggatcgatcagattacgccacgcaatcgtgtagatcagctcgtgatacttgcttgagaaaagaccaagagaaagaccgagggatcgttctttatacgatgaaaacttaagccagtcttgagtcgaaaggaaaagacgggaagtaaaaggagtagacaatcctctgaaccttggcaaatacatccccaaaccaacctcagcagagttgtcacagccataaactatagacccgtcccaaatatctccataaccaaaaatgttcttatacttcaaagatgcttcaacgcttgatgatctagcctacaagagcatcacagtattgaagaacaaaaacagcttcatgaagatgacaaattcaactctatagaaaccaatacgtaataaaccaacacaatttaaacatagcagtgaattgttactattaaagcaatacctctgctctagtgtaggcaccaatttggccggtgagagggcttttgctctcgacgacgtcgattaccacattggtagtaccaggaagctcaggaggaccagaatcaagcgtaatgttgacggaatcaaagatatctaacgcacggagattcgaattggcaaccctagatgcttcgagaagctcttgcaacgtggtcgcctctctcacagcatccacttccgcttcaatgatatggtccttagtcttctcgtttccaccgataatcacgtcgtgaacacgcaccggcacaggagcagctcgcatccgacggaatagcgattccgccttgattctgtctacactggatccgctttcgcgcgtttgagatttcgactcggtgtcatcgtcttctccatcgtcatcttctcctccatcgtcaccttcgtatccgttcagttcttcaacttcttcttcagcttctggttctcggatttgtggattcgcgtcgaggttctccgtcggattcgccatgagacagagagatagtaactgagagagtacaacgatttcgagttttcggcgaatccaggaatcaatttgacgactataagtccacaggcgtctatgtaaccttctagatagtgtagagggtgtttatgagctcttttgcttcttgaacgatgtcgttttagcaatttcattgactatgccatattgcaattactaaaagggacatcatgcaaaagagcaaaacatgagctacgcacatatttctattaggtaatcaaaagagatatgagttggatttaagtggttttgttaattgacattggatggagtagtcacattgtctgtgcaaactattttgctaaagcagtgttggatttgttttgagtagatggacttaaaggaacctatggaagacataaaacaacatgttttggtgagcctgtagatcttgttagtttcttaatattgctagaagtcagaatcagagacaacgccacatcttgctagaagtttcttaatattattttatatttatatttttatttttgttagtaagtttcgttgtgaggtgaagatctttttagcatgtgtataataaatctaaaaagccttcaaagacaagaagtcgaaaaccctattattgggacatgtcgtatattcttttgatatgttttagttcctatagtttaggagtttgagcttatcacatacaatgactcttgtataaatacacatgttttgtgaatcaataaagattagtcagttcaatacctagttctacacctatttcaccatccctatattaagtctctgaaacccatcacacgaggagagataaagccttttaaaaaagagagagagagagatgagatacttaatggagaagatgaagagtaaaagagatgtgattgtatgcagaggattatggtatgcaatgactctactctccatctttggcctctccatatccctcaaccttctcttgccatctggtgactcctcgtctcggttcctaagagacggtgcggtcagtgccacaacattctacgcagtgacgatactcagatatcttttcttcaccgatcctccctccacttgctacacggagtttactacacctaaaaagaggattcctcaggttgtgttctcggagcttgccttgtacctagtgttcataacgccgctagcttgttcactcgtgtttacggagaacgtgttgtctttgttatacatatcgttattcaccatatcgttgttcaccggagggatagggcttattcagctaacggaaaagtgtaggatggagacgagacatgctttgatcacgcttttcttcggttggttgtttggtctttttggcatctttgaagctttatactctaaggactataacggagtggcattgttcgttaccagtctttatgtattggtttcctttgggctctttgcgtataatttcccctcggagaaggagaaggacttgcatactttgactgcatctcccgaaacgcttgtctgattacacatacattctttcttattaatttgagcaatttttttcctgtcaaattgcttacataattaagtacgtactaatggtattgttagtccatcgatattcgaagaatcagtttttgttaacttctcttctcttttattttttttttgccatttagttgagaacttgagattacgtgagctataaaaaatgtgagagtttgaatatgtaccctttgcagcttgtcgataacaactcctcatctttaagagacagaatcaacattgaacccttccttagcccataatcatggactctagtttcgactccacgtagggttataaatcattaaagcttcttctacaaacaacggcactagaaaagattctcttagcccatctctctacttccacatgaattccttcataattaatcacacatttaacaaaactagtacaaatgtacaatcataagttaattaatagcccgctactatttgaaggacgtgtgtgtgatcgcccttacttacttcgtggttaaccgttagatcagattcacatcaagacgattttgtatgggaacagcaatcatatgacatctgcgatagatatgatatttcaagatgtctaggttaatggttttaaacaccttttcttgtacattatatacactctctgtaagtttctctgtaagttgtataatggttccaacgccatgccgtttcaatgtcataaacgacacgtacttggctccaagatccgttccattccaaaaattcggagtttcgggttcaggatatttatggcgatagtcgcattgaaacagtgggacttgcatttattatcagactacgagttacattattaagtacacactcacaagcattcggttaaccaaaaacaaagaaaagaaagaacgagcaagaacacttttctccgaccaaacttagagacgtcgttatagagatagaacggtgccatatagcacaaggaagattgtcatcaaactcagaagctgaactctccttccttaaacctcatcattgagaagcatttgatcaaaatgccacactcctgcagttttcacaccggacggtaatttaatgtaacacccaaaagaaagtgaattgaagttttgaggtttatctttggggttgtataaagacttaccatgaccctttcctattcttcttagctgtgcaacgtactctgagattttcttgatagcttcgacctgttttcaccaattacttgaggatcgttgtgtactttaatgtaatgataatgtgacaactttttgtttttacctgctcgcctagaaactcagattctacaaaatcaaccagctgaacatcattgttcttcacaccaacctgaaggaccaaacacggaagagagattaaactacttcttcactgtcaaaatgtgctctgtgatagtgaaatcatgggattaaggcttagaatagtacttctaatgatgaaaagataaagtccttacactttgtaacttcagaagcttttcatttgtaagtttctccaaagacaatgcaagctccatcgctgattaatcaaagagtcagaatcatcaagagcttaatactactatatgaaagacgatatatgaggcttactaagatctatattagtctcaaagattaccaaaacgctgctacaataaagcttgaatcaacttaccatgcaatgcatctcccttctcctcgtgatcaaactcagagacgggcatcaaaatagactgcagcttcactctcccaccacgcttgttctaaaaatcaaatccatcaaacataagaaacactttgaaaggtccatcacttgatagattttgaaattatacctgatactccataaacatctcagcatgacctcgttcttcaagactcgaatcgttaaaaaacctatcagagttaaacccacaacaaaaacaaaaagatgattcatcagctgaagagacacaaaaatacggtttttgcttagactaaagaagaaactcacttggcgaaacctttcaagccgacattgtctctgtcaaagtaggcatacagggcatggtagacatacgagacgttgtactccacgctatgattcacaaaaaatcaaattataagattcatattcatacacatggtcacgtattaaccaagctaacacgattcccacaagcaaaatcattgaaagcaagatatgaacaattgcgattcagatcagtagcaccatgatgataaatgatgatcattcgggaagatattaatcaatcaatgaatttggttccttcaaaattttcgattggggtgattcttagagaagagattcgaaaaactagagacagactaaaccaaaaaactaagcaagagaacatacttgatctgatcgttgatggcagattcagaatcgtcggagaacttgtggcgagcgagagaaacaaaaggggtagtgggaacgagctccatttctttcttcacctcctcaaaaggttcgaatacaactccggttaacgacttcgtgttcgttcctttcgccgcctgaacagaaaacctggatccactcggagaaaacagaagattcgacgaatttctcgacggaggaaacagatttccaccgccggtgtagccggagctcaagagagagagagcgggagaagccttgtgcaacatttgggcttaagatctagagagagaaaggaacgaagagcatagtctctgtaaacgtcggagtaaaagcgaacggtgagaggtttaagggaacggcgatggttcagggatgggaatgacgtggttgtctgtttgttggacacgtggaaagaggagaaaaggcttgtggcatacgtgtggtgtctctagaataagccttgagcaaattaagcgtcgtgtacatctaacgtaagatgataaaattgctacgaaaccggatcaaaacccgacccaaatgaattaaagccgggtcaagagaatttaggccaaagataccctgtaaaaatatatatagattgttttcaatcgtgatttactgagagaccttctaggtccacaagaaggttaagagcttcatccagcttccccaatgaagcatcttcgccacaagcttgaaccatgaaacggactgccttcacgtctgattctaccaccagttccgctacataataggctggtacgtgagcaattccaaggagcactgtctcgcttttcggtttctctagaaccttcctcggtcttagatcagtcgacttcacattctctgcatatacattgtaccttgtgaatgcggaatcttcgaggtctttctgtctccattctagcttaaccctgaggatcttggaactggaattgcctggtacaagctctacgttatgagcctcgatgacccacgatgaagctggaagtaaaatctcggggttctgctggttttgaacatgatctttgactgagatgtgtccgagcaatgcaacaaattctgcactctttgtcgaattctctggtctgtagcaaaaggcagagatttcagtcagtgtgtgaccatccatgacaagacttgcctcgtgtaccgtccactcggatacagtctgcactgatgtggtgagacactgtaaggacatgtcgtcaaatctgcggatgggatcctctggcgccacgagtatggatttagtctctagtgatggagacgagaaagaaagcaggattccaagattagaggtttcatctgatttcacctgcaccagctcaaaaacccccattagtaaaaacaagaagatctcataatgtgatgtatctagaagcagagacttacagagtaggagattgtgatgggggaagatgaaagctgaagatggggtttgaagagccttgttgtgaaatacgcatctcccttgagttttcctctaaaaacgatgttccctcctccgttaaaagatgcctctcgagcactatcatattcatagtaattgtttaaatgttgctcagaaaagtcaaaaacatttttcccttcttggctttaccgaaatgaatatgaagatagtattagggccagaactcactcaacagtgacctggatgatatctttgttgtcttcattgaattctaggagaggctgatgtgaagaacagaataaacacagagatcatcagatgagaggagcgacacacccagatcaggaagaacgattgtcatgttgtggcaggaaaagtttttgattcatataaaatcaaagacagtaagatggttgaacctgaagactttggcaagaaatgttgtaccatggagaatctgacagttggcgaccttcgagtgaaacatggtaaccaaagccctgaacaaaagagagaagagggtttcagaacatagctgaacataatcataaccaagaaaatcaatgcatgatctaccatggtgttagtgttacaaaataagacctgatcaatctcaccttacctgattgaaatctgagtaaaaaggcaagacttgtggataagtttggactattccccatgacttctcgacaagtgaccaccatctggagagaaaacacatgcatactaataagatccagcgtctcctttacagcaatagtaaaataaagttttaagctcacagtcacagtaatgctagttcaaactttaaagatgacaaggagattggaaaatatttaaaatattacttattctgagctgtgtgaaaattggggggttgtgcagtctcataaacccatccaggagcaaatatggcagctgacacattgtttctcttcagcaaatccagagcagcatttacctagcatgtaaaagaataggaagaaaagaaatatttaagtatagatcattgttttgtactctacaccaatagagaagcaaatattaaagagtggctgagacatacagtccattgcccaccaccaaaagagccccgcccaaaaacatcaattcccatgtagacatcgaattttctgtccccagcaacttcagctgataggtttgggtagctctcctgatacatcattactcactaatagtaaaacaagacaaatagaagaaactgagactcgagagattgatcaaacccatagacagaccttccatgtgtagttcatgaatattccatcgcataagtcaaagaaaggtttgttcagctcagtcaattgatcttgccactgaagattaccacgaacagtgacactgtcatacctgcagaaagttatcagaacaaagtggtatacaaaaagaacaaagaaaaacttctgatcaactcaccatatgactaaagccccaggtgtcgataaatgcaagactttttttagatggctgacgaattccttcatatttggaatctgttcctcatctatatcattctctatatttatctgcaagtgacagtctatatattatagaagtctttcttcaccagccacccatcaaatacagatatcttataaaaaccaagcaaaaaatgctcaccagccacccatcaaagcctagagcagtagcaagttcagccaaacgctctgcatacatttgagcagactcctttgtggcaagcatctctttgcaggtagcttttccttcatcccattctgtgatgaaagtccccaatacctttatatttccataacacacaagaaagtaaacacttttaccaataaaatcctcagcaatattcatatctctgtacacaaacaatcaaactctctaattttatcatcctaatcagcaaactcagagatatctcaataaaaatcgaaactttggatgttgaacaatcaaaaagttttgagcttacttactttaacgccatgcctatgagcagtattggtccagcaaggaggaggaatagtgaccagagaatgagagaagtaaacaaaaatgtccatcaagtaccaatgccaaatcgcaaatccggcttcgttttcacacccttgtacccacttgtcatctacataccctcctttcatgtcatggcagactaaaacccttgggcgattcggtaaacagtcggagtttcggcggaaaggtactgtggagcgattaaactggaaatgaaaggaatcaaagtaagagcgagatttcaggtcttgaagagctttgatcgggaaagatataggtaacgatggcttgacaagatcaagcaacggaacggcttcagattgtgcaacgtcgtcatcgttggatttgggcatgaggagagagaggggaaatgaagtgaggagcttacgggagagggtgaagaagagattgtaaagagatacgagagttcttcgagagaaataggcgcgaagaagttctcgcattttgcagtggtcaacgaaggaagatgatgacgatggctttttatttaatttattcttcttttggtttattcgtacgccaaattaaagaagaaaaaaaacagagcatgtgaatttatcattcttttgatgtgaatctaaacgacatgacaatttcattttttttataaagtaaacttacacgaaagcagagagataagatatttatatgggccttggcctgtgattactgattaaggcatgaaaagttggattcttctttattggatctgataaaatgcttataaggcctttgaatacaaacaaagttaaatgttattgttgatcctttaaaagttcaaacatgtgattagcaaaaagtgtagtggcttttcttgctttctttttgttttataacaccgtaatccaaattggaattcagactaatttggagatagataagttcattggatacaagcaacgaaattgttccaattttgtaagtttgaattaaaatataaacagtcgtgcttaattatgggcaagaacatgggtttggttttggatcgtgcaagtacaacaaattatagctttgtttataaacattaaaatcatatactataataattcagtatactccaaattaaagttttaatcaaaccaaattttgtcattactacaccataaaaagagaaaggcgtaaaaaggaaaaagaaaaaaaaaggtaaacgttataataaaagaaaaaaaaaaatatgacaacggcgttgttttcaccgtctaaccgtagaaaacgccgtctcacacacttcttcttcaccgtactcgctttcatcttactcgccgccttcatctacggccacgatttcatctctttctctcgtcgatctcttcactctccgacgatcgtccaccaatccgcaatcgtcgttgtagttgacgaacctcctccgcctccaccaacatctcctcctccgccttctcctccaccaccgtctcctccaccaccatctcctccaccgccatctcctccgccacctgcttttgcagtaggtaaaacgccggaaggatgcgatgtcttcaaagggaattgggtcaaagactggtcaacgcgtccactttacagagaatccgagtgtccgtacattcagccgcagctcacttgccgcacgcatggccgtcccgatagtgattatcagtcatggagatggcgacctgattcctgctcacttccttcgttagtctctctctccgttcgattttgaatgcgattcggtgattgatcttcagatcggatttgctctgtggttgttgaatgtgttaataggtttaatgcgacggtgatgttggagagcttaagagggaagaagatgatgttcgttggagattcgttgaacagaggaatgtatgtttctctcatctgtcttcttcattcacaaatcccagagaactccaaatccatggatactttcggatcactcaccgtcttctctctcaaggtaagtttggttcagatttagaaagtcttgcggaagccattgaagttgctttgtagaatctgatgttacaattcatagagatctgagtatgaggatgacaaagattaagcttagatgtgaaaactgttggcttggttaggattcttatagattcttgtggtatgtttatgtaggattacaatgcaacgattgagttctattgggcaccgtttcttctagaatcgaattcagataacgcaacagttcatagagtatcagatcgaattgtgaggaaaggatcgatcaacaaacacggtaggcattggcgaggggctgatatagttgtgttcaacacatacttgtggtggaggactggcttcaaaatgaagatcttgtatgttatcaatcatgaaatttaaagctctcgtcattgtttcttaagtataggttctcaaatacttttctgtataatacttatgatttgattatttttttcgatttgttatttgaagggaaggttctttcaaggatgagaagaagagaatcgttgagatggagagtgaagatgcttatagaatggcgttgaagactatggttaaatgggtgaagaagaatatggatccattgaagacgagggttttctttgctaccatgtctcctactcattacaagtcagtaacttcttgaactttactgtgatttaactatctataaacacttcaaattcaaaaccaggaaccaaaaagagaggagatatatggcttagaacaatgtagtccggatttggtattgaatgaaatgagtaatggagtttagattgatccggtttatctttaatagtttaagtaaatgtggcttataacatgatccgcaattagaaaccacactaagatttagcatacaaaggtttcatatttgtctacctccatgatcaggggcgaggattggggaggcgaacaaggaaaaaattgttacaatcaaacgacaccgatccaagacatgaaccattggccatcagactgcagcaaaaccttaatgaaagtgataggagaggaattagaccaaagagcagagtttccggtgacggtacttaacattacacaactctctggctatcggaaagacgcgcacacgtcaatctacaagaagcaatggagcccattgacgaaggagcagctagcaaatccggctagctactcagactgtatacattggtgcttgcctggtcttcaagatacttggaacgagcttttctttgccaagttattttatccatgattcttttctctaaattcaagatttttttagaactgtaattgtaaattatggttataatttttgttaattacgtacacttattgttctacaaagagaagaaagagagaaactctgctattcgctatattaactcaatagatgagaagcaacagttcatgatccaaggaaagaacaaaaactatagagttattaaatattttttcattgtgaatcagatcattaacacctatttcttgtttctcctatgatcaatccaaagattatgttgtagtcttgtaggaccattgcctcagaactctcaaatatccagagaactcaaaccattgaactcgtgaccatcgtgtggctcgagatgaagcggatgcaaatcataactaccagaatttacgtggttttggtcttggctctgatggggaccaggttcattcaaatctccaaggagttcattaatatcaaagcactcattaggatcccaagaagtctgatcatttacaatatcattagaccaaggccaaccgtaatctgcaacagtaagcaaatccggttgcagctgttgctgttgctgttcctgttgctgttgctgtatctcctcttcttcctgcttcggtttctctttctcctgcaaaacttggccccaatactgctgctcaaactctaacagcaaatcgtaattcagcgaagaattcatatcttgatgtccaaccgtgcaactgtccggcctggttccacaagactcttctctaacatctaaaatctgactaaatggattagattcacaatcagtatcttcatgcttcacacaaacatcaccacaaacaaccgccttattttcaaccgtacacacctcagattgactagacgtactagtaaactcagacccaacagactgagggaagttaagacgagccaatgaaccgtacatagcggtagccgcttcatcataagcggaagcagctttttccgcggtaggaaaagtaccaagccaaagtctagttcctattttcggttctcgaatctctgcaacccatttaccccaaatcctttgtctaactcctctaaaactacagtgagaattatctggtcctcctttacccttcatacaacctttcttcgaccctttcgcaggaactttgcgtttcggtttctctccttctttaacagccgaagcttcaacaatctcgttgtactctttccacttctttagcctatcagccaccgttaaaccacctgctcgagccctagatttccttttcttcggctgctcggttccggtttgttcatatacagccatcttcttctttatagtcgcaatctaagaatctacaagataggaaaaaaaaaggttttgaatcagtctcttcctctcaatttcagaaaacagaaattatcgagtcacggaatttatagttataaagaggaacagaaacaacttgggcaccaagggtgttttacttgctcaccaagttttactttattaatagaaaagcaaaaatcgcattagaatttccaattttttaacccgagtcttagattaaagaaaccgtgtaaaaaaaaataaacgctaaattagaaaatttcccaaatttctctcaaaaacagcgaaacctaaaaggatgacattttgaacaaatcaatgaacacgaaaacatctaaaacccaaaattcatcaaacccaaaaccctcttcgagactaattcagcgaaaaatcgacaaacccagaaaagattaattggaaatcaaacatacctatcgtgaatgataactccaggattagagtcgaatctcttctttatttaggcaaaaatctcttctttatcacgcagatgttgtttgttgttcgtgttaagtcgatcaaaagcaaatcttcttcgcaagctttcgcgttctttctagcgtctcttttttcttttctttttgtaaagacaacaaactttttacagaaatcagatattatcaagaggtcgaaagggtatttataactttgtctagatatttctgatattttaatgagagtagtagtgacatggcacttattaattcgaattgtggatcataacattccccagtgacgacacgtgttgaaattttcaccacacaaaaacacgctctcaatacgggtaagcaatgggaatccttactatagttgataaacacatacagaaacatatttaatacaatatgtacatgttaagactcaagaatcacaaaaccatactaatattttaagaaataaatatttaaataatgaaacttaattattaagaaagtctcattttaaagattatagtcaatatttgaacaataatctgatattttgaggaaaacaaattaacagtatgttatgaataatttataaccaaaaaagtagatttataatctataatatttattttctagtatggcagtatattaaattgaataatatacatccaaaattccaaaaaataagtaatcaaacaaacacaaagcaacatcacaaccatgattatcaccatcacccacaaacttttcttctgaattcatttcattctaagagagaatatacgaagcacatcaaacagtgttttatcctgaaagcataaaatcagagaaacacacaaataattaacgagattctagttcagttataggttttttgaactccaaagctcgcattaattaatttacaattagtctcttctactaagtacaataactctaagtctctaacagtaatcatcaaacacaaagcaaatgtccacgcattatcaatgagacaaaatcaaactcgtcatcacggtcttcaattatcggtcggcctaaacccccataatttggaaatcgaagctcgcgaatttgctaaggtttcatgcggactacagaacgttacatgttgacgacggtatgaagagaaattgcggcgagacacaaccgatcttacgttatctgttctttcttttcaaaaaggggaatacttatactcttctgagttcggtggaatgtgatcaaatgggcctgcgttttatttttatcctcctatgttgttgggccttagcccgagtttgtttttcagactgatgcacaaaattgataatatccatctctgaactaataatatcagacttatagacatagtaacaagtcgtccaatttggttgggaaaacaacttttcgaagtttcctgtacgtaattaaagtaaagacaaaatgtgtggaaatggactattcaacatgaagactcttttaagtcttttcgtttcaacgtgaagaacacttggtagaaagactggttatataatgtgagtcaagctgtgttggatttatctttgtggagtagaatctattactatgtctataaagagatgggcacgaaaccatcttatttactaccacaaactccactttcttttatcaatattcaagaaaattcgactagctagctagcgtaaattaaggaggatgaaaggctcttgggtggtctcaacgagtatcattcgtattactctttcttttactttcttattcatttgtcatttttcggacgtgcttgcggctcctactaggcacttgtgtcgtcccgaacaaaaggatgcacttctcaagttcaaaaacgagtttgagattgggaagccttctcctacttgtaagatggttggcattgaatctcatcggaagacggagtcatgggggaataacagcgactgttgtaattgggagggagtcacgtgcaatgccaagtccggggaagtgatcgagctcaaccttagctgcagctccctccatggccggtttcattccaacagcagtattcgaaaccttcatttcctaaccactctagaccgttcacataatgattttgaaggtcaaatcacgtcttcaattgaaaatctgtctcatctcacctctctcgacctttcttataatcgtttttcgggtcagattctgaattcaatcggaaacctttctcgtctcacctctctcgacctttcttttaatcagttttcgggtcagattccatcatcaattggtaatctttctcatctcacctttctaggtctttctggtaatcgtttttttggtcagattccatcttcaattggtaatctttctcatctcacctttctaggtctttctggtaatcgtttttttggtcagtttccgtcttcaattggaggtctttctaatctcaccaatctccacctttcttataacaaatattcgggtcagattccatcttcgattggcaacctttctcaacttatcgttctctacctttctgttaacaatttctatggtgaaatcccatcttcttttggcaatctaaaccagctgacccgcttagatgtttctttcaacaagctcggtggaaactttcccaatgtcctactaaacttgacagggttgtcagttgtatcactctccaacaataagttcacaggcacgcttcctcctaatatcacttcactatccaacttgatggctttttatgcaagtgacaacgccttcaccggaacattcccttcttttctcttcatcattccttctttgacttaccttggtttgagtggtaaccaactcaaaggcactcttgagtttgggaatatatcttcaccatctaacctacaataccttaacattggcagcaacaacttcataggaccaatcccgagttccatttccaaattaatcaaccttcaggaacttggcatttcccatttaaacacccaatgtcgcccagttgactttagtatcttctcgcatctcaagtcgcttgacgatcttaggctatcctatttgaccaccactacgattgacttgaacgatatcttaccatatttcaagacgctccgttcattggatctctcaggcaaccttgtttcagccacaaacaagtcttcagtttcttcagatcctccttcgcaatcgatacaatctttgtacttgtcaggatgcggtatcaccgattttccagagatcctaagaacacaacacgaattggggtttctagacgtttccaacaacaaaatcaaaggtcaagttcctggctggttatggacgctaccaaacttgttctacttgaatctttccaacaacactttcatcggtttccaaagaccaacgaaacctgaaccatctatggcgtacttgcttggctccaacaataacttcaccggcaagattccttctttcatatgtgagttgcgttctctatacactctcgatttatcagacaacaactttagcggttcaatccctcgttgtatggaaaatctcaagagtaatctttcagaactaaaccttcgtcaaaataatcttagtggaggttttccagagcatattttcgaaagtctaaggtcgcttgatgtcggccataaccagcttgtgggaaagcttccaagatctttgagatttttctctaatcttgaagttttgaacgtggaaagcaacagaatcaacgacatgtttccgttctggttgagttctctacaaaagctacaagttcttgtccttcgctccaatgcattccatggaccaataaatcaagccttgttccctaagttgcgaatcatcgacatatcacataatcacttcaatggaagtttgccgacagagtattttgtggagtggagtaggatgtcatcacttgggacatacgaagatgggtcgaatgtaaactacctgggatcaggctattaccaagattcaatggttttgatgaataaaggtgtagagtcggagctggtacgtatcctcacaatctacacagcagtcgacttttcgggaaacaaatttgaaggagagattccaaagtccatcggtctattgaaagagcttcatgtgctcaacttgtcaaacaatgctttcaccggccacatcccttcatctatagggaacctgacagctctcgagtcgttggacgtttcccagaacaagctttatggagaaatcccacaagagatagggaacctctcgttgctttcgtatatgaacttctctcataaccagcttacaggcctagtaccaggaggccagcagtttctaacgcagcgttgctcttcctttgaaggtaacttgggacttttcggctcttctcttgaagaagtttgcagagatattcacacgccagcatcacatcaacagtttgaaacgccgcaaacagaggaagaagacgaagatctgattagttggatagcagctgcaataggattcggacctggtattgcctttggtttgatgtttggatacatactcgtttcctataaaccagagtggttcatgaacccttttggccgaaacaatcgtagacggaaaagacacacaacaactcactagagaggtaatgttctgatttttaaaacgaatttgttagcaaacattagaataaattacgtggacaaacttttgaatataggtccgtataattgataccgaaatttgtgaaatatctctttgatctttcgttttcgcacacagcacccagaagcaatcaaaaatctgtttcggtgattaaaccgctgaaattttttaaaatgtaaacaactcttatgtttggtatttggtgctttcttataggcacaatcctttggtgctctgagggtgtccaaagataacaacagagaaggaggtatgagagaaatgaagctcatatacaaagatctgcatttatggtttgttttgtctaagaactctcaaatgtctaattaataactttcattttgcttgtcaaaaagtgaaccataagtacatttggagtgatataaagcttttagtttagtggcaatgtaagtttcatgtgatagttaaagtcaaacctttttatggcgaagaacgatggaagtgagttcgaaaaaaccaaccagatactagtttttctgcaatacaaactgaaactgaagcataccaaatcaaggattgacaacaaaagaagagagtattcccttagagccagtttcgaacgttgagtcaaatcatttccatattcttcttccttttagcgcatttgttcaaaagaaagaaagtagctagttaccatatgcttaaaaacttccattgctcccttttagccgaagtatatcccttcttgtttcaagctgcaaagaacccaaacaaaagataagaaagtttgcatttgaagctaggtaagaaaaaaacaaaagaaaaagtatcaatttacgagttttgcaaagtgtttttaccagctccatctccaaagtaatcatcctctcagcttgtttcagctgagtatgcttcaactccttgacttccgccaatagctagcagagaaaaacatattcataatgtttcattagagggtcacaagcaaaactgttttttatagttcagagaacgatggatgaccttaaacttacctcagtcaatatatccacaacagtgggagatccaatttccatcttgaaattatccatacgtccgatgtcatcaaccacgtctcctgtaccggcagaaacatacgatgatccacaaggcgatttagctatacttctttcctcaaagtcatcctcccaactgttaggcaccatagatgaagaagcttgtcctgtgttacccactaagctcttgaaacattccttatccttaggatcctccaaaatcttgttcagtccatcgagatggacttgaaaggaagatgttgcatcccaatcgatgaatgaatatgtatcctcagcaggctcttccttgctaatgctaggtactattctattgttagctgtagtagaggttcccttttgtgttggatggagattttgctgatgatgataagcattcactttgacatcttcaccttccattgcagcatttctgaatcctccactgtcttggtgtataggtggaactcgagcagcagatgtccaaggattttcaacacctttacatgcttgagatgaaccttcatttgttatagaatttttcttctcctgagttgaagaagcggtcatgtgactcagagctgatgagtaagatgtaccagactgtgacactgatggttgagttcttcgctcatctgcattattggaagctgtttcccattctttagtttttccaagattgactaatctcgaacctgctccgagtgcaccttctttcgagtctttctctttgtttttggtagactcatcggaagatttgaacagattgctccacttatcaatacgcgttgctcccgagtcacctatctgtgcaagagaagatgccggaataggctttctgggtggtggtacagcatctctggatatcgttggtggcctaacagatggggatggtttaaacaaacggagcagcttgtttgtctgacctcgatctagttcaaaccaaaacatcttgtcgtcattgtaattctcaacaattactgggctgaacttttcttcaggcaagggctcacaccgcactcggactcgtacctttacctgtggcaaagatttgcagaacgagatacatttctgtttagaggacatttgggtgactcaactaaagaagacgttctgtactaagcaaaggtacctgagcaggatatggacttggatctgtcccatttggagaccaagctttggaatcaatgttcagttttccttcactagcagcttcaaagatgccgtgaagtgttctgtcactgtagttgaacaggaacagcgtcaaaccaggatcaatgttcttgatataagccatgtgcggggctggtaagcctgttcacaaaacaagcatcattttcaaaatcctggtcgtcattaaactttaagcctcaaagattgtatagccaactaaccaaacaaattcttagcatagcactctttgatagtgctgaacttgcatccaaatataaccccacaaagatctcccttcttcagattcctcacacacatatttccttatcctgatatgtattgaccatcctgagccaatgtataggtctctgtcttcctccctgcacccattgcttctcactagaaagcatgtcaaaaccaaaagcgtaacaaaagcataagtgacagtaaatcgtcaacacaaaactgtcattaaaatcatcaagcaatttgcagttattatctgaagtactcgttcccagatactctaagtaggaccaacttgcattttgagacaatgttagcaacacataaacctaaaaaaattcacgagttccagaaaccttaagcagagaggatcttcaatcactgaacgttaacaacagttcctaattaagaaaccaaagaaaaatgaaagatctcatacccacatgagttctttctcagcaaacgctcagtgacaaaccaaaatcgaaggtttctaaaagagacaaaactgaaatctgaaacggaaacaacgaaatgaaaacaaatctgcgaagttgagacaataatacctcagattccttaagcgcacagctacttgaggtttaaggagacgaccgaagagagattcaaggtttccgagcttagagataagcaaacagagcaacattagagcacaatctccacaaaatctcaaagaaatttcaaaaataaaaacaacagctagagtaagagaagaccttacctgaacgatagagacgaagaagacgaagcgaaccgaatcttcagaaactcaaattcctgcgaataacagtcgagaaacgcattaggatgaagaaattttcacagagaaatggaatttgaagagaaaaatcttagagtttcttcgatttgataatggctagtatgagagagagagagagagagagagttaaaacaaaaaggtatagactggaaatcgcagaaaacactgcaatttattttccgagagaaagaaaatagatgaagcgcgaaaaagaaatatttatgagacgagtttacccttttgggtttttgggctttgacactaaaatggaaagttataggggtgtttccgtaatattattcatcagagaatgcagagagacgttgcagttgcctgtacgacaatcacgtcaatgctctgggttaataaagtagacagattttataggtttgtttaagatcatgacaaaacaaaaattaataaatttgttgttaccatcatttttaatttaattctgaaattataattgttgtttaaatccagaaattggagcaaggttactaaaaataaattcaaaaaataacatattttaaatttttaattcttttgttttataaaatgtgtgaaatattagatgtttatctttttaggttgcaagtattgcacaattcttttacttttgtaagactaagaaacagttcaaggttttggctaacgagtatcaatgccaagagtatcaagttctaacactagaaactaaaagaaaatcatggaggatgattgaatgttgcaaaccccatgttcctcgtggtactgaaatatgcattaacagtgttttgtattatactgccgtcgaaaaagggtctttaatggttactatagtagtttgcttcgatattagctcggagaagttcagctttatgaaagtcatggaaactttcgatagagatttgcctagttcaacaactatgataaactacaatggcaaattaggtttgttgatgacggaagagtctaccgatattgttagtggaacaagtaaaagtttcgagttgcgggtcctagaagacgctgaaaaacatgattggtcgaagcatgtatacatgttgcctcctctgtggaagaatgtagttggagaagagaccaagctacgacttcttggaatggttggcagttgcaccaatgaaattgtgttttcgtacaagtacccatctacatttatgccttcctacgtcttctactacaatatcgagaggaacacgatcataagacttgaaatccaaggaatggaagagcttaacggtaagtgatgttacatatatctaaaccatgtagagaacattaagcttgttcaagtattttagtattttatacaccttgagatttaggctattaagttccaatcataaggatcatttatttcatatatttttcttatgtattgttctccatttcagtaaaataatacattatttcattctatttaatttatatctaaacatactatactaagagaagaatcttatttctaatcgcaagaacttctgaactttttgttgtgtttggttttccatttttcaagaagaaagagaattttggaagagataatactataagagaatcaaataacaaattagcaaacatattcgttcatcaacatcaactgatgaagttaatcttctgaagactattgtctattgatcatcaagataatcacacaatgatctctgtttcttaagaaaatattccctcttttatcttagtcaatgaagaaattcggatttggacatgaccaagaagcttgataaaatactagctagaacaccgtattcctctcttcgtgtcgcattcataaaccacacaaaaaagaaaaaagaaaaaaacttctttaataagagtaaaatagtaaatgaataatatttccttctgcttcaagcaatctaagaaccgcgttaattaactttaagtaataagctctacttttcttctctttatttaagtaatataaaagaaaaaattgagaaaaaatcaagacaatgcgatcctttaattagaaatcttgtatcagacagacttgttcattattttgttggataaaaatggtgagtgttgtgggagagatgttttgtaatccgtacacgacggagctggtggtgagaaggcggcgtgagagcctgaaaagggaacgctacgacgttttcgatctttctaacaatctcatcttcaccgtggacggtggcatttggaacatccgccgtaaacgtgtcctccgtgacgccgccggaattcctcttctctccatgcgtactaaggtcacacaaacatcactaatcacatctatttatctacgaaaatcattctgtcgtattgttgatgatcatcacatgttaattgtgttatataaactttagttcggttttaaaaattttaatggaacgactcattaaatatttcttaatacaaggtcgattatacgaaacgtttttaaatggcaatttggctgcataacctaattttgcccacatatagaacctagcttaacccatcaaggtagtattgcctaatttcattaatcagaaaattggtagatgtcaatagacgggctgagtggtaaatggcctaaaaccaaatctttttgccaacttttctccttagtttgttgcttaacagtctcaaattattagtatccagcaatggaatgactaattgattaatcggttcgattaaccatatcggcaatgacaaaatgatcaaatttttaactgtagaacgtaaaacaatgaaaatttgatttgacactcaaaagagttaaaacatatgtagtcaatagaatgtctagatatgtttagaagtatttgtgacttgaaagcataatttatgctctcgtgagaagaaaaaaagttgaatccatctcatgaccaattggccacattcacgagtaaggactaggttttctgaaagtaacaaatgaaccatgtttcagggactagtaccaatgcgatacaattgggaagtatacaaaggagatagcacagaatctgataatcttcttttctcagcaagggaaccaaatctattatccttcaaaacatcacttgatgtcactttaccgccagaccaatcttcaacggacataagtagtgtcgagccagattttcaaacatttggtcgttatatcggctcttctttcaaactcttcgagccaattcacaatactcttcttgctgaggtatgtcattcatgcattattcctaccttctttggtttattcgataattaaaatattatacggtaaattatgtcacattttagcttgttcctctagctaactaccagttgcacccatatatagcttcttgttcgaaggaccaacactatagtgattttactactacgttaaaagaaaaagataaatgagagcttaaattatgcaggtggttcatgatttcacatggggaggactcataaaagggagttacagcttcaaagtgagagttaatccatatgtggatttcgcatttgtcgtggcgttacttgtaatcacagatgatacttccaatctacgttagacaaaaaaaaactactgtttcagtatacatttttgttcaaatgttttagataaatgggtttgtaatatacataaatattttggataacatttcatgaatattttgggtatgggagacatcaaaaacacatctagttcaatgaatgtcaacatttgcgtcagtgcatcgcacgtttaattaaaaaaaaaatgaatacgcccatgtagacttttataagttttatcttctaaaattgattaatgtgttttgtttactagttcctccgttctgttattatcgttccagtcgtcacaccaatttgaccatacaaacgccaaaagataaatatatcacgcgaataaatgcgtgtccacatccacaaaaagacgcacaagtgaccttcctcgttgcttcccactcccaattctttctcttttcattatttttaactcttttttaatatttgcgtccacgattgcatttaatcaattcttcaattctatacttctttttccattgaagacaaactatgtagtaaaatcctataagccacaatatccaaatcagaaaacttagataaacagaactcttatgtatcaaatcctataatccacaataaccaaataaagttgtcacgcattgatattattacaaaatgaggtacataatcaacttgtttatcaaatcatggctaattcacaaaaagatatgggccatacgttatggttatcatcttttgccaacaaatgcacaacttctcgtactaaacaactttaatcatcaaaagatcccaaaagcacttttttatttcaattataacataagcaaacgttacatcaaacgcaacgggacaacaagtcgatttgggtttccccatacttgctcccactaaaaaacacaaacccacacgaattttcagacaaacaacttaaaaaaaaaaaaaaactagcgacagccaaacgcgaccgtagccccagaagcccacaccgcgtttaaaacagcaacaaaatcctttttaacccatacaacaaacaaaccaaccacacacagacacgtaagcagcctttatttagttattctcctgacgtggctgttacttactttaccaaactctttcaaatcgccagaaccaaaccgggtacgggtttaccagcccgacccgagaattggctttcccacacggaggaacaatgcgacggaggcgcaatctcagcggagcgtcgtccagcaacaacgttaccgatccgtgtgacggtgagagaagtgttagagtactccctcacctgtgtgattatcccattcgctacagtccaagcgtggatccaagaaatcgatgtcgcggcgtcgcagccttccgcgattacggtagatccgaaggaaacgacggagagaggtacgaattcgaaggaggaagaagacggagagacacctccggtgagtacgcgcatcaaaaactggtgcggcggaggaccgtggaaccaatactccagatctggggttaagatctggtgcacagatttgacgtcgcgagatctcagggcttcatacagtttcagaaccacgtctcggttcttaatctctgattccgccagagtatccagttcttggcgagtttctgaaatcgaaatgagttatcagaaaaaggactcgatttgttgaagaagaagaagatgaagcgattcttgaaggattttgaaaaatggtactgatgattctgggatttatatagaggcttggggttgggatctgattctctgtaacgcatactatttttaaggtttttggatatttagcttaatctgacacgtgttaccatgttattgggttaaactaaattgtgggacctgaagataaagggctttgaaagttgagccagctaatgtttgaccccaccgtcgtcgtattaggtgaatatttaataggttaattgaatttgcttatggtaattggtaagtcaaaatatctattgactttagatatctatgaaattttatcacttatgtaagattttttcttgactttaagtttaaactataaatttatgagaaaatggaattgaaagtcaaaagttctagctatgttcaattaaaaacacttctaaatctattaaaataaaatgtggaatcaaaagtttcttgaatctattgaaaaagcatttagagaataacaccaattttaattagtatcaataaattatttaacaaactacacataattttgatacagaataatgatccattaatacatagttttctctacatcttaaaattacttaaaacccactaaccgataaatctctaacttattttcaataatgactttccacttgaaagaattaattagttcttaataattttctatgctcatattattggaagaaataatttaaaatcttcaggaatcattattcattaatacagtcaaacagaaatggtttcttattagtattaatacagatgaatacagaaatatgcaacgaaacgtgttcaacgagtatgttggtcgtcttggtcgggccaaccaacctatcacagaagtttgaaagatgcataatcactttgacacgtgtcacacagagagtccacgtagagcaccatggccacctattagctccttctagtcctgcgacttcagtgtacacatgacacgtttcgatgtcttataatacatttttatacgtacatattgaaatagagagactaagggattttgaagaactttggaatgatataaatttaaattggtatgaatgttagcgttttaagcttagatacttttttcttatgtcgacgatagtggtacatttttgtttttaaacacaactttaaaattagaaactaaagaatttgattggctaaaataccacaaccgttaatgatgaaaaagcaacattgttttgtcataaatctcttttgatatttatgcagaatttcacaaggaaaataaaggcaagcttttaaaagtaatacagcttaaactaatacatcaaaagttggattacacaagaaaatacaaaaagttgattacaaacaactaactacacataagtggattagtgatgtggttctccacgataatgactctttaagacagtgacgcttcattcctatattggatattgatactgatctttctctgctaatgacaacttgtggtatcattttcactaatagcactatagttttatattatttgttaacattgtggagtctcctctatctaaatcaggtgtagatcaccattagcgatacgtgggtttatagatacactgtgatcccttatgtaatccactgagacttgagaatttgaaccccaaaccggaccagaaaaccaagcaaaataaagaattgtgaatatgactgactcaaaatctcctatggttcttactacttaacctcaaaagccaacaacttctccaaccatctggttcgaatcatgaattagaagtaaaaaagcaaagcctgcaaaggtacatagatcactcaaagtctcactgaagcatgacagacaaatttacattacagaagaagccgtgaaagttctctaaaccagaaactgaaattgtatacaactcacatgaagaaaccagcttcataattttttttgtaaaacactcaaagagacttgtattcaaaagttgtcctcaaatcatattcatacaacatctaaagagaaaggaaaggagggttaccagtggactcggatttccatggttttacaaatcaagcttctcggtgtatagacagaggagaaggtggagtcagagcaacatcgcttttaacctcttctttctctctaggtgtctgtacatttgggctatgtgcctctttccaaaacctgctcgggctaggagaactagctccacttatgttcttaggggagctcccgagaccaaaccgaggatcaaacacaccgtcttcacgaggcaaaggtgataccaaattcggagataccatattcttctcttcttttctttggcagaatttgtcttccactatctcataagagtttgcagtcctaacttcttgtgctaaagagcaccaacaacaacataaccagagcgcacaatcagcaatcgcggctctaccgaaacagaaattataactcggtaatttgaatcttttcctcatctgaattctccagaatccaccatagagcaaaccaaacacacaaagaaggattccagatatccctaacgcctccctgaccgtctcattatcgatattaaccgcagctaagttgaatataaagaaaggtgccaaacagaagagaataaacgtagctatgtgaacatacatgttcccaaacccaactctctccatgttccatccaaagacacagaaagtgcagaaaagagaaagataagccaatgaaatatcatcccaaatatccaaaattccaccactccactgaggatcactcaccggaaccatcccatccccaacccccgtggaagcagaggcaaacgaatacctcctctctaaagtaaaccgacgattaacagacccttcttcacgttgcttcagttgattctcctcgtcttcattagaatcattataatctttcccaaagtggacttagtatagtgtacaaacccgcaaccgcaggagctccaatggcagcagagatacatatagcaactccaatgggaggtctctctgatctcctgtatccaacattaagaccacaaagcgcgtactgagcaaaacaattcaagtgaagcaaaatgacaacaaccataatgtgcatccattcattaggcttataagtcccatccttgcaataagctttcctaagcttagtaatatcatcatgcttccatctacaaagaagcactaagtgataaaaccgtttgggatgttgataaagacacatcaaagtaaacaagccattaagaatctgattgttaacttcaaaccaagcatctctctgtgacttcttaggcaaagcatgattcaacataccagtcataaccatgaagagaatagcaccagagactgcaacaacaagtatccaaacgaataaagccatgttaataggattcctaatccattctttccccatattcatcagagaactccaatctattttccggtgaagcacgccactgattctttccctgaaattatgactgcttccgttacttgagctagtcactgaccgtgaaacctcgtctctatcctcagccattttcttgaacttagcagaaggagaaccaaatttgagaagctggaatctactagaagcatcaggtaaagcactaatagaccatctcctaggtttaccatcaccaatcaaagttcttctagatgtagaaacatcaagaggacaaggaggaaccttagtatttttgccagaagaaccattagattcttcaatctctgctttcaaattcccatcacaattagatcccattatctctctctattgaagatcaaatctttgtaggaataaaacagctactcaaaggaatatatgctttgcaagcttaaacattgttggcaaagaatataaaacccagaaaaaagaagaagaaaagattcggacttgccaacgaagcttcttctacttctcagcacattgaaacctaacaaagtattcagatttgaataaacaaagatgaaaaagaaaaggaatcaaacccttagttgagaaactcgttgaatcggaatttaaaaattgcccaagatccgattcagctgcaattacagagaaacccccaagacaagaaagagatgttactcagactaagaatttatctaaaaggaaactttgaagaagcaatatgcgtgtaatgaaaaggtaaggcttctgttgtgaaattgatgcaacataagattggtcgttggggaagaactagtctcggattctttttttctcgtggttgcagttaacttagcgttgatcaggccgccattattgtcccaatacgtttttttttattcatgaaaaggaaaaaaaaaagcattattgtattagtgtactcacaaaaataagatacacaaaacgttttagcatatagtatttatcagattttaattattactactaatttactgacaagctgttacagatgtgtattgttcttactgttttttgggttgtgttttttgataatttatatatacttgattaataaagtcttcacaccttccaagactagctcttagaatgataaaatatcattaagtttataatgatctcgattacaccgagattctcgcacgttaatgacagaatcgaagccatccagtggttaatttagagtttttgtatcaagttttggaatttgatctagggaaaatacattttcttactaccaaccatattcttcttatctatcatagttttttttttttttttgtgttgtatgttaacttgaaagtagatcagctattcagctgtgcgatatcactgagacatagtatgttgtattgttcatgtgatgcgtgtacaacacatagagtgaaatcgatttggatgattaacaatgacaatgttgtcatgagaaagaaattatggtctccttctcagagtttataatcaataataattattattttgtggaaggccaaatacattttggcggatattcgataaaataaaaaaaactttagcatcgacatatatgacattctccagatacaacaagatcacatgggcaagtgcaaatcagcgcatgggtgcttttgcggatgcataacatgtggagaagtcttttatggagaaatgcaaatcaacatattgttttcttcaacttcctataccatgtagttatgagaaagagattcatggtatcattatatctctttctccgagcaatcaataataaatataattttattgttatttaatttttatcgaaggtccaacacattatatatggcgaaattatgatagaaacggaaattttagcaacgacatatacaaccttcaccaactacaacaggatcacatggccaagtgcaatcagcgcatggaaccttttgcggatgcacaacatatggagaagtcttttggttaatcacatgcgacatggcttcatgctccaacgtgtttctaccttccaccacgctaacacttgagaatgttatatctacaccgttaaaactaacttaagtcatgtatgctaatattgttttaaatagtaataagtcttattgattgagttttagattacagaaatgaacaaaatctcagagatataagaaatgcttacgggataggagagctatgaggcaaaagaaagtgagaatgttagagacttacttcatttcctttggaagttctattgagaaagagatatttcaagagtaaatcagtgttgaaattgataacttatcacccttttgatgcaatttatatatgtaagaataattgtattttgtggcaaattagtcattattctgtatatagttttttctaggaatatacatttaataattggagatctttcaagaaattcatgataaaatcttatatggattttttatctaattggtttaaatatttgtatctcaaaatctataacaatagtaaatttatatgtttctatattgatgaaatttaacttgaggaaaagcattgaaatttcaaatatggaagaaaaaacaattgagaaaaaaaaaaaacaatgagaaaaagtttaaatatttatgaccatgttgaactaattatttatgaccacaaaaaatatatattagcccactaatgtaccatgttgaattaatggcctattaaagtttatttcactggcccattaacgttcctatttgtatatacccaacattccaacaaagtccataattcactgatccgaaagtttttactttaagcgttagtatttgtgtcagatgcagacttcctggtgttttcacttcaataaaacgacgtaacgtctcatactaagaacgtaaaacggcatcaatggcgtgatccactggataacaatttcagcttgctctctttcaccttctctctctctcactacgttctcgggctccaaacgtatgaaccagaacaaagccttttagatagttccgtctgcgaaccctaaaatcattcaataaacttcgaacaaaaacgaatgcttttgttcaatcatcttctcagtttctgattccgaagaaaccctaatcaaataaatcatggactgctcatgcagtactcgtccttcgtctctgcttatctcttccgaaccatcttttcgctttcctcactctaatttctcctcgaatctcagctttcaggtttgtattagtatccttagtcttctgctttaagatttgattcgaaatcaatggagaacaattttaaagttctgagattttctattttattttccagataccgaaagatacgaagttggtgaagcagcgtttggtagtgagaagttcctctggttctgattatcaaaacggcgacgttaatgggtttcctctcaaaccaaacaaactctttatgcaagaggtaaatttcttatgttttcctgtgtttttgttgattgagaagaggagattaaatggatttagtgatgattttgttgaattttaggcgattggagctgagtatggagaagggtttgagacttttagacaggatggtcctcttaaagtggatgtggtaagagctactaatgattatgaatcttttattcgtttgtatttgtttttatcagaagctgcttatggaaaccttttattgtagggaatatgtgatttgcttttcgttttgcttgtaaataggatttctggaatgagaaactacaagatggttttcttcaaagaatacgttacgcaatgaaaccagatgaagcctatggacttattttctcttgggacaatgtcgtggtaataattgtttgacaccatctttatgttagcaagttaagttagatgaagtttcttgtagcttatatatattacctacaaaagcttcttcttctagtggggcttataaatattagtgttttcgtttgtttagatgatggctcccctgttattggtaaatctcaaaagttgttggatagaattgcgtggtccatgcatactagttttgggtctattttaggcgctagggcttggcggatttggcaaaagttgtagaataattgcttctttagaatgatgcttgcgtgttagctggtagatctcaagaggtctatagtggaattgcatggtccatgcctattaattttggattcaagagtcgtattttctcaatgttccacttatggtttaaactttgtaggctgatactcgaagtcttaagttggaagcttggaagcagctcgctgcagaagaaggtaagctttattgcgctgctctcctgctcctaaaggttttacccaaatatagtctagtttctttctgcatacgtgtttgtggatagagatatcttgcaatacctgctcatatatgtttagtgcggcccatgcacccttttaaggaatgttgggagagtgtccagagatatcaatgaactcaaacgttacattaccttctttgaggcctcaattgtttgttttacgttttcttttacgtttagatgttaaattagtgtgttttccttgagtttcccacaaactttagtgttttggatgcgcaatcagtatagagttgacttgtttatttatgtaaaggtctgaatatgcgaactgctctattgaaataatcttgtgtgttagctcttttgctggtatgtattaaacttcaaaaaggaattgattttatcttacttatattaaactacccatttctcatattaaattgtttggcaggaaaagaaattacggaggaggttgacatccaaagactgatgctttatgccggcgctgaccatgtgcttcgtaaggtttgagatttatttgttctgttaccatttttctttgatatgaaattttaagcaagcaataacataaatatctattgtgaaattaaacacttgtctcatgatattcttttatatttacgagttagccataacgagctctatgtgtattcttgattcataacataaggaattggatccaattgctggtttccaaaatatttcaggtgttgttttgggagaaaacgcaaagcaaaattgatagattgaaactcaggctatcggaaatatattatgatagtcttctcaaagtaaggtctttctgtatcaatctttgtattaataaaatgcactttgttttggttccctgagttgtgtcgctatcgatatttcagctcacagaaccaaaagaaggacttagagattggcttgacgctgttacaactgctcgcattccctgtgctgttgtctcaaatcttgatcggaaaaacatgatcaatgctcttgaacggatgggacttcaaaagtatttccaggcgagtcatagctctagataatcatcttactttttgcagataaatagatatattttctgatgcttgtattcattctctgtttcaggcagtggtttccgaggaagatggtatggaatcgatagctcacagatttctttctgcggctgtgaaggtaccatttcgattcaaatgcaaatcctagtcagtttctgagaaatgttgctgagaagtcttaaaacttttgcacagttggatagaaaaccgtcgaaatgtgttgtgtttgaggatgatcctaggggtataaccgcggctcacaactgtacaatgatggcagttggattaatcggtgctcatcgggcgtaagtatactcttttaccctctttcaggaaaccataagcatttctggcatctaactttaacaaaaacaaatctgcaggtatgatctggttcaggctgatcttgcagttggaaacttttacgagctatctgtgataaacctcaggagattatttgccaacaaaggctctacatttatggatcacgagaaacagatcatagaaaaatcgccgcccaaaagaaagcttaccattgataccatattctaagcacattggatcgcagcatatagtagttaggttaggttcatgatctcttaagctcttgtctttatggttatacatatgtttgatactagacgcaaaccggatctatcgagtgaaatatgaagcttgttaaagccattttcttgggtttttgtgcaagagcaatgctctaactcgttgcattgtacatttttggctctgtggattgtcctgagaaagcgatgaaaagtggacccaataaaccattcttagagcttcggacaatggcatcaatggtgggctgttcaaacgaatcagatacctttaaagtagaacccataagacaaaactgaaacagtgactgttcaggcaaagtggtgaaactgaaacttacctatttgtgtttcagtaacacctagatttataataggcgtaaaaaaaatggccaattaacatttaagttactaatttttatgtacaatagacactaccatatatatacttctcttcttattttggcttatttacaataatgtagaaattgcatacataaaaatatttgtaggtcgaatttagaagagaataaaagaaagacgttttccttttgggaaatggttaagtggagcaatttggttgttacaagtaaattacaaaaggacttgattcaatttgtttgattgacatgtgccctaaaaattgtactccacagaatcgcataaatcacaaaaacttttataaagtatctctcctctaatttaaattattaatctaatgaatgtatttaaactcatttcgacattttattgggtggggatttatgaaaagataaagaaaagtggggtctcttttatgtttgtcctaatcataatcagaatgttctctgagagacttattctttgttccattgtgcataacttaaacttgtaatgattagattttccaatgtcattagctagctattaggctttcttgtaaactttgcttttaatatattgaaaaaaggttcgaacataactaataatccaatgaaattggttttgcttggctgagcttagttttttttagctaaaaaagataacattttcaaaatgttttgcactaattaaaagcttttgttaaactaattcgaattaggccaccttagttttgtacaaaattgtaaaagcctcgtgtcatggcaactttttgacaagttaacttcgttcctcaccctaaagtgatccactgattagaaacaaatattccatatgataaagaaaattatttgtgaatattagtatccaagtcctcatccgacaatatgaacatttcaatagtgaaaatagattcaatatagtgattttcctaaaacaattaacgaaactaattagcataggctaatgacacgtttctttaaaacaatcaaagtaatatacgatcgcagaataaagaaagagaaaaagagatgcaactaagaaagttaggacataagaatttgatatttgtactcacccaattggatcggagctttaatttatctttcatatgaattaaatgagtgtgattgtaatgcaacttttggacgaatttgtacaaaacaacataacgaaaaagggtccacttctccccagccagctaaatgttgatttggacacagagaggataatgggaaaataaccaaaactgtggtataaattaatgaattaaaatgctgatcatccacattattttcttttaactattagttagtttttttccctttctttgtcatactttatactgatatataaattacttgcatgttgcataaaacataagtagatatgttgttggtagatacaatctaagtaaaacacctaacttcatataaactttagagtttagagttgtgtgtatttagatgaaataagatgaagatgagttatatcttaacgaattactgtgatgaaccttctttcaagcaaaagaaatttgacaagagtttgatccattgtgtttgtttaaaccatatatagaaatacatatacttttcaaagcaaaagagatctttggttaagtcaaataatccaactaacacacaagaggacaaggtgttgcttgtattgcctacacactttagagaaaatggatcaaaagtctacaacagattattttcgaaatcctgaaaagtagtattttcttacagtcgatactcgattcattcaaatattttaaaaataattttgttttagccgtaagctaccgagtacaacgaaccaaattcgaatctaataatatggtgtggccaaaagtcttgagatatagttgcgtgtatcattgcttatttaaaatattcactaaaatactaatgattaacaagtgacaaatgaattttaatgtatttaatgaaaatttagtgggtttttagaaaagaagaaagttgaaacacaagagggagaaaaagtagaggccaacacttagccactaatcactttggtttggccaactccatcattaaaaagttcaaaaacctccactgattaaactttcttaatttccctaaaatccactgcatcttatctttcgtttcaaaattttattcatacacacacttaacttcccatatccactgcatctaatcataggataatatgtgttatttcctacaaattgtgcttgtgcattaatgtacatataattgcatgaaacattagctgcttaacttgtgagtggtcttatgaaagttaattaactgaaacatatatatatatatatatatatatatatatatatatatatatatatatattaaatccactaagctaattgatctagttagtagagaataaacaagtaattgaattaattattttttctcgtttaaaagtttttgttcgataagaggatacgaccaaacaaataaaatgttgtaggaagactttgttgaaaagtcccctaaagtgattgattgagcccaattccattatgctatctttcttttgttcctctctcttacttacaagcttccattttgtcattttctttcatattcttatttcatgtaataccttgatttttgataatatagttgtgtatgtagagcgctatagatataagcaaaaatcaacagtaattctaagatggatgccataccaaggaaataaatctgtgtgttttgacttgtctataataaagaacccaaacgaaagagagggaaattttgaagagaaatataacactatagatgaacattaggaagtgaagattcatatatatgatagtgccttattggttgtcgaaatcatgtggagacgaacaaaaaactgacagcgcaaaaagagtggtcgaacgatactttcccatgaaactttatatttcatatttcttattttatttcgtttatatgattttgtatatataatgcttgtaaaaaacgatactgcttcaacgaaaaataatatgcttcatgatttttgggggaggacccactaagttaagatctatttgttacttatccaaatatccaatagaaaacgaaccgaacgaaaataaatttatatttgtaagttggctacaacaaagtggaaacatgtcgaattgtgttccttttaccgacctaaactctatgttaagtcgtggtggtcggtttattaatgttttgctttggaattttaatctgtaagaagtattcaaaataactttagtgtggcattattttccaatttaccgctaaaaccattacaccaaaataaaactataagccaattagagacaaaatgggtagaaagatataggtaaattatatacatggctttaaattcgactatgaggaatcgacttttagaataatattaacattgacaatcacttacacatatactttttacatatatatatatatatatatatatatatttagtgtcttagtacatcaatgaagaatgattctaatccacaaggaatgatcacacgtcttgctcgctatatgcgagaccttgatggtctcttggttccggattacgatattctgtctttttgataatttttacagccatatcattatttcattaaaaaaattaaattagtgcatgctattaaaagagccataactcgtaagaaaggtattggaaatttaatacttcagctagtacaaaatcgattatctagaaacaccaacctttagttatgtggaggagataaaatcatacaaggtggagccgttggattatgatcgagaaacataaatatgtttgaaacttttactaaaaaaacataaacaaaattgttgtcaagtgggtgaaatgcatttattaattgcaaatttataactcaaaagcaaaatgactgtccaatgagggcatctcctcacgtgaagtcggccaccaccaatctatttccaagaattaattgatactataaatttacaaaccaaaaaagtactatttttaattcttgttttttatttattaaaattgtatattttaactgaaaaatatgaacataaatatatggatggtagaacgactattcaaaatattttataacaaagtctctctatatgcgttgcgataagattccaacttgtgaaggagattataacaaggtcatgaataacacctgatttgggagttgggacatctatgtaaatctcattcatgaatctttctcttcgtttatttcacgatgtagcgacacatactttgtgttcgtttccttttgtcacagtatcatgatcgtgaagtaatttttgcacactttccatgcacacgcgcgcgccatcttcttagttgacatcgtgcggtggttgaaattatgaacatcttctacagatataatcatataaagtcatcttcgattaatcctttatcgtcttcatcatttacattgtagatctaggaaataaacactgcggcctaagagaacaaactgatatcaataagagtaacgttgtaacttgtaagtgagacccaagcaataaatagcatggcactcgtaacaacacacatataaatggatggtccttaaaagatatcttacgtccgaatctacattgttttttctcgttcaaacttatatatcatcttactcatgaacaactttcaaaatttgtaggattaataataccagctacatatcggagcaaaataactacacattattcataaacagatgattgatactctaatctacagttatttttcccttacgtatcaaataccatttattaatgaaatagatcggggaaactatcatttattggcagtactaaaataaattgttatcaagagagtaatatatatatgttctcttatttatgtccacgtgctattgaagaaaatgaatgaattctgtatattttgatcaatgtgacgtgacgtctacttagattatataaagggatattatatcgaagcatacaatgaaaattatttggaaatagtgattaatacagtatgttatcgacttggtggccgctatttgggtttaaaaatccgatagtttccaataatgagttggaaatcttttagtttagtatttcggatttcctgtgatttactaaatgtttagtgtatagtttatgagattttctaataagatacgattaaataaaccaacctactcgatatggtagtcaaaccgatatctttgacttccccaccaacaaattgagtttaaaatgactcaaacgatgatccactttgaaaagaaatgacatctcctacgattcaattttatgatcatatcattacctcaaaaaagtcgttgtaactcgtaatgcctctgaacactcctaatttctccgaaaacatactttcagttttgcaaaagaaaacagcttgcaaaaatatcaaacaacggttagttttgcgaaattatatcctaaaaagaaactcagatcaataatgtgacgtctatctagaatattagattatgaaaaaataacagtttttgataggtcaaaagtcaatcgatcaaatatataatactagatgttagtcaagagtagttgttcacatttgtattttgtaaccaactttgtaacgtgatcttgttggccgcaattgcttgtagttgccacatattcatacacaccataatcataattaaaaaaaaaaacaaatcatgatccatatttattttaattaacatacaaaaaaaaaaaaaactctatgttgattttttttgttaattaatacaaagctgcaatacttaatcatcaaaactatggatatataattatactcttgccttaatagacgtgtgaatacatgggataaaattaccgacaacaaaaaattaaaaacaaattcatggatgattataagaattgtggaacgaattttcaattgtcagagattatattagaaaactgtaacaaataaaaagtgagcaagaatcgtggacacatggttacatgtgagatacttctacctaaagatcccattcctcttaaccagaatcttttcctctttctctaatcatatcaaaagctcccttaaccatctctctatagctgcatatatatatataagcaaaatctgttctcttcactagattacaaaaccagtcaccaaaaaaataaaaacttgtatttttgttttctgtgatctctctaatggagcaacagcaacaacaacaactaccttctactactactagacccaagcccaagctactaaaccggctcaatacctacgtcggttcgagccgggttggcaaacggttcaaactcgccgaacgtaattcaactttcacgacggagctccgtgctggtaccgccactttcttaaccatggcttatatcctcgccgtcaacgcttcaatcctttctgattccggtggtacttgctctgtttccgattgtatccctctatgctcaaacccagcgatcgaaccttcgcagtgtaccggaccgggtctccgattaatccaacccgacgtttcctgtaaattcaacccggttaatcctggttacgccgcatgcgttgaagaaattcgaaaggatctaatcgtcgccaccgtagctgcgtcactaatcggttgtgtaatcatgggattgatggcgaatcttcctctagctttagctccgggaatgggaactaacgcttatttcgcttacaccgtcgttggatttcacggatccggttcaatctcataccggaccgcactcgccgccgttttcatcgaaggactgatatttctcttcatctccgccataggtttcagagcaaaacttgcgaaactcgttcctaaaccggtcagaatcagttcctccgccggaatcggacttttcctcgctttcatcggtttacagaacaatcaaggaatcggtttagtcggttatagtccttcaacactagtcactctcgccgcttgtccagcctcatcacgaatatcgttagctcccgttataacgtcagctaacggaaccgttagtttactcgccggaggatcagtttccggcgatattatgtgtattcacggacgaatggagagtccaacgttctggttaggtatcgtcggattcgtgatcatagcttattgtttggtaaagaacgtgaaaggagcgatgatctacgggatcgtcttcgtaacggccgtttcgtggttccgtaacacagaggtaacggcgtttccgaacacatcggccggagatgcagctcatgattatttcaaaaagatcgttgatgtacacgtcattaaacataccgccggagctttaagcttctccgggataaacaaaggacatttctgggaagctctggtgacattcctctacgttgatattttggatacgacgggaacgctttactccatggctagattcgccggattcgtcgacgagaaaggagatttcgccggacagtatttcgcgtttatgtctgacgcgtctgcgattgtgatcggatcgttgcttggtacatctccggtgactgttttcatcgagtcgtcgacggggataagagaaggagggaggacgggtctaacggcgattacggtggctgtttatttcttgttagcgatgtttttcacaccgttgctagcttcgattcccgcatgggcggttggtccgccgttgatattagtcggagtgatgatgatgaaatcagtcacagagattgattgggaagatatgagagaggcgattccggcatttgtgacaatgattctgatgccgttgacttactccgtcgcgtatggattgatcggagggattgggagctatgtagtgttgcatctatgggattggggagaagaaggtttggtgaaattagggtttttgaaaaggaaagttaaagaagaggataataataatggagttgtcaaagctagtgagattgatactaccgtttaggtttttctttgatttgattttacatttttgttactattgattttttagatttctttcttaggatgaaaggacaagtgattgcattattgatttgttgctcttgtagattttttgaagagaaaagtgtaaaaatgttggggaaaaataaagaaaactgttgaaatttcgagctctattatgctttttgacattgacactagtagaggttaagcacttgaatttgactttcattgaataggaattgaaaggttcattacagaaacaaaaagggaagaccccaaaaggagtcaagagggacacttaccttctcttaagttaatctgaatcaagaaagtaacaaaagaaaaaagcctatggaaactttgtatttgatagaacaaaaatgacttctcggtgatcgccgttatgatttttacgatctagctctcggtttgctctctcaaccgcctgatggtactcctaacagtcacagcactagccgtgttcattgtgtatgcaccgcctgctttcactttcccgcaatctttgcacccccaaatgccaacaactttcctcttaacggagtactgcatcagaaatcaactaaagtcttttcacaaaatgcaaaacagagatttgcaaactgaaaacctcattgaattcaacgacaataagttacttaggagatggtaatgagagtacctttccgcagaactcacagaagtacttgttgtgttgactcacttccatcttcttgatctgcttcctaagactggcaccatatcgtgtacctttgcaaacacacaaacacaaacagattcagattgaggattcaatcattacaatagagacatttcagttctctgttcatgatctgaaactaattcttactagagaaacaaggtttaaggtttcaacctatgaatcaacagaagtctaaagttgcatactttaaactatagcccaggattgatttctgaatactcaccatattttccgacaattctagccttcttcgttctcttggtctgaaatccaaataaaacaaataagttgagaatacaaatcgaagagattcaatgcaggcacacgaaacagaagatgcactcaccattttcgccggctgagggagaaaagcagacaatgtgcaagtcccggcgaagaggaaggatctctctaggctttttactcgtttcgataagtacagggtattaggggaaattagggcatctccatccatgataaactcacaaagtttctaaaaaaaaaaaatattaatattatatttgattatttgattaaaaaagtaattttgttaaaaaattgaaccaatagtaagatgagaattgtcatgactcaagtgagaaactttctacactctctctccttcattttcattatttttatttttttaattgtgagaaactcttatgagatacctcaatagagatggttttagggttttattcaatgggctataataatctatcatttaaagcccattaaataaaaagcccaataacacaatgtcgttttcgtttgtgtgacggacgattattgtaaaacacagatatcaatgttgcatcaggtgaagaacgagagatagagaacgatgagtgtgattggaagcaagagctgtattttctctgtggctagatacacccgagaaaatgagaaatcttcttgcttcacttctatcaacaagaaatcttcgcttgatctgagatttcccagaaatctggcgggagtttcctgcaaattctctggagaaaatccaggaacaaatggggtttctcttagctccaagaacaaaatggaggattacaatacagctatgaagagattgatgagaagcccttatgaatatcatcatgatctaggtatttacaatatctaaaaattgatagctgtgttacatggatttagtgtttcatatggatccaaggttctgtgttgtgatgtttcttatatttttggtctttgttttgttttctcaggtatgaactatacattgataagagatgaacttatagttgggtcacagccacagaaacctgaggacatagatcacttgaagcaggaacagaatgttgcttacatacttaacttgcagcaggataaggacattgagtattggggaatcgatttggattccattgttagaagatgtaaggagcttggaatccgtcacatgagaaggcctgtaaggaacgtttcttgcttttgcaacctgttgaatcatatgaatctgagcatttatcagttggggttttgttgtttacaaatctgttaggctaaagattttgatccactttcgttgagaagccaacttccaaaagctgtttcttctttggaatgggcggtttcagaaggtaaaggaagagtctatgtgcattgctcagccggattgggaagagctccaggggtttccattgcttatatgtattggttctgtgacatgaatgtaagtttaatagtctcactctacttcaatccaagaaagtttcatactttttttgcgttctgattctgtgtttcgaacagcttaacacggcttatgacactttggtatcaaagcgtccatgtgggcctaacaaaggagccatccgtggtgcaacatatgatctggctaagaatgatccctggaaagagccctttgagagtctccctgagaacgcattcgaggacattgcagattgggaaaggaagttgattcaagaacgtgttcgggccctccgtggaacctgaaaatcagtaattctgagaatatgtataatttcgaataaaatgtagacttctgtatattttaaagctacggattacaaaacctcttctgcgaattaatcgaccttgttgtcaggaactctgtggttcttcttgtctagttctacaaagatgaagtctatataatttatacatacacttagatgtatttactgttaaagtgatggcacgacttagcagcgacacttttggccattttcttacacgacatttgactttggttttcatcagaattggtgatcggctattgggaggtttttcataagaaaagcacttagctcatgttaatgctccaatattcttgggctatggtcaatgtgttttcgacccaacaaccccataaaagcttagagaaactatcaagactatacgctttgctttctcgttaccctactttaggcttaaacaagaagaaaatatgactgctaagtcatatttttcaactctcatgagcaaccgtaaagttgcaccgcaatatccaacaaatgacattcgtgttatctacaatctaatgttgaaaatttggctcatctaataaaggagacaaaagttatatctctttcacacacacgttaatggaagtgtaaaggcggtgagagtgtgggagagacttggggaacaagaagaaggacgcggtcaaaaagtgacggtgggctacggcttttcttggtagcagttggaaattccattaatgacttaaaaagtgtaaatcttatcttctttttattttgtgatttgatatgcacattcatttcatgaaaatatttgtatagtttgatgatcatacgacaaacttatagggttcacaaagtagatgcaatagttgcatacctctgtttaaatgttcttgttaatattatacttgatgatgaaactcgtgaatgttattcaaaatgtccatgtaatacaagatcatgcactataataagtaatctatcaatttcagcacaacaattttgacaaaaagtaaaaataaaataaaataaactgatatcatatttccgaattatatgtaaacgttttctgtttctcaatggtctctttcactcttgtgttttctaatatttcatttaaacctatttctaaactaagcacatctttgttgattgattgcatttcaaccaaaatcgataaccgaatcattgtttttttatgttttatttcagcttaccacacacgtttagaattttaaaaataaaacaaaaaaaagttaactcgttacaaatgaaaatgatatttttaattggactcgatggaaaggaccaatttattcaacactattgtttagtccgaacacttgccgcgtaagttttccaactccccccattgacctttcgcactttcacaaactccgtatatatataatggatacactctctctttgatcttcacccacttcatcattttacaaaccaagcaagactaatccaacaaaaaaatagtccacaaaaagatttttacagatggcgattaacagatctttacttttgattcttcttttcatctctgtttctctatcgacggcgaggatcttacccggagagtttgttccagtcatcttctccggagagatccctcctgtttctaagtcggcggtggttggttgcggaggcgagcaggagaccaagacggaatattcttcttttgttcctgaagttgtcgccggaaagttcgggtccttggtgttgaatgctcttccgaaagggagtcgtccggggtctggacccagcaagaaaactaacgacgtcaagacttagcactattctttctagagttttctgtcctaattcttacttctttctttttttgttctttagagattctttgatttttcgttttcaaatagagattattgtaaatgttacatgtattacagaaatttacagtagaagtttaggaaaaatgaggattttatttggtaatgtaagtcgaaatgatcaagacttagactatcatcttgtatcgtttcatcaatatttctttgataaacgttaatcagctttttaatttctatgattatgtatcaattttatttagactaagaaagtcttttaagttaaacgcataaaagagtcaaggataccatttgaattgacattgtattagtgtttgggtaacttccaagaaagagataaaattaaaagataagaatggggccaaggcgtaaagaatcaaaagttaggcgaaatatgtataaattgaattgaacgcgttttttatgagacttgactatgatccattttccacaacgcagacacaaagataatgcatttttattacacaagtgtgtatgcattatttcacaaatttcattaatcccaaatttcttcgttataatattcctgtcatatatgtgtcgagtagtgaaaaacgagaaaattagttattgttttattgaaatgaggtaattattataccaataagattccgttttgttttcttcgtagaataaacaatagcgctttctgacaataatagcaaatttttattcttgaaaactttcattgtaaaacaacgtaccacacagctgagttgagcaaatcttaaaaaccaaagagacactgtaagtttgtttcagacaaccttaaaacaaaagctgagctggaactggttcatctccttatgtcatcgtgtaaacgattcagttgttttccttctcataaacctcgcttgcatatttccagttgatcactttccatacattcttcagatactcaggcctcacatttttgtactgaatgagagaatacagattgattagagagcttaatcttttaagctaactcatgagacttaaggtatcaaaagtgttgttacctgcaagtagtaggcgtgctcccaaacatctatacccaccagaggtaccaagcttcctccttttgtcactaatggatcctgcaccaaccgaaacaaactctttttctttaaaacccattattctcacagatgttcatgagtaccaagaaatcttttgaacatattcaatagcgcattcctgatcatggataagttacctgattggcagttgtgtcaacaactagcttcttcagttctttgtctagtccgagccactgaattaatcaacagaaacaagcgaatcaaggaccatggttattatacgtaaagcaccagagtcgacaatgtgagcagatgaaataaaaaggtgaaactagactacagaccacccatcctgagccttgcactgcagcaccctcagcactcatctttttcaccagaccttcaagggagccaaagtgagcgtcaatggcactaccaagagatccttttggtggctctccaccaccttcctgttatacattaaaacaaaccatcaattacagaacaacaaaatcgaagaaatacacagaaactcaaaacacaagctcacactggaaggagcaaggttcttccagaaaatcgaatggttgacatgacctgcacgttagaaataaagtcgatcaattcccattctctagcacacaaaaaactcaatttatttccaatagtttctctgccaatttctcttctatcaatccaaccggtccggagctcaagaagcaacaatcctaataccaaactatagtcatcaaaattaatcaacagcttcaatgttcctaacaaaagttctatactaaatcaactggttatgatctcaagacccagcaaacaaaagtagctatctaagaaagcttgcattaccgataaaagtttcattgattcttacagaagtttcatcccaattcatcaaaattactcatcagcttcactgttcaaaccaaatttctctcctaaatcaactacttcatttgctaatatcatccaaacacgatctaaacacaaaccaatcgatcaaacacatagaaatcgagatcgtaaaaaaaaaaaaaaaagagagtcagacacacaaacacacctccgccgttgaatttgatggcgctctgcaacttaacaacagtggaagcatctcccttgttcacagcttgatcaagctgctcaagagcattattgtaattagtaacataagcctggtgatgcttctggtgatgaatctgcatgatctctccactaatggccggttccaatgcgccataatcgtaaggaagatcaggaagcgtaaaagtctgaatccctctgatcctcaatagcctcgatgatgtctccttcaagccggctagggtttttctactcgctacacaacgaatcgccattgttggaatgaagatttgtttctccttctagtggtcgccaaaaatgaacatgtgtataagtggagggttatgataatatcactgcctgtcatgtatagagaaaagtgactgttttgacacgtagacatgtgatttttatttatgggccgtaatattggattagtgagcccaaggccttaatataataaagcgtaatttttaatattttgtgacggctaaatgttacttttttgtttgttcacaggaaaaaaataaagaaatgaagaaagttgactagaaacggagaatttccaaatgttgaatttgttggatgcatgtgaaagccaattctatttggttcctccttgataatccacccaatcgctgtcattctcccatcaatctagctgctttcacaaaccattgtactgagatcgtatctttaaggtaaatttcaaatcggagtcggcgagatcgaaataggaacctggaagtcggagaatttgtgtaaattcggttttttttttttaattctccgatggatagtttaagtgatatcgatggtgatttcgatggaagaaatgaaggaggatcgtcatcggattatcgattgttgggtcggcagattacggttcatcagttcatgggtggtggcaaaggcgagttcttttttccagaatttgtgttttttcatcattttggtagtttgtgatgagaattttctcggatttacagaacagaaaattcaaattggggatgatagttggaatagttagggtttctgattttggttggttgtgaaaatcgtcatgtgtgtaagtacatttagcattttgggtatagtagaaaatggaaaacttggcaggtgaaagttaggtttaggtttgattttgaatgagaaattgattgattcaaatctctggatacgcatgatgagttcataggtccagcaaaaagctactgtttgtgatttttgtatggctttgttctttgatgtagctgctgacttgctcttatggaggaggcgacatctttctttgggggttatcattatatcaactgtagcctggcttatattcgagttttccgggttgcctttcttatctgtttcttcggatgtcttactcatcgtgatcatgatatcattcgttcatgcccgggtttctgcttttaggaataggtgcgctctacttttcactagtcttctttttcttaattctttgctgttatgtgactgattagtgatgatttctacctgttatctctttataagcagacagttgcattcgttgccagagcttgttctatcagaggaaatggtgaatagtgctgcagcttctttccgtataaaactcaatcacttgcttgtaatggctcatgatgtcacagttggcaacgattttcgactcttcttcaaggttatgaagctaacccattcagaaactcacgatgatgttgagtgaaatgacatgggaaccgttaagcatctgaactgttggtctgacgatttttctttagcaggtggtgatttgtctgtggcttctctctgccattggtagctatatatctctctgcactcttctttacatcggttagtaacttgatccttaaatgcaaatgaaaggaaaaagcttctatgttttttgatccttcagtttcatcccccacgttggcttgttgatctcgttttagttcctgcgacattgttgttttaaactcagtgaaccaaattcttatatgaagtttatactttttatggtgtgaacagggaccatcctatctgtaacaataccggctttgtacagtaaatatcaaagcaaagtagacaagtgttgcgggacgattcacaggcggttgtctcaccactacaaaatagtagacgaaaatgttataagcagactctcatggagcttatccaaggataaagattcatgagcttaactttggtgattctgagaatgcttttacttgtttttgtttagcttttcttgttattcaccatttgtagtataactaaacgccatatccagaatgaatataagatggtttctttgttcaactaaattaactcttgccttcgtctgaagcttaacaccactggaggaaaaaatacaaaaaaagtttaacaccgctgttcgttaaacgacgtcgtggcgcagaacaatactcacatttcagatggatttgactagcccaactttaatgcccatatgctgagaatgttaggtcacgtgttcacgtcacagaagaacctcacttacacaatttaatcggacttgctacaaatatgacgtcaggaaaagaaaaacagtgctacaacaagtctacaagtaatgactatactacatgattgagtaggtgtagtcacttgtgttgttatagtattatacatggtcatatcaatgaagatgatcaaactctattacgtattcctacgaattccattttaatttatcatgttttctttcaacgactatcatttcattacataaaatgaaattctatgatgatatagtattccatctccatgtccacctactatattttatattaattaaatgaattttacttgtatcacactctttcgtggtggtatatatgtttatctttcacaactcatacagtactcatttgcttgtatatataaatcctatcatgtattgatctttttatgtcttcaactttttatatatatcctatcatttttatgtctagtataacctaaaatggccatcatctaaatttaaataattattctttattctaacaacttgatcaattagacatagatgtacatgttatctgtactgatgtacatatacgaattaaatacgagtaccttaaattttctgactatatgagacccatagcaacttctaaccaagcatttgaatctgataaatagacatagtaaatacacaaaatagactcgtgtatggggtttgatggatctctaacgttggagtgttgttatcaactaatggaacttattgaagctaagagagacaagtgttgtgacctttgcgtgaactcgtaattctatttaattttatttgtatttctacattaactagtgtgtttgaattggacttcttatacttgtggttgtggacccgtaagtgccacatgattttgtttggaccatttgattcgtaaaccaactacatatatacattattttttcatcatcagaatcttcgaattc

SEQ ID NO: 406 - DNA, 117296 bp, Arabidopsis thaliana
gaattcccagttccactcttctgtattggaccctttcacaggtacgtttcagcttcatccagtagcttacttgcacacgacatgacttgtctctcctggttagacaagcaagcaacaaattccgtaatctacgcaagtcttggaagcattgcttcgatcgatgaatctgaattcttggagattgcttggggtctaagaaacagcaaccaaccttttctatgggtggttagacccggtttaatccacgggaaagaatggatcgagattctgcctaaagggttcatcgaaaatctcgagggccggggtaaaatagtgaaatgggcacctcagcctgaagttttagctcaccgtgcaacaggcggattcttaacacattgtggatggaactcaacacttgagggcatatgtgaagctataccaatgatatgcagaccatcttttggggaccagagggtgaatgctagatacattaacgatgtttggaagatcggattgcatttggaaaacaaggtagagagactagtgatcgaaaacgcggttagaacactaatgacgagctcggaaggggaagagatccgcaagaggattatgcccatgaaggaaactgttgaacaatgccttaagcttggaggttcatcatttcggaatctcgaaaacttaattgcttatatattgtctttctaatgcggtgttcttcttcttctccacatccaaatttgctttcctttgatttaatctgcattcccataatcagacacattttatcattcaaaaactttaccatgtatatttgaattatcagtgatgatgaatttgtttcaacttgaggttttatttgcccaactaaaatctattgggccataatgtcgagaagcttaattacccacatattaaacccaattaacgtcgtaatcttatgatcctaccaaatttaaaatggccattaatatagggttcattaatatagcttatctgtatatataaatcgataaaattgaaaaagttaagcaaaaccctaagtttgctaagatgagcatgacgcttagtcttcagcgacacgcaaagagaatcctcgcttacagtaacaggcctcgattcttctgctcctacagaaacggaacgctatcgacgaaccaaactctgcatggtcgaatcgaagctgctttagatcagaaagcagaaatcacagcggtgcttgagcaatagcgacatcaacaaggttatcgattgaacccttcgttggtgagaggagtcttcgtgaagctctgcacttcccagcgacttcaccaagccctagaggtatcagactggatgattgaacataagatctgctgtctcgtccctgaagatttctcagctcgatttcaattgattgaaaacgttttaggtttggaagaagcagagaagtacttcgagagcatcccggagaatctgagaggtgaatctctctacactgctctgttaagaagttacgccaaacgatcggaaaaaaaatatcttgatagagcgagccgaattcatattcaagaagatgagagaattaggtttgctcgggagactgtcaccgtacagttcgatgatttcactctacagctctttcggaacccgagataaggtcgacgagagtctgcgagagatgaaggagagcaacattgatctcgatcgtctcaccgtgaacaaagctttgcgagtgtacgctgctgcatctgatgtggcagcaatggagaggtttctggctgattgggaaggaactgtgaagcttgagtgggtcacaatgcttgacttggcaaaggcttatctgaataatggttctaagggaaaggcgagagagatgcttcgttgaacagaggaattgaatgatccaaagtcctatgaaggactcataaggctttatggtgaagcaggggagagggatgatgtgtaccgtatatgggacttgtacaagagcacaaaagagaaggacaatgaagggtttcacgctttgattggttctctcttgaagcttgatgatatcaacggagcagaggagatatactaatgagtggcagtgctcgcgtcttgagttcgatgttcgaatgccaattatgttagtgtctgcttatcgtgaaaaaggaatggtggagaaggcagagaaactgatgaccagatggggactaaaatatcggttagatcagtgactccggtgttggaagaatgggagaaaaagggtaatgaagtgaagccagtggatgcccaaagcacttgaggcatcaacatggatgtgtgaaaaaaggtgtttaatatatttgcacaagattatgcagcaaggcttgtattggagataaggccatgaagcttgtattggagatgaaggagaacaaaattgagcctgatagtgtcacgataaacaacgttttgagagtaaacgcttatggattagcgctagagtcgatggagaagtttaagagtaaatgggatggtgatggaaaaaccaagcttgatgcaatggcagctgcttacgagagagccgggctactactaaaggcgatagagatacaaaggagtaaaaaagaagtgtaccgtctatggaatgagtacaagaataaggcaaatgatgggattgcaagagaatagagatgtgattacctctttttggaatgaaggatatcaaagtgtgattagctctttgttgaagcttgacgatgtacaaggagcagaagctatatggagaatactgggatcaatcaaaaggattagagttggtggatgctcgaataccgggtttgctaatctctcgttattgcgagaaaggtgatgaaatgaagatgagggaagtgattgatgttgagagtacttttgctcttgcattattacactagaagccattgcttcaaatacagagcatgcatggtagagaaaacagagaatgaaaaagtggaaaatttcttgttactgcttcaatcacttaagaattttatgccatctttgttttctttttttttttgtttattgggtttagaattgttttttaagggaaatttgtgtttttattctatttgattggaaacagagttatttctataaacaggtttattttacatttaatattgtgttgcatgtttgcatttccattttatatgggatatgctaagataatgtttcattttattctgcatatttcgtttaaagtaacttttcagaaattttacagctctgttatttaaattctagatataagatggatctaaatatagaatgtttctttgaatgtgcacacagccagcctggaaacaggtattagaataaaatttaatgaagtaaacgggagtataaaatagttgtacatattcctctgttataacctgtatcttaatccatcagtatatgatattttttgaatgtgcaacgtgcacagggtggaaacagctcttgggaacaaatttattacacaagtaaacgatgaccaagtttaaatattgtatattttggtcattcttaataatataaacagcaagttggtcatttgtgtattaggagaaatgggatgcttgctaattaattaatattaactcccttatttgcttgcatatttactcaactccgagagaagtgggagagaagaaactatcaagaacacacattgatcataaccaaagcagccaaaaaatggatggaggtaacccaagatgtccgttatctcatccaactaaccctcacaccctctctaaatccggccaaatcaccaagtttggttgttttacatgcggtaaaaaagcaccgctcagcaaaagagaccgtcgcttctcttactactgcatcacctgtgatgtgagtttccacaaaggatgtcacatttttccgaggaagttaacacatccttatcaccttcagcaccctcttactttcacctttccggattatgaaagcgggatcacatccgacagcttcgattatgaaacctatcgcactgcagtaaagtgtcactctcaattcatcatcacatatagtcttaagaagcctggatctatagaatgctcatggtgcggcaaaaatatcgaagacgattgtttctatcgttgttctatatgtaacttctatttggatctctcttgctcccaaagtattccacttctcctcgttgcaaacccaaagagtcatcagcatccactcgtgttctacaggcgaccactcttgactccatgtgatgcgtgtgggttagtcaatgtgttggatccaagctatgcttgttttcaatgtaattatatggtccatcaaagttgcatagacttacctcgagtcataaagatcacgcgtcatcggcatcgtctttctcacattccttgcgtccaatctccggtttcaccatgtggggtatgctatcagaaagttgaaaacaagtacggcctatattcttgcaaccgctacgaagatcactcttatgtagtgcattcgaaatgtgccacgcatgaaaatatatgggacgggaaagaactcgaatgggaacctgaggaacccgaaaacattgaagatatcctcccatttaagaaggttggtactgatatgataaagtatttctcgcatgaacataatctgaagctcgagaagtatgatgctgttcgtgatgcagagaagctatgtcaagcatgcgtctgtcctatcaactctcgtgatttctacaattgcatccactgtgatttttttctccacgaggtatgtgctggtcttcttcgaaaattggatcatgcgttgcacaaacacactcttatcctagacccatatcctcgagacagttattatctcttggactgtcccatttgttccagaggatccactggtttcaggtacatatgttccataagtaattgtaattcccatcgaattggcatagatattcgatgtattttagttccagatcatttcactcacgagagtcatgaacatcctctatttatctccacatccttcaaagcagaaattcgttgccagggttgtcagaaggagtgcatgcagtcttacctgcagtgtactatatgcatatttatcatgtgttataaatgcgctacaattccaacggaagttagctacaaacacgacaagcatcctctttctctatgctatggagagaaagcagatgatacgtactggtgtgaactatgtgagaaagaggttaatccaaggaattggttctacacatgcaacatatgttgtatcactatccaccttcattgcatcttcggatcttctagttatatgaagcctggttccatatttgattacaactattccaaattggaagttcttcgcaacagtaacagcactcgaccgcaatgcacccgatgtggtgatcgttgtccaggttacatctacttcaaacgcaaacgcgataaacaccctgtaacgttttcctgttctgtgcaatgtttagagggaggatgatggtgttgtagacataatgaactttctttgtgtttattaaagttgtttgtttatatctttgtgtgtgtgtgtctttttttcaaagaaatccggaaacttgtatcgccaccacttctaaagaatgaaatatctttgtatttgatgatttatccatcccttttttcattcgatataatttcttaagcccaaaaaagtgaacagcttgacaacgtataaagaaaaacgaacagcctgactcacataaacaaaccatcttctctaacgtaagagcgtcttaagaaaaccgagacaccgcatgcacacatatacttaccctacttagctctttgttgaaacttgacgatgtacaaggagcagaagctatatatggagagtacttggatcaatcagaaggagtagagttggatgctgaaatgccgggtttgctaatctctcgttattgcgagaaaggtgatgaaatgaagatgagggaagtgatgaattcaagtagggagaagctcaagcagatggagaccaccaagattcagcgttggcgccttggctcgtgctctgtatgagtgtatggcttaattcttgttactgcttcaatcacttaataatttatttattttggtttattggggttggaattttttttagggggtatttttgttttaattcttacagtagttcttagttttaaaagcttacttaggagaagacactcatgcagagcacgtttatctccgatcaaaccagggttggacttgcataaatgttttcatatataacacaccaaaattttatgatatatcattgcatattatatttatgataaaaatcaacattatattatactacttttatgtaccactctcatataatagtataaaataatatgatatttaataataaataaaaattacaactaaatatttgttttttccggcattacagctaaatatatttaaatttttcaaagtataattaatttgaaaattttctatacaagaatttcatttttaattagggctaaacccttaccagaggtagcccatataaatcggaatgggtgaatgcaaacttaagccgattatctttatttttttttattttttttatttttttctcaatgctggaggatttaatatcatcatataaaacattcttttagaaagaaaaaaaaaatcatcagaaggtttaactatcatcatcggacatgagcatgaggcataatcttcagcgacacgcaaagcgaatcctcgcttacagtaacaggcctcgatttttctgctcctacaccaacgtaacactatcgtctccggcgacgaaccaaactctgcagagtcggatcgaagcggcttcacatcagaaagcagaaatcacaacggtgcttgagcaatggctacagcaacaacaacaacaggggaagcagttaaacccttcgttattaagaggaatcgtcgagaagctcagaagttctaaccgacctcgccaagccctagaggtatcagactggatggtcgaacaaaagatgtacaatctcccggaagacttctcagctagatttcatctgactgagaaggttttaaatttggaagaagcagagaagttctttgagagcatcccggagaatatgagattcgagtcaatgtacaattctctattaagaagttacgcaagacaatccggagaaaaagctctgaagaaagccgaatctgttttcaagaagatgaagaagctagggttgctcttgagaccttcaccgtacaactcgatgacatcactctatagctctctcggaaacagagataaagtcgatgagattcttcgagagatgaaggagaacaacgttgagctcgataatgtcaccgtgaacaacgctttgcgagtatacgctgctgtatctgatgtagcgacaatggacaagtttctagctgataggaaagagattacaaggcttgatgggctcacaatgcttgcgatggcaaaggcttatgtgagagacggttctaaacaaaaggctaggaggatgcttcatgaaacagaggaatgattgggtcatgactataaggaactcatgagcctatatggtgaagcaggagagatagaagatgttcaccgtgtatgggacaagtacaaggcgacaagacagaaggataatgaagaatttcgaactttgattggttctctcttgaagcttggtgataccaaaggagcagagaagatatactacaatgagtgggagtgctccggtcttgagtttgataaccgaatccccgatatgttggtgtcgggttatcgcgaaaagggaatggtgatgaaggcagataaactggtgaacaagactttgtggatcagaggattggctacaccaatcactctgttgctggaagaaatggataaaaaggggaataaagtgagtccgccgggcttgagagacctcatcaagaatctacgtgattcaaatcagttgtccaaagcacttgaggcatcaacatggatgtgtcaaaaaaaggtgtttaatctcttttcagaagattatgcaacaaggcttcatctgactgagaaagtgttgggtttggaggaagcagagaactttttcgaaagcagcatcccggagaatatgaaagattactctgtctacgatacactcttaagctgttatgcaagatctagcaacactcaaagtaaagctgaagccgttttcgagaagatgagagagctaggtttacaatccaaactttccccattcaactcgttgatatctctctacagtgggcaagggaaactaagtgtggtcaatatacttctatgtgatatgaagcataagaatatagagcctgatattgtcacgaggaacaacgttttgagagcaaacgcatacatattggccatagactcgatggagaaagtataagagagagtgggatggttttgagagcaaacgcatacatacgtgatcatggtgattataacgtgatatcgtcatctagaatgtcgtttttgttaaccgtactgtcattcctagttctctagatctaccactttgttgatatgctggtattggaacgataccgcatgttctcgaaaatgtgcaacatcgttgaccacttaactcagtcttataattattgtatatgttccattttaataagaggatgttaagataatatttcaatttatttaacatatttctttttaagtaattttactgaaaaaaattaatgctctgttattttaaattcttcatataagatggatctaaatcttgtatatttctttgaatgtgcacagcctggaaacaggtcttgagaacaaaaaagtaatgagcatttattaaaagtaagcgaaagtataaaatagtgttacagaaatgttattactctgttattttaatcctagaactaatcttgatcttaatcttaatcttagtattttattttataatgtgcattactgcattgcacagcgtggaaacaggtcttgcgaataaagttaatgataattctatctattacaaaagtaaacgatgaccgaaatatgaaatcgtattttctggtcattcttaattataaaaacagcaagttggtcattgtctactaggacatatgtgaatgtttgtttattaatatgaacactgccatttactctactccacgataagtggaaataaattagcagaaacatacatcgatcataaccaaaggatcaaaagatgccgaaaaaagaagtacctccacttcctccacttattggatttggacgataccgtaaccggtacggcaaaaagatggacaaagaagaagaagaggaagaagacgttgctccacctcagccacctcttggatataaaggatgccgtaaccaatgcagcgcaaagatgaacaaggaaaaagtatccccacctcctacacctcttggattcagacgacaccataaccaaaacagcgcaaagaaggaccaagaagaagtgtctcaagttcctctgcctcttgaatgtagacgatatcataaccaaaccggcaacaagatggacaaagaaaaagtaccttctccacctccttcagctcgtagattcaaacgatctcgtaaccaaagaagcaaaaatatggacaaagaagtaccttcaactactccagctccccgtccccgtagattcaaacgacatcaaaaccaaaacggcaaagaaatggacaaaaaaatagtacttctagcttctcaccattttcctaccgaaaacccaagatgtcctgtgtctcatccagctcaacctcacagcctctctcctagattcggtggaaacaccaagtttggctgtttttcttgcggtgaaaatacatctcccatgactgaagaccagatctaccatttctcctgcaccacttgcgatgtggagttccacagtggtcattgtttacggtttccgaggaagttgacgcatccttatcacctccaacatcctcttacgttcaccttccggaacgatgaaaccgggatcacatctgatggcattatagatgaatctttttgcactacagttttctctgactccaacacgtctgatcctaagaagttaggatctaccgaatctgatcattgcacatggtgtggaaaaagtatacaaggaagttggtcctaccgttgttctatatgcaacttttgtttggatctatcttgctctcaaaacattccacttctcctcgtcccgaacccaaagagtcatcagcatccactcgtcttctaccggcgaccactcttgactccatgtgatgcttgtgggttgatcaatatgttggatccaagctatgcttgttttcaatgtaattacatggtccatcaaagttgcatcaacttaccacgagtcataaagatcacgcgtcaccagcatcgtctttttcacacaccttgcctccaatctaagatttcactatgtcgggtatgctatcaaaaagttgacaccaactacggccaatattcttgctaccacgaggtttgctcttatgtagtgcattcgaaatgtgcaacgaatgagaacgtatgggatgcgaaagaactcgaatgggaatccgaggaatccgaggaaattgaagatatactcccattgaagaaggttggttgtggtcaaataaagcacttctctcataaacatcctctaaagctcaagaagtacaatggtgttagagatgcagagaagcaatgtcaagcatgcatccttcctatcaactctagtgatttctacaattgcagacactgtgacttttttctccacgaggtatgtgctggtcttcttcgaaaactgagtcatgcgttacacaaacaccctcttatcctaatcacctctcctcgaaaccactatgatctcatcgattgttcagcttgttccagaaagtccactggtttcaggtacatatgtccggaaaaaaagtgtgtgtccaaacaagttcagatagatgttcgatgtatctcatcagttcccgaatatttcacccataaaagtcataaacatcctctatttatctccacgtcctccaaaggtgaaaacaagacttattgcgtgggttgcaagaagataggtatgcggtcttacctacaatgtaccatatgcaaatttgctctgtgttatcaatgcgctacaattccaacggaagtaagctacaaatacgacaagcaccctctttctctatgctatggagaaaaggcagatgagacgtactggtgtgaactatgtgagaaaaaggttaatccaagggattggttctacacatgcaacgaatgttgtatcactatccaccttcattgcttatttggatcttcttcttatatgaagcctggttttagattcaagtattactcgtccaaagtggaagttcgtcgcaacagtgtcactcgaccgaattgcgttgaatgtggtcatcgttgtccaggttacatctactacaaaaacgataactctgtaacggttacttgttctttgcattgtttcgagaaaaagttgataccgctgcaaacatggtgaactttccttgctattttgttttttcattttttcttgagggacttgtaacgtgacttacttctaattctaaagaataaaatcctaatgaattcgatgagttttcatctctggttcttatacgatcttcatgtaattccatttgttacaataactacaagctacatatttatagatgtcaaacaaaacaaaagggtcacaacttttgttgaaccaaaacttaactgaactttgtcttttggtgcgagaacttttttgtttcttcttttgacgtacataatagcgaatcgtcactgcaactccattttcttaaaaacaaatcaagtagcatctatattaaccaatgaaaaaagaatgttgaaatttaaaataacaacgtaagttattcaacaatttttatcggatgtctcaaaataacaataacagtgacgagtcacataataaatgatttatcaccacgatgaaatataaggttacactgttattaaaaattctggatagaagatggatccaaaatttgtatatttctttgaatgtgaacagcctggctacagcctacacaggtcgtgggataaaaattcaatgagcatttattaaaagtaaacgaaaatataaaatagttgtgcagaaattttattggtctattattcaaaatccttgaactaaccttgatctaaaatcttagtatatcttatttatgatattgcactgcctggaaacaggtcttgggaataaaattagttattacaagtaaacattgaccgagtataaaatcgtatgtcttggtcattattaattaatgataaaaacagcaaactggccattgtctattaggaaatatggggattcttgtttattaatattattaactcccatttactaaactccgcgagaagtgggagagaaggatttaggagaaacatacattgatcataactaaaacagcaaaaagatggaaaaagaagaagtatctctacctcttggatacaatcaccaaagcagcagaaagatggacaaagaagaagtatctccacttcctccgcctcttcctcctcttggatttggacgatatcaaaccagaaaccacaaaaagatggacaaagaagaagtatctccacctcctccgcctcttccgctttttggatatggacgatatcaaaccagaaaccacaaaaagatggacaaagaaaaagttcctccacctccttcacctcatccacctcttcactcccttccatcaagcaaacctgaagtaaaacctcaccctcgtcctacaggaaacccaatatgtcctgtgtctcatccaagtcaacctcacaccctctctcttagatctggcagaaacaccaagtttgattgtttttcatgccgtaaacatatgtctcccttgacttaccataattaccattactactgcaagacgtgcgatatggagtttcaccatggttgtcacacgtttccaaggaagttaacacatccttatcacctccaacaccctcttactttcaccttcaggaacaatgaaaccggattcctatctgatggcaatatagatgtatccttttccactacactttcgtcctactccaacctgcctggatccaacaaatctgatcataacaagtttgaatctacggaatctgatcaatgcacatggtgtggaaaatatatccaaggcaattggttttatcattgtcctatatgcaacttttgtttggatctctcttgctcccaacaaagtgttccacttctcctcgtcgcgaaaccaaagagtcatcaccatccactcgtcttctacacgcgaccactcttgactccatgtgatgcgtgtgggttggtcaatgtgttggagccaagctatgcttgttttcagtgtaattacatggtgcatcaaagctgcatcgacttaccacgagtcataaagatcacgcgtcacgagcatcgtcttcatcatactccttacctccgttccacaatttcaccatgccggatctgctaccaaccagttgacatcaagtacggccaatattattgcaaccgcgagaattgctcttatgtagttcattcaaaatgtgcaacacatgagaacatatgggacaggaaagaactcgaatgggaacccgaagaatctgacgaaattgaagatatcatgccatttaagaagttcggtagtgatatgataaagcatttctctcatgaccatcttctaaagctcgagacatatgatggtgctcgagatgcagagaagcaatgtcaagcatgcatccttccgatcaactctcatgatttctacaattgcatggaatgtgattttttcctccatgaggtatgtgcttgtcttcttcgaaagctgaaccatgcgttacacaaacacactcttatcttagatacctctcctcaaaaccactatgatctcatcaattgttcagtttgttccagaaagtccactggtttcatgtacagatgttccgaaactgattgtagattattaaaagatcaagttcttcagatagatgttcgatgtattttagttcttgattatttcacccatgaaagtcatgaacatcctctattcatctgcacatcctccaaaggtgaaaacaagatttgttgcgagggttgcaaggagatttgccagcagccttacctacagtgtacaaggtgcaaatttgctatgtgttatcaatgcactaccgttccaactgaagtatgctacaaatacgacaagcatcctctctctctttgctatggagaacaagcagatgatatgtattggtgtgaaatatgtgagaaagaggttaatccagcggactggttctacacatgcaacatatgttgtatcactatccaccttcattgcatattcggaaattctgtttatatgaagcctggtttaacatttgaatatggcttcactagtaaagtggaagttcttcgcaatagtaacagcactcgaccgctttgcgttagatgtggtaatcattgtccaggttacagctattattgccatataggcagctacggtcaatggacacttaaaagtgttacttgttcgttgaaatgtttggagccttatttgtattaattttgtacagataaaaccgttcgataaaacggttacatgatgaactttctttgtttttttgaatttgcattgttgttttttccgggacttgtatcattaccacttctaaagaataaaatctcttctaattcgacgattttctccacctttgcttctctatacgatttaattccgtttggtaaaataactacaaggtatcatctattaaattaaaatcgccacacttatgtgtttgataagtgaaactaagaggttgccaagtttttccgtaggtattactaaataaatctcttaaaaaatatattaaaaaaataataataaagaaatctcattctcattaattcaacaaagattacaatcatacgattatgtacaaaagactaggagtaaaccaaagtaaacaactgaagctagtagatcttgaacggcacggtgtgatactgtgatacaattatacaagaaaccaacgatacataagtcagttgcctttaactcctccatttatctcaaagtatagaagttaccaaatggtctgggtggtgtagtcggttatcagtcttatcacgtccgaaaaacaattgtgtccaagcaagttagatagatgttcgttgtatttttcttttctttttcttgaggttttaccatgacttttactaaacaataaaatctctttaatttccatgatttttttaaggaaagagagagtttttacacatcaggttttatgccagccacacgatcttaagcaatcaacggtcacttataaaatctcatattatatcacaaccatcatatataaactaaattttttaatctaacggtccatgtaactttagttaccattcctgcttttggtttgtcattggcaagttaaaagtgaattgtgctaaaataggtgaaaacttggtaaaaagtgagtttacttataaaaaaatgtgacaaatggaagaaatattgaaaaaaccaaaaaaagatgtggccaagggtcccttatttaaatcctatatacaatttggatctaagtaatatttttttctgaatgtgcatagaaaacaggtattgggatcaatttactgtaagtaaacgaaattctgtattatacagtctgtataaaatggggacttataaaatcaccttgccaattagacagtgacctcaacaagacaacaacaatgaagagaaccactagagttttggagctatattatttaaatcctggaataataatttgttgagaatttaattacaaagtaaacgatgacttacatataaaattcgtaaagtcttggtcaatcttaattataaagaacaagttggtcattgcttattataaaaaaaaaatgaaaatgcttgttgtcaagtaacattaactccattttttcttgcatttactcaacttcaccaaatcgtagagaagttggagaaataaatgatcagaaacacacatcaatcgcaaccaagcggtcaataaaatactaaatagacaaagaagaagtagctccagctcctccgccttggattatttttacaccggagaagcaaaaaagaaaagaagatggacatgaaagaagtgcctccacctcctccaccttctggattcaaacgatataagaaaaaaagaagcaaaaagatggacaacaaagaagtgcctccacctcctcctcctcctcctccacctgttctgcctcatatccgatcaagaaaaaagatggacatcaaagaagtgcatctacctcttccacgtcactatcctcctcctcctccgcctcttccgcctcctccgccttatggattcagacgacatcataaccaaagcggcaacgagcttgagaaacgaatagcacgtctaggctttccaactcttcgcccttttcaatccaaacgatatgataaccaaacccttccaaacccaagatgtcctctgtctaatccaacctacccccacacactcaatcctaagttcagcgtaaacactacaaatggttgttttacatgcggtgaaaacacatccccctggattgaccaccataatgtccatttcttctgcaagaggtgccatgtcgagttccactttggttgccacacgtaccctagtgagttaacacatccttatcacctccaacaccctcttattttcacatttcataactatcaaactggggtcatatcagacgccaggatagatgaatccttttgcactacagttttgtctggctccgatcctaagaagtctggctctatagataaatgttcatggtgtggaaaaaatatccaagggaattggttctatcgttgttctatatgcaaattttgtttggatctctcttgctcccaaactgatccacctctgctcgttgcaaacccaaagagtcatcaccattcactcgtattctatgctcgaccactcttgactccgtgtgatgcttgtgggtcggtcaatgtgttggatccaagttatgcttgctttcaatgtaactacatggtccatcaaagttgcatcgacttaccacgagtcataaagatcactcgtcaccagcatcgtctttttcatactccttacctccattccacgattccaccatgtcggatctgctacaaaccagttgacatcaagtacggtcagtattcttgcaaacacgaggatttctcttacgttgtccattccaaatgtgcaacacatgagaatgtatgggatgggaaagaactcgaagaggaaccagaagaacccgacaacattgaagatatcgtcccatttgagaaggttagtaatgatatgatcaagcatttctctcatgaacatcatcttctgaagctagaaaagtatgaccgtgttcgagatgcagagaagcaatgccaagcatgcatccttcctatcaactctcacgacttcttctataactgcatggaatgtgattttttcctccacgaggtatgtgctggtctacttagaaaattggatcatgcgttgcacgttcaccctcttgtcctagacccttctcctcaacgacactataatcaaaatggttgtttgggttgttcgagaaaatctactggtttcaggtacaagtgctccatagagaaatgtgtgcttctcgataacgttcagatagatgttagatgtatcttagttccagattttttcacccatacagctcatgaacatcccctatttatatccacatccgagaaagggaaaagtaagatttgttgcgaggcttgcaaggagatatgtcttgtgtcctacctacagtgttctgaatgcaaatttgctatgtgttatcagtgcgctaccattccaaacgaagtctactacaaatacgacaagcattttctctccctttgctacggagaagtagtgtttggtacgtattggtgtgaagtatgtgagaaagaggtagatccaagggattggttttacgcatgcaacaaatgttgtatcactgtccatcttcaatgtgtattcggatcctctggttatgtgaagcctggtttcacattatatcattacttcacaaaaatggaagttttaagcaacagtaagagcactcgaccgttttgcactgaatgtggtcaacgttgtccaagttccgtctactacaaacttggttggttgggaactagtactttttgttcgttgaattgcttaacgtcaaaagaaaaattgatggtgttgtcaacatgatgagtttttttttaatgtgttattggaattttttttttttaataatgtttttcagagatttgtgtagttattatttagatccagagagtttttcagagattattggattttaatgtgttattggattttttgtttttaatgatgtgcaacaaagagagttttttcttggacatatataattaacattcaatggacattaacgtctgggtagtgtagtcggttatcacgctagtctcacacactagaggtccccggttcgaacccgggctcagacatttttttctccttcatatttacgtttctgccacgtcatcatccgctacacggacgctaggttctgattcactttttctttcgtcttgggaaaaaagcaaacacaaaacctgagaacaaaaacatccgcagaatcgatatccccagaatcactactctacaaattcgaatccaaagttcaaaccctattcttcgattttcgtagagcagattattgtttccctttaggtgtctccatagtttctgaagagagaaggatggattgggacagcgttgctgctgaggatgtgattgaggcgttaagagaggttgaatggtcggcgagtcctcgttccttggccgagttcttctccagattcgcgtttcctcgctctttctctaaatggatgagccgtctcaaatgcaatctctactagtattatcaccctctctctctatatatatattcgtatttgcaaatcggggtgttgatttttgttttgattcctcttgttgcagctataggacgaattacttcatcctcttcgttttcgttctgggtatgttgaccttcttgtgtttcaagctgtgattgagaaatctggttttttaattttagatcctcttgagctgtgtttaatacttagtaggggttttttctaactctttttcctccgttgtggtggactcaggtcttgcacttatcactcgacctctggcaattcttggtgctgctcttacagctttaagcttagctttcctaaacgacaggtatttcttgtgatttcgcgttagtttctactgtctatcgttacttaaagatgcatttgttattccggttgttgttggttcgcatctatagaatgtttaggaggaggttctctatctatattcagtgattccttaaagtgtctgtgcttagcgtttagattcaataaggttctcttgatggtatataaaactcgagtgttgcaaagttctctattttcaatgattagcccttaaaatgtctgtgcgtagtactaaattcaatagtttatggcgttaattctgtaaacatgagggatttaaggttcctctatcatgagtattgtcagtgtaaaacccttgatgtgtctgtgcttagtatgaaattcaatatgtaatggtgttgtttcttaaaacttgagtgttttaagtttctctattttcagtgatttgcatggttggtttttactttactcattgatttgatggcgctaaggtttttcttgtcttttgcagttttgcagctacttttaatgagaagatgatccggaccattaggcatttctcgccacatttagctgcaaagatgaggcctccccacatgtgagtaattttttattcccatggaagagttacagatggtttttgttatttactacttgagtgaacaccttgcaggcctgtcattcgtgggcgatctgcaactagaaagacagtctacatttgtggccaaccacgtttggtattcgtcttacttggcttaaccggtacttattatctctttatcatataatctctctcacctattggtatgcaacttctctgtgaactgatgcaaaatatatgattttccttatgtagccagttttgtcctgtggtttacttcatgtggtttgttatgggtcctctatgcacttaccactgcccttctcagtaagctatccttgctttcatctctttctctgtttttttgggtccagtttccatccttttgacttgtaatttttctctctcccttagtgatacttcttcatgcaagcctgagaactccaaacctcaaggcccgcttgaacacattccgtgaagaattcagggctgtctggcgtaactacagcgaactttaaagtcaacataaagcattgattcgatcttattgcaaaccaacccgggacatcacaggggtttcgaggaaagacatgaactccaattccttcatcatgtgcacaaacaatcgcagttattcttgtcttccagtagtaagctagtaaattataaggccactggtctggttacagatgcggctctttgttctagttagttgactagaactacaaggcagaatatagtgttgttttcttaaggttctttgtatactctttcagtctataaagtgtgtaagtgattcagttttacaaaatctttcattggctttttctacgtatagtttttggatttgagatagaacagtacagtgctttatcaattgtgttttaaaattttggtagacaaaacgccaaaacatgtgggcttcgcttgtggaatcagtagttcttttaaaagaagaatcaatcctgtaaataagtgttataacgaaaagcccaaaaaacataagagagtctaaattaattcctagaagagggtaagaggcttagtggagcgggcctggacacagctttttgtagatattagaattttaaaaattgaatttcttcacattaaaattgctactggaccaagtaaaattctgaaggaatcaaaacggtgcgttccggttacggagcacacacagataagataggaaaccctaaaagtgcttcttcttcttcgtcttcttcttcagttttaggttacgatcgaagcaaaagcggcgcatctgaatcccaaacgagtgacgatgacgatcgattcgcagcaaaaaacgagcaaattcagatggggggaaatggacgaagacgaagatctggatttcttgctccctcccaagcaggtgattggtccagatgagaatggtttgaagacgacgatcgagtacaaattcaacgatgaagaaaataaggttaagataacgactaggacacgtgtccgcaagctagcttctgctcgactcaacaaacgagccatggagaggaggaactggcctaagttcggagacgcagccaatgaggaagctggtagccatctcactatggtttctaccgaagagatccttctcgaacgaccccgagctcctggtaaattctctccctctgatgatgatgatgattctggtgatttttgtttgttgagattcgtggggttattggttcgtattgaatttggagttaaaattataaatttgtgcactttgatctaattgagttggtaaaatgttcagtcttatggctgtgctaattgtgtgaataagtttctagactcacctagaaagatgttgtttgtgatatgttctaacttgggattgctgtccaattcattgtttgattcattagttttattgtttagtctaatactattgggttaaggtgaccaattagcgaatcacatgttagccgtgaggctacttgtttgtgtgattggtcagtatgtcaccgatagcagtttattgtttgtagtccattcctgagtacgagctgaaatgtgctctcacttttgtggctgctaactgtacacatagatgttgcagcttttcattggtctcctacttgatgttaggaagctttagtttcgattgttaaagcttttctcctgtgacatgttgtctcccatttgatgtttggaagctttagtttcgattgttaaaaattttgtcctgtgacatgttgtctccttttgtgttattaccttgatgaaaaaattagattgatgtaggagtcaccatgatcttgtgtttcaatgaaccaatgtcaaatggtttgtaaacgggcaaagtttaagttccttgataatgttactagggctttcgtgatcaatctattgataggtgaatgactagttgtatagatagccatcaaagatgatgttaatcagtggcttatagtgcagacataggttgctatgtttgattctgtggctatgcattactgtatcattttaaagttgactatgagttggccattggttcacaactatctttcattctttgtgtaattgtgtgtatcttaacggtgtgtgatacttcaggtaccaaagcggatgaatcaaaggcaacaggagatggcttgtctcagctgggtaaaggtggtgcagttctcatggtgtgcaggatatgccacaagaaaggagatcactggacatcaaaatgtccatacaaggatctagctgcaccaaccgatgtcttcattgacaagccacccacaggggaatcatctaccatgtctgctgcacctggaactggcaaggccgcgtatgtcccgcctagcatgagagcaggtgcagacagaagcgctgtgggttcagacatgaggaggaggaacgatgagaactctgtgcgtgtaaccaatctgtccgaggatacccgtgaacctgacttgatggagctgttccacccgtttggagctgtcacacgtgtctatgtggccattgatcagaaaactggagtgagcagaggatttggtttcgtcaatttcgtgagcagagaagacgctcaaagagcaatcaacaaattgaatggttatggttatgataacctcatcctcagggttgaatgggcaactccaagaccaacctagaaagaaatgtctgatgttgagaccttaaaactcttctcattctcgtctttcttgttatggatttttgtttatcgaccagtttgtttgttggtttggtttctgtatgaatagatgagaatttgttcaatttctctttaatacataaggcatgctttttaaaaaatggatttgtgtgatacgtaagagttttccaacacttttttcattgatgtctaaaattatttgtgatgtttgtttaacattccccgtttcacaaaaatattgtttgacttttactttttcgttctaagatatcaatcaaaataataatctttattaatgaagaatataactaattaacaaatgttagtacgtatattcttttaattgtaattataacattttcgtatcattatgtaaaaataagaaaatttcctttgttaaatttagtcgaaaaagtaaaatttccatttatttttaactgcatatatatcagcttaagtaatttcttcttagtagaaggtcaaattttagaatttcattgaaacaatggaaaaggtttcaaaactcagtattatcttccgtgacgaactacaaaacttcaacaatgactatgtcgaaaatatagatgtcgtcggcaaaaaaacatctaattcatcatcggacaatgaaagcgaccaattcgccagcttgtttggttcttcgtcaccgtcttcgtttcaaatgcctcttcagtacccgaattacgcaaaggaacagtacgacattatgtcggaggaagaactcgatcgacttctcaaactctatggtctgcctacagatatcggtaacttgtcctgcaaaaaagaatttgcagtgggtgcattcttgtgggagacggggttaaattcttctctggatgagcatgattcagtaaaccctaattcgtccattgatgatttggaagagagatctttgatagggttagtgacagttctagtaaaggatatggttcaatttatattccgtgggtagcaagttaaggaagtgaaagcctaattttgcttgaccctaaagtttcgtttcttgttgtttatatggatggatttcaattattatgatttactatatcatattatttaatttgcttcgccgtaagctatcgtctgtttccttttcttttcttttttatcgtctgttttcttacaaccgaacaaaagttaaaaccaaattgaatagggaaagaaaaatatggtttatatattgcggtttggagaaactagtcgggacaagtttcttcttaaacaatatataaaaaggaccagcgactctagctgagagaataatcttgttttatatgttttaaaaactgtataccaatgagagaaacaaaagcttcaaataaaacttagctaggaccaaaatcgaccaagaaggataataagagcaagagatagactttgaaaacaaagtaaaatctatctaattagatatagaagcattatctaaaaatataaatagagaaattctaaaacacaaaaacagtttaaagtttcttgttgggaccattcttcactatgaaactgcatcataaattcataatctgagagactgagaccctttcaaatcattaagatgatgatgttacgttctgcttatggtgttcttatatggtttgtatttgattagtatttctttacttcagttatttaaatttaaagtcattttaattttttatgctctttaattcataaattcataaattcataaaagaaaatatttttttttagaatgtgttctacgtttggaatcaaatatcgtcagtaaacaaatccttctccgttttattaaacctttgcataatatacaaatttaaaaatgaaaacaatgattataggttttacggcctatgcatcttttctttaccttttatcattgatggactactacagttggtgaaaagtcttatttaacaaatttagtcgaacaattcacttgtatgtttgcaccgttgagctaaaatcgtctaccaactatatttggtttaaaatgttatttttaacaattttagagcatttcaattgtgtattttgtagtgaatatagctatatctttcaggcaacatcgtcaaaaggctgaccaagtttctctattatgtcccaaacacatgtaattaacgacattttaagttaacttaaatctatactagcaatggattttatgtaggaaaaagtataaagttagttgttttgctaaaactagacttatgatataaaaccaaacttattgttaacatttttaatgtagcacaaggaactcacgatgtcatgtaagccttcctcaatactataaagtaagaaccattagggacatgaatagatatttaataagacaaattgagacaacattatgatgtatagcgaaaaaagggaaagaataattgagaaagagaggtcaacatcaaatcttggaaaccaaatctcacatagaccaaatagacacgtgttgctatttgattgtcacaagtaggcataatcttatctaagctcccacttgtgttgtgtccctctcaatccccaacttttattgtgttgccctctcactctttccacaaacccaacaggcaacagctaaaaaaatcaatccatcattataacattatgcgaattccgatctaataattttatggcagtgccttatcttttgatggtgaaatctccaaacttcgaccaattgtgatgtattggattatccaatcgaacttttcacgcgtggggatataaatttaccgtagttttggttcaaatgtggtattttcatatccaaaagatgctaggtttacgaaaaatgtcttcaacaaaaccccataataattgttggtttagaaaacaaaacataacctaacgtatgattaatacctaacaaacattaatgtgaagggtttataaaaacatgattgaatagaataagattttattatctggtcattgtggcaactggcaagtggctagtaatggacggttaaaagtatgtattattttttgttcaagttgatattaatttatttataaaagaatgtgaagatcatattcctttttcttaccctcctagttgatattttctagtcaatttaatcaaaatctgtttaattgattattgattccgaccttaactgacattaagcattcgacaatgttgccagacaagtctcttaacttaactatcttcattagtattaaaagaattaataaatcattgtactttctagttcttatattgattgtccagattagtctcttccaccaagatatatatatatttttgttgatttatgtttctaatattatccttgaatcttttaattacaattatgtgctaaaatgccgcggtctacgacacgcgagtctcccatacgaccccataccaataaaataaataaaatcttcttaagataggggaagattagtaagtaaccggtttggattcaaatcatcgtcgagactcatactaaaccagttcggatcgaataacattaaccgaagttttaaaatggtaaatacgcataatctgttctttcattttaacatttttcccctctgaattagattattacatttccaacgaccatactaaaagaatacatgtataatattacctgaatagaaaaataagaaaaatactcaaactatttaatcagctctttttcttccccagcctgaattaagagctaactaaaatagaaaagaaaaaacaccttaaaatgagaaaaactaaaatagaaaaataaaaagaatacaattacaattaggctatgtaacaattattctaatactactactaattataacactaattattaagacgacgcttgattattcctcctcttcctcaagtcaaccacaacgacgctcacgttatcggagctctgtcttgctagagccaactttgttaagagcaacgccgcatcggagcacgcattgtgcgccgcatctgagtcgtcacccgcaccagcacctcgaaggcacatgcgagccacgccacacgccgtctcgtttggtacaacatcccatagtccatcactcgccaagatcaaacactcatcctcatcagttcgatccgtcactgttacctccggatccggaatcacatacggtttcaagtaattatcacctatacaaacaaaaacaataatcatcagattaaattcaaacgtgtaattcaaaatagcctaaaaagtcaaatcacaagagagattcactcaccaattgctctagacatggcaagaactccaagaaccctagctccatcccaatatataactcgcccaccagcttgttggatccgaatcaattcatcgggtcgatccggctgttcatcacaaaacaaaaactcttagaaccatgccatcttgattcatactaaccaattcgtaattctatataagacataattttaactaccttgtgatctacggagagaggaatggctacaccgttacgacaaagcacagcccgtgaatcaccgcaattagaaacaatgatcttctccggcgtgacaaccgatacaacagcggtggatccgacggcgtcacactgaggagactgcaattcacatctacaagaatttttcatactccgagtagcaccattaacaactaagttacactctcgttggctaacttctttatccattttttgaaaactcttaaccatcgtctctgtccactcgtcggaagccataacttcaacttccttcttcactatatcatgcaaccgttctctgcacttctccgcaacctaaaatcaaccaaacaaaaccctaattagtaactaatcacaaacaaaagaaaaaaatattactaaacagaggaaattaacgtacatgagagcagccatggccgtcaaagacaccgtagaaatgatgattctcagagttccgttgaagaaacgaaggatgaatcgagacagcgtcttccatgtctcgtcttctaccacaaaccgacgtcgtaccgatcttaggtacatcggaaaagaaactctctgcttccgtaacagaatttgaattcgtaaccgctgatctagccttcttattctcactcctcacattcgaatccagatctagatttcccggtaacgtcgagagcactactgtctcacgcttctgccgtttacggcagttttcaagcggaggagcaacggcggagtcagcaacaattttgatcgacggaagtagatctaacctccgtctaagagaagctcgagaagttgaatcaaccggtgccgccggttcagtctctccaacaacaccgcaacaaatcccagccatttgatctctaacaaaacttctccaatttacagagcaaaccaaaaacaaacaatctccgattatgagtcttcttcaacaatagagagagagagagagagatattagtagagagagattttgttgagcgttaggaaatgcaatgtgattttaaaaagaaaaggtttgatttaaaaagaaaagttgaagaagaacgcaaaaaaaaaaaagggtttgattttcgcatggaagggttacacgtaattaacgggcaggggggcatgaataaggggaagttgctgaccgtcagcatcaacgggcaggatccgacacgtaccgtttggtgtgacgttccatttcctggtacctagatacaatctaaaccgtccattctttcttttttcctagatctatacacgtgccctttctttcttttggatacgccgttaacgtggcccaatcacagttcgacacaccttaacggtaacgaccggcctttcttgacacgcatgtggtccactctttcgttttgttctttttttcttttattttgtttcatttaaatacgcttaatacagtattatgctgttaattaagatttaaataagtcagaggtcaaaataatggccatgggagagagacaatcttgttataaaatactggttttaattattttgtcaacttttttataaatcagaataatcactatgagattaatgtaatcgataaaatctctgatagtagaaaattatacagtatgagaaaatgtaaaccccttctttttctagttatggaatcctgaatggtgaatactctgatagtctgattggtaatgccaaacagaatgataggtcagccccactacccttaaaacatataagaaaaatctagtaatatatacgatatggttcatatcatttcacaaacctaagcaacatcaataatacatttgaatgtttcctgtgttattttaaatattgaacaaacccgcttcaatttgtacaaaagcgatgcctctgaacgtactatcaagtataaatttgcttctaaaataacgcatcgtgaatccgttccgtgattacatattaatcgaggatataattgacatccaaactaaagaaaatttgcttcagaaataacaattttgatcctatttgtacaagaaataacaaatatatatatcgtaaaaggttgattgtattgaattgccaaagagactatttgtacaagagatgttgcctaaaagaagatagaaacgtatctaactgaatctaggagaagagaagattaacatatattctaactctgatattatttcacacatgcaatttgaaatgtttaaacaataagagtatatttatgcttgaaattctgaaatgcacataaacgaaaataaattggaaaatagttacgtgtatctgatgagttcaaacctcagcatcaaacacttcttttttggttttgaataattaaaggtgggcatttgggttaagttcgggtaaaacccgattagatatgatttttttggatataaaagtttaagattcaatgggataaatccaaaatatcggtttggtttaagtttgtatccaatcggtttttaatcggtttggatataaattttcagggtccttttagaaccgatatccgaatttttgagtaaatacctgaatttttggataaaattttagatttcgaataaatttagattttcgaataaaataccggtattttcggattcgacttagattttttggattaaaaaatttaggatccaatatagtaaatcttcgggttcaagtttaatttcgaacccaatataataaatcttcggctttggttttttttctagtcctagttttgatgttagaatttcataacttggaaaacgattaaaacctacaccacaatccataattacatatagaagactttatactatcaatcatctgagtcatctgactacaaaggtttcatctcattcacacgcattgtccatgcttgagatattttggtttcgtattgattgattacaagatttatttatttatttgttcatgattccttctatgcttagtcgatataggtgttgcatactcgacacgtggtaatgttcgtcctcccacttgtgcttggtttcacttacatcaccgattccacagtccatgaaaaggtgtctacaatcacgtctttaaaaacacgtcgtcgtcttttgtttattgcggaaaaacaaaccttataaatcatgaacctgaaaggacagggtagtagtatacagtacattatacaatagtacaaaatatctctcttgtcagaaataaataaaaataaattactcgttccacatgtatatataaatgagaatccttaaagagaaggtttcgtaagatcaggagttttggtaatggagtaaaaaattagtcttttggcctcataaaactagtataagagtaattaagtattaccaaaataaaacaagaaagtatttagaaatgtacgtattgtcttctgtatcgttttttatcacttcagttcataaataaccttaaatataaatcgaatatgaggataagtctcattttacaacgagattattgttgaacttgattttttttaaaaaggataattgttaaacttacgtgaatacgaagaaatcagcaaattgtaaattttgtttgtacatgaacaaaattctaaaatcactcattagatatctatctctagctatctagtgattatcaaatacgttagttttttcaatcaagttcctgttcttgatcagaaagaagtcatcatgcacaacaacaaaatccaaagttaacccaaaaagaacaaacgaaaaccagagcgtgacacacacgtcaaaaaagactcgcgtggaagtgaataaaatcgataattgtttttaaaaaaaaatttgttaatgttgcatcgcatctgcaccacactaactccatcgcatccagctgtgattaaaaatttaatgccgtctacgtaagcccccccccccccccccgtgagagagtgtataacacgcgcatcttcttcttctttaagtactctgaaactgacaaagtatcttgttttgtctttttttttttttttagtttaagcctccaaggcgaggcttgatcgacacgtgtttagtctgacgtggatactgtaagatgcttcctcggtgacttctccatgactcgaattcggcgcttctccacgtttccatcatattttctttttttgtttccctatttgttctttgaatcctcgaaatattttctaatcatcaattatagcctctatcttttggaatcttaatttatacccatttgatcattcgatgaaaagtttcttatcgaatgtttttgacagatttttatggttcagtagttttacaaggttataaatatttactttgctaaacgttttacatgtttgagatcctaacattagttccatattgtaaatatcaaacatgtataaatgttcgaatcgaaaacatgtacattagctgttattattttgtctcaataaattttgaatctggaagaattgataacatcctataaatgtggtgacaatatgcaaagattgaaaacaaatttctctctgtttatagattctatggtagcatataatataaatatataatatgatactaatagaatattgaatttcttcttttcttttcaaaaatagaatattgaatttcatcttgatattttttgataagctataggatgtttacacacgtcctctttggttaaagagagcagttctaatctcaccaagcttggaacagctataaagcacgacaatcgaactatactacgacacgttgcagtttgaagctgtcatgaaacagacctaccactagtaccgccacgtgacggtcatacccaaagaaacgaaacttgtaagaagagatcaccggcacgaacctaacacatcgcaaattcgaccggtctcgctagacacgttatgcatgttttttgttcgtttaatgaatgacgactcttcactttcgtttttgtattagtcaataattataagagttggccagttaggttgattacattaaatattcgattaggggagactaaaatatttgtactattttgtacacgtaaccttacattagatgtcttcgaaacttctttccatatgagtcatgacaaggaaaacttctttctatgcgttctcttacccaaaaaaaaggttctcatttttataattggagattccacatatatattattaattctcggcttagtaggattctaccgggtaatattgtaaactaaattttcaatattcaaaattattgttattgaaatctcaatggaatgactcaattaagataacaaaacattgaaccaatagatcacttgtgaatagttaacgacgattttgatattttgaagataaattaataataaataaataaataaaactgttacctatttaattgcgtctgctttttgacatttgcgtgcgtaaaatatttttatatttccgtggattcggcatgcacgatgacattttcctaacatgcaagcaaacgacacaattttttaaaaataattattcgatttgttttctacttaagaacttgggacggtgtaggacctaccccattctctgtaaattctattccatgatcaataatgtgaatctcttaggaatagatcaattgcttaaaccatctaattagcgacaattcttgcattgatcgataatatttggatatatagtgccggctttgaggtcctataagctcaaagcaaagtttaaaatgcgtgcacacaaaagaagcagacagatattttaacttttcgttgggccataaaagaagcccctaacaaatatgcacctaagtcaagcgacataagagatatgagacgatacagacccacaaggatgaagtaacaaacatcgatttggatcaagtttgttaaagataaacccaattcggagagagtccactcaatagtgaaatgcctacaatgggctcttattaagcaatggactctaagagacgtgccttttttcaatttaggcaactgtagtctattgggtataacaaatgctattctttgccatgtatattaaatactttactctttgctgcttctttaatttcttcttaaatggtttatctagtaaacgatggcaaggtatactcttttgagttattacgagagacagagttagttacatgagctagttcagtctttaattagcctttctttatgtacattatctcataaatctacatgtgaaaactttatttactctttgtggagagaaaataaattgtaaagcagcagcacaagatcgatttactgttgatttcacattttgaatgtagtactgggccttgagggacatagaaaagctaagattgcactgcagtactgcacccattcattttgtgactcggcccctccccattttgtacgtaaacaagaaaacgcgttcgtgattcactttaactttatggaaaaaaaacaatttggcgacttgcatcgacgtgcgcgtttatattatataaactgattttcaaaagaaggcatgattcatcaaagcatgtatattagcattcttaattatatctttgtttcaatcatgatccaaaagatgtgagttgatctattgttgttgtttccacgtatgttcgtctatatccaattttcagtgtattttattattctgctacatatttaattttagctcaaacacacattttaaccatattctccttggcaatttatttattagtcgatagcaatttggttgcaataatcttctgttatacttgaaaaacgatctattaacaaatatattcgaaagagtttcaaaacaatctattaacaagtattcgaaagtcgtcacatcgttgactaaagctgaggacaactctgtcatttttatcttattcacgtggctacctcttcttcttcgtctctcattttatgtgtaatcccacagagcttgtcactccaaaaaaggcaaaacaaaaaaaaaacagcttctaaaaataaaaaacaaaacaataatccagccaccgtaggggtaattccgtaaatttgtaacagaaactccattcccgcggcgtatgcagagggcaatcccgtaaacttaacccatctccggtgatgaataatatcaattccttcacgccggagtgattttccacaaaaaataagatatgaaagcaaatcgcggcggcggagagcacggccaacacgaggctctaaagctttccagtttcttcttcatgccggagcggccacgtgattacctcgtgcttttcacacgtttctccgtcctcacgtgcctcatcgtctccgtatctcttgttctccgcgccacttttttatccccttccgctcgagactattccaccacctacggtctcaaattaaccgccgtacctcaaaaagccatagctctccctccgtccgcatccgtcggaccaaccaatatctcccatatcttcttctctatcgccggagcagctgagacatggatcgatcggagccagtacatctccttatggtggcgaaacacgacacgtggcttcgtctggctcgatgaaccggtgaaaatccctgaaaatcactccgatgtcagattctcgatcccgactcgagtttctgatccaggctggactcgattcaaattctccagctcaagagccgcggttcgaatcgctcgtataatctgggatagttatcggttaaatctaccaaatgtccggtggttcgtcatgggagatgacgataccgtcttcttcaccgagaatctcgtcaaggttctctcaaagtacgaccacgagcagatgtggtacatcggaggaaactcagagagcgtcgagcaagacgtgatgcacgcgtacgatatggcgtttggcggcggtggtttcgctctgagccgtccattagcggcgcgtttggccgccgcgatggatgattgtctccaacgttatttctatttttacggttctgatcagagaatcgcgtcttgcatcagcgagatcggcgttccgttcaccgaagaacgcggttttcatcaggtacgtctgttgttatgcacgtgtccgttatctaattggttaatgtttatacacgtgtcgaaccgttttgagctagaattttggagcccgacaaattcaaaagggttttattagatgctgaatttctcggtgatttaagtggattcttgccacgtggattctcataaacttatggggtcaaaaattaattatcactaatccacttgcttagtgttagtctgctagaaaaagcatgttggagtggatttattgaataaagtcacaaaattgttgaccaaaaaggaaaatattagtcattcaattatggacattagtacctttttccctctattcgacttatatatgttaagtactcttagttgattgcagttacagtttttacgttaagtactcttagttcattgcttgatataaatgctctccgaccgttttcccaaattttataagtttatttagttttagtgagtggttcttgtttgttgtggtccatgaatgtggcagaaaattgtttctaaattcgtgggtttaatttattggtggagcacatgatactgtcatgttcagatacatagcttttaatcatgtctagctactgatcagctttctgcaatgtgcttgttttaatctttagtgtccgctaaaatcttatactatttgatatttgttaatcatatctgtggttcttaagatatttatgtttattgttttatctctatgtgcgtgtcattatcactaagatcacgtgtagtgtctaaagggaaattccaatttatatgtctattgataatttgatattcattataacatggtagtacagtcgtgtttggactcacattcattctttgttttgtgttctgtgatggaataattatattgcagcttgacataagaggagatccatacgggtttctagcggcgcatccattggcaccgcttgtatcgttgcatcaccttgtttacttagacccaatgttccctaacaaaaacccgatcgagtcgttacagaccctaatgaaaccttataccttagacccgaatcgaatactccaacagattaattgtcatgatcgcaaacgtcaatggtctatatccatctcttggggatacaccattcagatatacacttacttcttgactgctacggagctgactacgccgttgcagaccttcaaaacttggcggtcttccagcgatggacctttcgtgtttaacactcggcccttgaaacctgacccctgtgagcgtccggtcacttatttcatggatggtgccgaggatgtacgggatagtgggacgaaaacttggtatagcataggggataagaactatggtcattgcggaaagattgagcatactcgattaactaaagtgaagaggatattggtgacttcaatgaagacggatcctgagtattggaacaaggtacttagtgtttgtatatttctcatattgaatttaacattttgggtgagtttaggttacatctttttttttattttttgcttttgttgataggcaccgaggagacagtgttgtgaggtgatggaaggaaaagtaggaaaaagaaaagagaaagaaatgttgttaaggattagaaaatgcagatctttggagaagatataaaaaaagcgttttaattagagagatttttgcacatacagatttagattcgatcattagttatttgtttctaaattcctcaattcctagtaccaagagaatgacgattttctctagtaatactggcactcttcgtttttcaacatgtaaacattactttgtataattagtctatatcaaataaatagttacaacatgaacgtaactatttatacacgagggtaaatttttaacaaatttaaaccgaaccaaaaagatttcagttaatcatagttttgttacaagcgaaatctgaaatattcaccctcaagtttgttacgtaattgtctaatctgtgtttttttgtgctagtgttataattgtttcctcgaatgttaagcaccacatagaagtatacacttttcttttattattttcgttcttcttccatttagaaacttttattaattctactgttaaatccaacgttattagtttattttctctgatgaagttctaattttttttgtttgttggaaaaagggttacttttctgatgaagttgccgatttgtttccaaccaaacctcagctaatatagttagggagacggataagaaattgcataaagggagaggctttgtaaacacgcaagtttacgtcaacttgacacatataaactcgtatataggaattgtgtaaaatgttaatcaatatatgtttatgaatatagtccttttatttccttaatctatagtcatgttatcatcatatcggcaagaaaattactattacaacatatgtttccgtgcttcgatttgtcgatcaggtaggcaaccaaaccgggccagattagtcacaaatgaaattaggctccactttggcaagttttttcacaattaaaaattagaaagtctaaccaaactaatagaaactgaaccaaacaaaaatgttcacgcaattacgtagcacttctctatgaaatactgtggataattcgatttgagctaatctatggtaagtcgtttctctcaaactgaattaagctaaaccaaaccgaaaataaaccgttgtagaacacccataataaacatatatatgttctctactcttatttggctatttttccatttgcagatacgtgtgacaacattccaaatataggcacatgatacaaattacaaagccagaaattataatttataaactatacataataaggtcagtagcctaattacatccatatatttagttgggcataataaggatagcctaattttggtgcatcccgccaaaaattcggacaaatggtgaatttcaaaccatgaatttctttgttatacatacattacgtgcactattacatcaaagaaaaatagtgacgtgcataaacgtattttcttcacataatctatatataatatatacagccatgtacatttttcaacatagaaaaatcatgtatacaaatacggtaggtgcaatactgataaactgccattcccattgcattagacgctagtcaatccaaaccttataacataaaaagttatagtccatttctttcatatccaatcgagtcaaaataatattcgagcaaaaaacaaaagaaatggttatggagcaagctggaacgacatcgtattcggtcgtgtcagagtttgaaggaacaatactgaagaacgcagattcattctcttacttcatgctcgtagccttcgaagcagctggtctaattcgtttcgctatcttgttgtttctatggcccgtaatcacactccttgacgttttcagctacaaaaacgcagctctcaagctcaagatttttgtagccactgttggtctacgtgaaccggagatcgaatcagtggctagagccgttctgccaaaattctacatggacgacgtaagcatggacacgtggagggttttcagctcgtgtaagaagagggtcgtggtcacgagaatgcctcgagttatggtggagaggtttgctaaggagcatcttagagcagatgaggtcatcggtacggaactgattgtaaaccggttcggttttgtcaccggtttgattcgcgaaacggatgttgatcagtctgctttgaaccgtgtcgctaatttgtttgttggtcggaggcctcaactaggtcttggaaaaccggctttgaccgcctctacaaatttcttatcgttatgtgaggtaaacattctaaattatataccattgcatgaagcgaatactaaaatataattgttacacttatgagaaagaaaaaatcaactagcacaattttttaaatctaaccaaaataggagcatatagtaaccaaaatatagtatatctataaatctaaccaaaatataacggatctttgtattttcaaccaaaatatagtatttcttaatatttcactaaatcataaatatcattctgaatttttttttgtctttctatataggagcatattcatgcaccaatcccggagaactacaaccacggtgaccaacaacttcagctacgtccacttccggtgatatttcacgacggaagactagtgaagcggccaacgccggccaccgctctcatcatcctcctttggatcccatttggaatcattctcgccgtgatccggatctttcttggagccgtcctcccattgtgggccacaccttacgtctctcagatattcggtggccatatcatcgtcaaaggaaagcctcctcagccaccggcggctggaaaatccggcgtgctctttgtgtgtactcacagaaccctaatggaccctgtggtattatcttatgtcctcggacgtagcatcccagccgttacttactcaatctcgcgcttatcagagatcttatctcccattccaaccgtccgattgacaagaatccgagatgtggatgcggctaagatcaaacaacaactgtcaaaaggagatctagtggtttgtcctgagggaaccacttgtcgtgaaccgtttttgttaagattcagcgcgcttttcgctgagttaacggataggattgttccggttgcgatgaactacagagtcggattcttccacgcgactacagcgagaggctggaagggtttggacccaattttcttcttcatgaacccaagaccggtttacgagattacgttcttgaaccagcttcctatggaggcaacatgttcgtccgggaagagcccgcatgacgtggcgaactatgttcagagaatcttggcggctacgttagggtttgagtgcaccaacttcacaagaaaagataagtatagggttctcgctggaaacgatggaacggtgtcgtacttgtcgttgctagaccaattgaagaaggtggttagcactttcgagccttgtctccattgaaaatactagaagtatagatcatccgatgattttctctctgttttaatatattagatcagtagtttcaaattaaacctgtttgcagtttctttctttcgattttagttttgtttgtgataaaagtttgagatgatttttttatatggtcaagtgttgaattcttgtttaaatgttattctttttcaaatatgtatgtaactccccataaccaatgttgatgaataatatatatgaagggataaatattttgctggtcattatattatgaattgctgttaaaaaaattccagcaattcatttgcttcaaaaatatttttgtcgatcaaattatttattttgaatgtcgaaaccatatactgtacagtataattaactgttatcaacgttggttcacttaaaacgttcttttaattaggttcttaacttcttattatattcaaatatccaacccactaatggccacattttcgtttacatacatcaaacacctataataaattaaaaatataataattgcattgtatttacattttgtaacacgttgaaactattagaggaaggaaaaataaagaaatcaaattctaacaaaatttatgaatttgttggattagtagccaaacatattcaaatttggtgggcagataagaaatagacaaactcgttgaccagaagactttcgctgccactggatcacttttctcgttccagttggcctacctcgccagttccacgccatctttcataaacctctttttgctttcattatgatgaaatactttgggttataaaaatatagagtatgtatttgggtatttatatgaatttattccgcataagtgtacgaaaattatactgtagatggcaattgataaagcatccaattatatatgtttgttatttctcctaaacctatatatatatcttttgttgtaaggagtaaaattgtattctgaaaaataaaagtcccgagtccgagtgtgttatcctactaatttcaaaacatttagggttacgagtggtaaatatatctttaagttctgacatcaactaagcgtatttatgtaatgggaattgatctttgatttcggttaactattttagcggtttgcaggagtaggtatttaaataactttgttaccaaatgacaaatgtcagaaattgattgccaaagagaagagttcaaataaaagataaggcgaaaatgctgtggagaacattggagacatgattggcgtgctttttatatgggatcctagctaacagagcaaaatatattaagttacagaatacagaagcactaaatggaaataagtggtaaaaatagcttcgaatacattagctccatctgtttcacatgcggtaaactgaaccttatagttatagctcattttgcaggttttagtgtacaagatgttgcaaagaaagaaatgtgagatccgtgtgatataaagaacggccacaaccattatcgacataccttactcgtatgcattttcagtaacaggcacacaaatgttcttccaaattaaacaaaatcatagttctgttaaagtttaatatatcagattgtcaaacgattatctgtaaaattaagttcttgcaatacccactaattttaccatttggagcctagtcagagattggcattttgggaagatggaattataaacaataaaattcaatgtgaaaaatctgttggtagatctgaatcaaaatacacagcaagaatgcatcactataacatatagtcgttaaatctactcaaacatatatactgaagtcatcagaaaacaaaaattatgatgaaagctgagagaagtaaaaatcctaaaataatggatcagtatgatctagagatacttacttatatatgaaccagaaaaaaattaggatcatatgaaataatttggattcttttttcggaaagctaagatcatttgagaggttcaaaacatctacaagaattcaagatagagagaaaatgaacataccaaaaagttctcgagctatatccaagaaatacctccgatctgtgaattcctacaaaaagattggactatgaaatttccaatcaacacaaacctgtttctatgtgtaagccactgattgcagctgcagcatcatcaagattctcatacatacatcaaaaatctaatcataaatgggtttatttacacgaatacttgatgatttgtgaatcttgatgatgctccaacagcgaacagtagctggttgatgatagggatgtatgtagtgatttggttttgtcttggatcttttcaagactcaagacggcaccattttgctggaaacatgaaaccctaatttcaatccttaatctagagtctagctagtgacctagaaagagatagatgtagacttttatatatatgaagcgataaagaagagcctatttggtgttttctccaatgatgtgcataaaatatatataattaacaaattaaaaatacgttaactgagatctcagatactcaggtcattagtacaaagtacaaacgtctaatagaggccaattttgtcatccatattcaattcaaaccatatcatttgccataaccgtacccatatatagatatttgttagtctacaaaagactgtataaatcgttttatcttgtgttcaagccatcaactatgatatcaaattaccagatcactcatgctaaagaatccatcgaaatgtattaagtttgtcgaagttcgttactctatatggtggattttaaatatttgatttggttagataatttttagttataccgtcaaataaatttccaactatttagtcagcgaatttaaagatcaaacactaatcatcagtaatggtttgctgaaaatcgtcagaatttcttttactagtgagcaagttttaagatgaaataaaaggtgtgaaacgaaatagagaaaaggtagagagggaagagacaagcgtgagacacggagaagtggaactgatctctttacgttcctcgtacgtttaccaagttacactgctttccatatttctatattattattccctccatccctttcttcacatactttatgtaacttctttttaaaaaccaattatttgtattctaattgattgaatcaaatagtttctataagactataaataaacataattcgaattcaaattcggcagcgttgaaagatatatgttgaacaatacattaccacacttattagtagaatatatttatttctagagtctcaaaacataagccaaaaagccgaaagcacctttttatctttgtgggtttggtgcaatggatcatatatatggtacattagcatttttatcatctttctcttttatcatttttcttgtattgtcgggcttgcgtcaggcctgtacttatcttcatacaacattatttatgtacataaccagaattcaggccacaaacaatacgtgagctattcaggatcacgaggtccacgcgctcgctcaccttcctctttcctcaaaggctttagctaattgttaactagatggaaaacagtgctatggttgaattttaacatattggttactactatctcaataatattttgtaatacaaatgtcggtagatgaattgatataccaccttcatggatgatgaagatccacttttaaagcccaattttttgtttttcttcgatgccgaaatcaatatgggcacatgtggatcctactatagcagttcctcaatttgagttaaaaatctttgggttttaggcttttagcccaaggaaaaaaaaaaaaaaaagaaccaatttttattttttataatttaataagaaccaaattattcatcattatatacttctgacaacaaatatttactatgtatattatatagtgaagaagctgtgacatgaaacagattcaagccaatcgtctgattagctagagaatcactgtcataatctattagttgacaaagaatgaatgacactagtacagtagttaatatgagtgcggattctcgtaatctcaacgtatctacgtcaataagctcatttatacatcattaaattaaagtacaacattccaatttatgtttggtgggttcctttttatcaagacgtatacgattataccaaacctttatccataattatttttaaatgatacatttcgtaaatattaatattacgattattatttttaaacctaaaatctttgaattttataaaattttaaaattgataaaaaagatacgggattttttttgagttaattgattttctaataaagatattggattcttagtgttttttttattctataatttatttataacgcggaaataaaaagcaaaataattaattaagtgaggagagttttaatattttgatgtttatttctaaattcatctcttttttccacttctgttcagctctgatgaatcttcttcctctgttactttgatctctttctccatccttgtctctgtcgattctctgagatatcttctctcgagctttttcccgcgttatctctctcccactcctggtaatattttcttcttcttcttcttctagattgttcttccgttactagctcttgaatccatttccacggatctctgatcttcaatctctgttttcattctctctaatcagttgttgagcttgatatttttagctaacgtttttccgattcaaatttacgatttgtgtgttttccgataaccaaatcggatatcttcagctcaaactcgagctccgatttcgtctcatgttgtagatctcgacgacttcgtatttgtctatggtttgctgattgtattcagattgctagatactcaatatagagcttacttttacctcagctagggttcgtctttgttgtacctttagttgctgctttttgattcttgtatatatggattttgattgttcaatcgtaatttctggttcattgaaaatcgatttattagtattcgaaattggaactaagatttagagattgcgaatttgatacagaagtcatttcaaagtatcagagctataaaatggtgcttagctagtttctggtttccatttctggattttcattcaaatacgaaatctattcgtcaaaatggtgtcactagtgttctgtagaaatttcattacagacttttagttgttgcctagtatcaactcatatctcagcggtagatatgatgaatctactagacatatttttcaattatcgcctccttttacaagtttatcatgtcattattttgttgataactacatgaatgctggctgaaatattaatttgtctctttttcctcttaattggttcaggttggagcttgatgtctaaattgttattgaactgctggagtctgtcttgctttaagtagaaagagatgagttacacgacggcgactgctgatagtgatgatggtatgcactccagcatccataatgaatcaccagctcctgatagtattagcaatggctgcagaagtagagggaaaagaagtgtcctgaagaaaggaccatggacttcaactgaagacgggattttaattgattatgtaaagaagcacggcgagggtaactggaatgctgtgcagaaacacactagcctggcccgttgtggtaaaagctgtcgtctgagatgggctaatcatctgaggccaaacttgaagaaaggagcatttagccaagaagaagaacagctcattgttgaaatgcacgccaagatgggaaataaatgggcacagatggctgaacatgtaagtagttttgtaactgcggaagctacctgatcatggtccattttcatattttgatattctttgtgagcctaaagactaattaatctctggtatgatgttttcttcttgtttaccagttacctggtcgaacagataatgagataaagaattattggaacactcgtatcaagaggagacaacgagcaggcttaccactttaccctcctgaaatctatgttgatgaccttcattggagcgaagagtatacaaagagtaatatcataagagtagatagaagaagaagacatcaagatttcttgcagttggggaattctaaagataatgtcttatttgacgatctaaattttgctgctagcttgttacctgccgcttctgacctatcagatttggttgcatgcaacatgctaggaactggcgcaagttcttcccggtatgagagctacatgccaccaatattgccttccccaaagcaaatctgggaatctggatctcggtttcccatgtgcagcagtaacataaagcatgaattccaatcgccggaacactttcagaatacggctgtacagaagaatcccagatcttgcagtatctcgccttgtgatgttgatcatcatccttatgaaaaccaacattcgtctcatatgatgatggttcctgatagccatacagttacgtatggcatgcatcctacttctaagcccttgtttggggcagtgaagctggagctcccttcattccaatattcagaaactagtgcatttgatcagtggaagacgactccgtcacctccacactcagatctccttgactctgttgatgcctatattcaatctccaccaccatcgcaggtagaggagtcagattgtttctcttcatgcgacaccggcctactagatatgttacttcatgaggccaagatcaaaactagtgcgaagcacagtttgttgatgtcatcaccccagaagagtttcagttcaactacttgcacgaccaatgttactcagaatgtaccacgtggcagcgaaaacctgatcaaatcaggagaatatgaagattcccaaaagtatttgggtcgctccgagattacaagtccctcgcaacttagtgcaggtggtttttcatcaggtgagttgatcaaagttacttgttgattggtatcttatctactcttgttccatattgattcttatgcagctgtgttggttttcgtatatgaagcttttgcagggaatgttgtaaagacagaagagttggatcaggtttgggaaccaaagagagttgatataacacggcctgatgttttacttgcgtcgagctggcttgaccaaggctgttatggcattgttagtgacacaagcagcatgagtgatgcgcttgcacttcttggtggtgacgacattgggaacagttacgtgactgttgggtcatcatcaggtcaagcaccacgaggcgtcgggtcttatggatggaccaatatgcctcctgtttggtcgctgtaacaaaatgaaccatatcacacaatttgaatctttctgtattttcatgcacctggcttacatgacttggtggtttgttatagttgagagaagatttgtggacttggtaaaaatttggattttcttcacctgatttttcttatacttggaaggcatttatatatactcatttcttgttcctgctacttccatcatactagctcgattggttttgtttagattgtaaagaagcaaatcaaaattagggcttattgtagcccaacctctaattgggaccggagacacagcagcatgagcgatgcgctttatttcacaacttgaaactagacgctaatcaaacgttacataagattatgtaaaaaacaacatactccataatagtggctccagcactctcaatatatagagacatcaaagggaaatgaatcattacaaataataaaaaagttttaggtcttgcttctcgcaaagtaacggtgccccaagaggattaaaacccaaaattctcatgggactccgaaatgattttacctcatactccggttttcttgtttctaatgatttccttaagctctgcaaacttcttcttgcattggttcatcgttttaccagggacagctgcagctactctctcccatctttggcttgtctctttcgggaatgtctttaaagcttgaaccaaagctctttcttgcacagtcgaccaactatctgcgtctgaacttccacctacttcaccattgttgtctgagctttgactgctcgagcttttccccacaacagtctctttagagggctttgcatttgttgtggtcgtcattgtgggtagagattctccgagctcctctcttgtggagagaggggatgtgattgaagcagagggtttcctcttctcgaggaaagaatcgaatgctttagctgaatctggtttttgcaggagaactgttttagttgctttcagaatttcctctacagatcttcctgtaccaatgtactctgaaataacttcccatctccgcgatgtcccctttggatattttatcattccttttctcagcatatcaatctcttccttgctccatggttgtttcttctgagtgctactatctaactgtgaaactcgggttgtaggctctgtgccaccgttggtcttcttacttactttttctttagattcggcttcatcatttctactactgttgcatccatctttgatcacctttgccaattctagtccttctttgtttcccattttatcacatagattctgcaactgctcggtgttaagtgacatgcatagattctctatatcttcctcagagatgtcaagcagacgctgagccacgagaggagctgagagagttctaagacgatttcgttctttgcgtaagagcttcttctctctttccttagttttcttttgttgttgtgcagattctgctgctcgcttttcttcttcttcttttcgccttttctcttcttcagcagcaatagcagcgtcctcttcctgcttcttcttggcctgaatttttgcatcttttttctgttgcttctcagccttttcttcctcttttcttttcacaattctcgggtcttttctatacgcattgtcaacaagagtcctgattcgagcatgctcctcctttctagccttcacagttttttttgcattctccttttccatccacctacgttcttcacgggaatctgcttgttcaagatcatgctcctcttcatcaggaaattccctccaactcttgaaagcgtaccaaaagttgtagaacttatcaacatctttaagtggtgtgttttcatctcccaaatctggaatacgctgattcactgaccacctagcatttctcttaaacgctggaccaaacaccttgaaaaagtcttgcggcaagcaatccgatgggacctcgtcatcaaactcatcagtggagtcaaaaattcttctcctagttgggtccatcaatacctcatatgcttcttgaatcgctttgaagcgagattcaatctcatctttttttgcctccttggcttcttctgtttcctctaacagaaggagactagcgagtttatcaggatgatgcttcaatgcagcttcacgataacttttcctaatctgatcttccgtcgcaagatatcttagattgctcaaacccaacaacgcatagtggtcttgttgctgggtaccagacttcttctttcctttgttggcatacgagttgaatgaaggaacatattccttctctttatcatctcccactttcttatcaccaccttcatcgtctgtgggttcttctgcacaaccatgcagtttaagcgcagcagaatggaaggcatgaccagcaggttcacggtttaaagccttcacaggaagacaattggaaaaagcaaagaacggttttccatccacaagctcctcagagtacgtaattagcctaatagcagactcacttctccggctcggcatgatgaacagtttatacgagctgcaccttactccaagtgaatatccaccctgatttctgtcgcaatgattaagcattaaccaagtaaacgagagaacagcacaataaactccagatgttacacaaaggctaatggtttcacaaggcctggtttaaaaacacattgttttcgcaagacactgatcaaagctactaatacaactccgagtatgaaactccataaaaatgacgaaaaagaaaggaacatgatcgcaaaatacatctcataagaaccctagaaaccaatcatactcctaaggttagttattagttattactcagtaccatcaattgtctaatctagattttctactatcagcttatcctccccttatgcacaaacaaaagatgatcttattcaatcttaagatatttcacgaatcaatcagataacattcgaaaaccactcagctaccataagtaataaaacaacagtgattaaaccgattctcttaccagaaactgagctcctagtaaccccgatccgttggtcggaagctgctccggctattacttgccgcgcgagcttccctccaacctacggcggttgagaaagatgatgaagaagagaaggtttaatctggtttattgaggaaatagcggcggcaacgatttccagatggaggaaagtatctgagaagaagaaatggtctatcacagattaatacccgtttggttttacgtataactctattcccccaaattttcggattactttgggctacaggcccatactatttgggccttattctcataaaaattagaactatgcgttttaacccaaacaagtcataatcagcgcgggagaccatgatcgtcgttacaagctttgtacggaactccgccgtcgctgcggtggcttcgacgccatggaacgtacgtttgagagagctcgcatatcagtcattgttttctgaatctatatctctttaccggtcaatgctccgttctggttcttctcccgacgcgttctctttccctttcattctcaagtcttgtgcttccctttcgctccctgtctccggccaacagctacattgccacgtgaccaaaggcggttgcgagactgagccgtttgtactaacggctctgatctcaatgtattgtaaatgcggtttggttgcagatgcacgtaaagtgttcgaagaaaatcctcagtcaagtcagcttagtgtttgttacaatgctttgatatctgggtacacagcaaactcgaaggtcactgatgctgcgtatatgtttcgtagaatgaaggaaactggtgtgtctgtggattcagttacaatgcttgggcttgtcccgctatgcacggttcctgaatacctctggcttgggaggtctcttcacggtcaatgtgttaaaggaggactggattctgaagtagctgttttgaatagtttcatcacaatgtacatgaaatgcgggtcggtagaagctggtaggaggttgtttgatgagatgcctgtgaagggtttgattacttggaatgctgtgatttctggatattcacagaacgggctagcttacgatgttctggaactttatgagcagatgaaatcatcgggtgtttgtcctgatccttttacattggttagtgttctgtcttcttgtgcccatcttggagctaagaagattggtcacgaagtagggaagttagtagaatccaatggttttgtaccaaatgtttttgtaagcaatgcatcgattagcatgtatgctagatgcggtaacttggcaaaggcacgtgctgttttcgacatcatgcctgtaaaaagcttagtttcatggaccgccatgattggttgctatgggatgcatggaatgggagagattgggcttatgctttttgatgatatgataaaaagaggcataagaccagatggggcggtgtttgtaatggttttatctgcttgcagccattcagggctaacggataaaggtttagagttatttagagcgatgaagagagagtataagctggagcctggtcctgaacactactcttgtttagttgatctactcggaagagctggtcggctagatgaagccatggagtttatagagtcaatgcctgttgaaccggacggtgctgtttggggtgctctattgggtgcttgtaaaatccataagaatgtggatatggcagagttagcttttgcaaaggtgattgagtttgaacccaataacattggctactatgtattgatgtcaaatatatattcagactcgaaaaaccaagaaggaatctggagaatccgggtaatgatgagagagagagcattcaggaaaaagcctgggtatagttatgtggaacacaagggaagagttcacttgtttttagctggcgatagaagtcatgagcaaacagaggaagtccatagaatgttggatgagttagagacttctgtgatggagcttgcgggaaacatggactgtgatagaggcgaagaggtttcgagcactacccgtgagcatagcgagaggttagcaatagcttttgggattctcaacagtattccaggcacagaaattcttgtgataaagaatttgagggtttgtgaagattgtcatgtgttcctcaagcaggttagcaagattgtagatcgccagtttgttgtaagggatgcatctcggttccactatttcaaagacggggtctgctcgtgcaaagattactggtgatcttccaagtgtctcacaaacatgatggtccaataataggctacttttatttttcgcttgcacagaatgtatactacagagaggatgtactcaaaacagaatgattacagagaaatctgaaggtttaaggctacactaactaaagaagtttgctttcagatataagttcatcttctacaaacgggatggtttttcggacaatcaccctcataggagctcctgcaagaaggaaaaagatgtgatgaagaaattactgaataaaatggatttttcagtatcaagagatatgtcaactgaaaattgcacctccactagcttcatcatcttcaatacagattgcagcataatgagaatcatccaactccaaaagggaaaacttccattctccatcgcatttgtttgtctcctccagcgaacttgcagtcatttcagtcatctagagaaaacaatcaagcgtctttaattttaccactactgtatgtatactgcaaatgaaatttcagaaagtgtacaacacaaaaactaatcgcatttgataaactccttattcaattccactgtgtaaattaagatcaaaacagaccttgcaaagattgtattctccttttgttccaaccttggactggattgtgaaggtattaaaaggtgcagcagaaaagccttttcctaatgctttcacatatgcctcctgaaagaatcatcacaacagttttaaaacttttgataagctacaattttcaggctcaagtaaatgtgttgttagtagaaactacctttagggtccataacttaataaattcctttctctgaacttcagggtccggtaaagttgacaaaaacttgacttcatcagcagagtaaaatctttctgcaaatgctaagatatcatgtttaatcttcctttccttgtcttcaacatcgataccaacctacagtcgttgtaaactgcaactgttcaaatttaaaaacaagaaaccactaattttggaagaaaaactggaggcatttgcttgaatagaagacttaccggaacgtgtacagtcaccccacaggcaattaatgaatctgtgtgagaaatgttgaaatgcaatggtggattattacagttcgtataattctgccaatctacctgtaaaaatttaaacaaaaacaaatgaaattttgcccctaagccgagactaagagttagtctagtataatcccacaaaactgtctcacctcaggcttcccatacatattcttcttgaacatcaaggccttaggatcgacttcattgtttgtctgatctagtaataaaaccaccattacaattaatactatccaaactcgttaaaatctagagtttctataagaaaagttcaatctgcaggtaatcaccagatggtaaaaacagtaagcttcacagattcttgatgaactgaataaagaagaattaagttttctttcaaataaagttttactaggccataacctgagagacttgtgtcatatacaaggggcaggttcaggttactaagatgatcaatcttcaattagcaaaatcaaataggaaactccaatggctaatgatggaaaactagatggtaagtaagtaagaattaccatacatctagcaatggtggtccgaaccaaggttcgagcaagcaaagcattcttcttaagctcatcgcctcgcatctgaagaactttctctttctcggttggtgacagaagttgagagtagtgttttagaagagatgtactcttcacttcatctggtcgaataaaccatagatgagtctccctacatgtcaaaagataacacaatgtagaagataataaacagataagaatgttgaagatgagtttcaacacaatttggatcattgcacaacattaggaacgtacatccgagatggaagttgcagaggaaccagtgaaggcaattcgatcgataagcttcgctgcaattgagacatgactctgattctcatcagctccaacaaattcttattctattggaatcccaaaatcgcaacattcaaacaagaatcagtaatccaatcagtgacaagacaaatttagagaatcgatctagaattctaagaacaagtaatcaactggacttggaatcaattattcagatgaattacccaaacggaaattaatactccggctaaacgacggcgaggtcccttgccggtgacggaggaaagatactctaatcgaacggagatggtaatactttctgtttgagaaaaaagtactaacagtgtcgaaccaaatcgaattttattttgaaccaaacggttttacttatccttaaaccaaactaacccgtaaatactttggttcccagttccgttcgctggataccgggaattacatttaaccggatattagaattacaacattttttgttttgttttgattaataacagagttctacacttctacttctaacttgtgaaccttaaagttccatagttaaggaaaatctcatgatatacaagattagggcaacatttttttgttttgtctttaacttatctaataaaaacaaaattttagtaaattcgaaattcagtttggcctgtaggagaggtccgaccacccatccaatatctccggtttatgaaacatggactagattataaaagaatcttttatcgtacgaggaaatttgaacgtatgattcatcatgcatgctttgccgattttctaggataaaaggtggcgtaccatcaattggatggggccgccgcagaaattagttactagtactaccaaagaaataaataaatttaaatgagactttcgtgttccacatggtctctcatccctctctactcggaaatggaactgttgatacggacaacggagtttttctcgaccgcaaaacataaattgtcgagtactatttgtaatttgagatggtttacgtaaattgaaatagtcctttctgatcataaatggcctgttttctccactcttttaaatgagtttggattgttcatagacagattttctcatttttttcgatatatgtaaatctccgattattaaattgtaggccggattgttagataaagcttctacaactatagatttgttgagttgtcatacgtaaacagttttgcttcaaattcactaacctaggaccctccttttgatattaatgtgtggttgttagaaaaacaatttttcgtgttccatataattttagaattacgtggcatggaacatttacatcggggataaattaagcgtcgtccacagattttacgacaatgctccatataagaacatgcattacaaaaaaaaagggaaaaaatgcatgttcatgtatggtcgtctgtctgtttataattgaaaaggactttgatgttgttaatgttattaatggagattactttgaatctcacacggtttgattaaacgaatcttcgtcagcacacactctgttcacacttattatttgagactagcagaagaaactcactagtttatcatagattctgaccttcgcacttgttagtcttttaataacttgaagatactcgccattgtatatcacaactaggcgatttctcgttcatttaaaatgttaatattcgtgtttaatgtatatttaattgaagtaatgattttacatgtacaaatgtatcctagtattttgaatcttctagtaccaagtggttttctcttcgattacctttttgtcttttttcattacaacatgaacaacaccagcaataattaaaatatcgtgctttttgtttttgtcattttttggggtcatacatatataatatatacacgtaagttcaaacatttgtttgttgttctttttgtttgtcttggattcgacatccttagaaataaaaaccacatttttaataacgaaagttcattaaaagtatttcgaatattttaggcatgttggtttgattagagtttgtattccttattcaaactaatgtcgttgttttttactgtttagatcgaaagaaaagttttttttcgtaattttcgtttatttattttgtgaaatcactagcaaagaaaaacgtacgtgactatcacatcaaaccactataacatctcattttatctatcgcttaattcgttttttaagatcagatctgagatcattgtgcatttcaattgtaaaaccgagcctaaagtcaataatataacattatttcagaaccaataatttttaacagacgttgtttgtttttgggtctcaagctgaacgactttgcaactagtacacttggcatatgtttcatgttttttttataaataatgtgctaccttgatgaagttccctctctctataaattgaagtgtgtgagatgcatcatccatacacaacatcttccatcttccgataattctcctttagtcttataatcactaataagtacgataattgaaatggatccaagattcatcaacaccattccttccttgaggttcttatctccaattcatgtatcattaatgcaacacattcacacacacacacacataaatattctgtatatagagttaatgcttcttaatttgatttagttatttaaatatagatcgatatatatccatgcagctgtttatgtaacaatatatgcatgtatgtcgcgatgcaggtatgatgatgataagtgtgatgatgaatatgcgtttgtgaaagctctatgtatgagtggtggagatggtgccaacagttactccgccaattctcgccttcaggttcttcaatatcttcgcttacttttagggtttaagcagaaacaaattattaatgttcagatttttctctggtgatacaaacatttttacaatcatttaattatgataaaattgtaaaaactgaacatgaactaactaattgtcaatatcaaatattaaatgaatttacatataagaacataatatttaaatgtctttatatgaattgcaaaaacttcaaatatattatgcatgaagtagaaaaatataaacatatactcaatagaaatagattttcttgtttttaaaattgaaacatatgttctttctatctatatgttgagacagtctttaataaaattctactcaaaaagagaagttatgaaagatgcatgatttccatctattttatccaatcaaattcattcatatcatatgttagtttgtttttaagaagtttacatttgtatttaggaaagtaaaaatatattaaaaatataagtaatttaaaacgaaattataggtttcatttaaaataaaaaaaataaaatataactaagatatttatgttagattaacctctactaattgactaaaaaatggtatatatgttgaccaaaaaagaaaaagatactaatgatacaattactaacatatgcgttctgttaacgacggttctgccaaacaaattaaaatgttgataaatgacgattcttaggactagtataaattctctaaattaaaaagggctcattacatcacctataacttataaacctacaagtcattaaagaataataaggcatgtacatgcactagtcaaattgtaaactcgaaaatgcataaacactagtaatatataaatgtatataactcaaaatcatatattgttgttgttatcgtatgaagcatgggtccagtatcacattatcacggatcgacatactgtaaagaaaaaaatcatattttctaaacgaattataaaatccagataataatactattttttataactaagcttctttttttgttgttttttttagaaaaaagttttatcaatggccaaaccagtcttggtaagaaacacagaagaaatgatgatgaacttagactttcctacgtacatcaaagttgctgaattgggttgttcttcgggacaaaactcttttttggctatctttgagatcatcaacaccattaatgtgttgtgccaacatgtgaacaaaaactcaccagagatcgattgttgtctaaacgatctcccggaaaatgatttcaacacgacctttaagttcgtacctttcttcaacaaggagctcatgatcacaaacaaatcatcatgtttcgtctatggagctccaggttccttctattccaggctcttctctcgcaatagcctccatttaatacattcctcttatgcactccattggctctctaaggtacttataaataatttcaagatgttgtttatttctatgaaacgttagaggttttgatattgaaacgatggaattgtgtgttcatgattaaaggttcccgagaaacttgagaataataaggggaatctgtacataacaagttcaagtcctcaaagtgcatacaaggcctacttgaatcaattccaaaaagacttcaccatgtttctaaggttacgttctgaagaaattgtctctaatggacgtatggttctcaccttcatcggaagaaacactcttaacgatccattgtatagagattgttgtcacttttggacattgctatcaaactctctccgtgacctagtctttgaggtatatcaaatcaacttattcatttcttttgtaaaactttttaaatatgggacattcatggtcttcgacatagattaacatttttatatattttactcaaaatataagaccaaacatatatattattgtggaacatggtactcattgctatcttcatataaacagggtcttgtgagtgagtcaaagctggacgcattcaacatgccgttttatgatccgaacgtacaagaactcaaagaagtgatacaaaaagagggctcttttgaaatcaatgaattggagtcacatggatttgatcttggtcactactacgaagaagatgactttgaagcaggacgcaatgaagctaatggcataagagctgttagtgaaccaatgctcattgctcattttggagaagaaattatcgataccttgttcgataagtatgcataccatgtgactcaacatgccaactgcaggaacaaaacgactgtcagtcttgtcgtttccttgactaagaagtaagaagtaatcaacttctgtcatgttgctctatttgtatttatttactactgttattttgtttccttgaataaatttcaacacctgccattcaatgtgatgatgtggagctagtattggaaaaaagtgtgactgtaatatattatggtaaatttggtaaatgatttatttcctgcaaaagttgcagatactgctttcaagtatgaagataaatccttgtgaagagaaagagaaactgagaaacttatcattgacattatatgcagaaacgtagcatttcttgatacacaagcaaccatcatcaaaattcaaaagcatccatccatcccacaaaacccaaattaagaaatccaaaagctggatcaaaaacatcaacagtaaccttttttcatcgccaagcttcgaatagctcaactctgtaattcacacgtcccacaatactactcgctttcgacatggttctctgctcctcccaaccaatgtgtttctgtccaaaacctccactgctgttattaaccagagaagacttttttatgtcaacaagttctacagattcggcacattcttcttcttcttcatctgcagactcttctttgtctttcatctccgcctcaaagttgtctaaagtttcctccttgttagctttcatgagatgtaacaactgtctactgctgctctgatcaccattatggtcccgaggacttggatttgaggctggaaccaacttatctctagattcttttcggtctttaagcgtcttcacaataagtgttttcagaaagttcataacttgcacagcatacattagagccgtcaatggatccaacatctgcaatttgactgatgtcatttaccaaaatacgaacacatcaaacaatctttagagattcattcaaaaaacttacctgagtcatgttaggtgcaaaaaccattgcaatgtttcgagcattcatcttgttaagttgttccatctcaacaacatcagccattagattgatagcccaatctaacaaagaagcttctgttgaaggaagaagccttacaagctccacacactcatcttcactctcagactccattacttgctctggtgaaagtgaatccaaaacgccactaggaagttccctaaaccaagcctagaggataaaccaagaaaaaatccacaaattcaaaaagggtgaaagaagggaaaggaaacaataagatccttgtggagtttatgggtttttaccttaatgagacttgctaagcagtggacatcaatgttatcaggtataatacctttattcaactcttctcttatgtactcttcttgaccattctcaccattaatcctgaaaattccctctacctatataaggcaacaaacaaagcaaatgaaaactttattcacccattgtcattaaaccagatggaaattgttttaaacatgcagattaacacgtacccgcaatccgcctctactgtacaagtgactctgcatcatcaaaagtatcgtaggcacgatgttccctctagtatcataagatagctgcattgattcagtagagactccaaacacggttgcactgcatttacagaaaaagactaatcagcttctgatttacacaaaagagttaaactatctaatctgatcagtcaagagtcgttgactagctattcacttaataattacacccaaattcatagagaattcacaaaagaagtcctcaatctatatacctcactcaagatccttaacaactcacagaaaacaaagggatttgaatcaagaacatcaaaaagtatggatcattgatgtcaggggacacactaattgcaagtaaaagacagaatagattctattaacagaaggggatttcaattacggcaactactggaaatagaagaaaccaaaaccacacccaaaattgatttttaacacatagcttcaacaacaacattattcccaagaatttgttaactaaaacaagaactaagagaatcctaatcaccaaacattaccagaaacatctatcatcgttacaagtaaacgaaccttgcactaggagctcgtctagggacttcaggttcaaactcaacaggcaagccaaggaagccatggaaacgatcaaaggtaacatgagcgacatgtctaacatctgtaggaacaccaatctccattgaacaaagatcctcttcaccaacacacccaccaatcacagaccttctaatagcagaaacaagaatctccaatgcagatgaaagctcgaatctttctctctctttctcgcttctctcttcctcttcttcctcttcctcacgacgagaaatgttaaaaggagaatgtgggtctctattactaccatcattgcctcctccacatgatgtagaagaagagcttgaaggtgaagggaaatgacatgattggctcgattttagaactttagccattattctcaaaggataatccaaaaaaatcaaatcttggagtgatgggtactctctgaaaacagtgatggagaggtcaaaatcaatggctataaagaatcaatctttagggggaaaaagagaaaacctagaaaattggattagtggagtaattaatgatatttctgttggggaaaataattgggaaactcaaaagattaaaactttttgggtattactaagcgacgcgtagagttgaattgaagaaaggatattagttggtggcttgtaattatcacttcacaatctttctttctttcttcttcttcttcgtatcctatacacagagaagaaagagagagagattggtggaggttggtgagagaagatgaaggattaacgaggaagatgaatgtcgagctgtcttttttattttgtgacttactttttttttggtgtctttctctttatgaagtaaagaaaccttgcaaattttgtattatgtaataactttttgtttctatgtgtatatcaaatcttacaagatatctcaaatttggagtattaattaacttttatagtatcatttctctgccggatgaatgtaccacacacaaaaaagaagaagaagaaatctagcataaatccataataatcagttgagaaaaaaaaatagtaaaagattatctacaatgagactagtctcatgtacttggtaaacctaataacaaccaatgatccataataacacaatttctatggcttttggtcattaaatttaatgatgatggaatagttaaacacaaattgtaatccacgctaagatgtgagattttgatattgtgacaaacaaaaatgagattgatattgtaaaatcaaatttgaaagaaataaaaaaaaggatggtgaagttcattgaacagcttgcatctaaagtgaatcttttagttacttgcaaatggtccatgagaataatatacgaagatggttaacatttttatgtaatatttgtttaccgttagaatttagaaagaagcaatctctcgtactctttctattctcttccccaaaaaccaaagagaaaagaataaaagagaaagtgaagttggtgaaagttctttttggattagttgtaaatccatgtgtttaaaattcgtttacttgttatattagttggagatccccgaccacgaaatgttaaaaaacacatcaaattgtataatgacttggacagaaaataatttagaatttatagacaaaacacaaatacctacttttctaccaaaaaaggcatttcaactcatagttttgtggttgataatacttgatatgaatgtaagttggaacaaagcccaccccacgtgtgtgccgacgacgacccacgtgccgaacattccgttgtggttacatgttgttgttgttgctgtttcattggagattgatagatattgtaccgatttcattcattttgcctcacacacaatacttcgtggggcacatgcttccttgattccttccactttcacttctcttatttctccttttctttcttttagcttcttcttattcatataacaacatctttaatagtaacagaggagccaaacggcatgattatgatctcactttgataaaaagagggctaaaaaagggtttaaaatactaataaagcaaaagaaaaacaaccgttggagctcatttacccaaaattcagatccccacaacaaaagtattttgctttctctaaggtttggaccattcaaaattagctttttcattactacattgatttctctaacttgaaatgattatataacttatacctgactaacacatatgataagagattataacacaaggacagtaagtatccaaatttccttgtatccatcaaatcaagggttcagaaaaatctatagggaacaaacaggaccgaacaagggtaaaatgacataagtagaggagccaaagaagaggaattcatcaaataaaatcaagattgattcatgccggtacagagagcaaagtaagtcaaagtctcatattacagaagatgattacttgggggtgaaaagtcataagctaagatcttccaactggttcgagagcttcaacagtaacaatgctgtttcctcttatcacctgcatccaggaaaaaagtagaatgtttaaacaaaacaaatgacaagaagattctgtgggtgagttagagagatggagagaaacgtaccaccatcccaatgtcagttttgtcatcaccattgacttcaacagtgttatccacaacaagattcatgaactgatcaaagccacggagagttccaacaaccattctgttggcattaagcttaactacattgggggtaacaacaaaaaaaagcagacaagaacttcacttgaccataccaagttacaaaaacatgataacaaacaaagtctagtaaaattctaaatgaacgagatacaaaacctaagaatccatacaactcttaactttatgtgacattgatatattcttaaccaagattagcattgaatctatatattggaattgtaaacacaagtttaattagtacacaaaaacacgcaatcccaagtaatacatgaactgaaatggcattaatatagctcttaagttgagaaatcgggttgcaagcaattctcatctgagtaagagatttaggttcgacttaaagacgctttaaaattgaaaaagtggaagaagagatcgagcttactttggagtttcttgtccatgtacctgcattacatgaaacaaacgaagaacaaaatcagaaacacgaagaagtaggagctctatgaaaccaaaaacttcaactaaatggatacagagaaattagaaatcaaaaggaaaaaagtggcgaagagaacttacttcttgagatctggaggctgacctgatcgactcatacttgcagaatcggagaagacgaaaaacgagagcttagggtttttctcagctacgaacactttactcgattgattccagtctccagagcgaaagagaaagaaaaaaaatgacgtcggtctgcaaaactagagtggtcgaagcaccgtcgtttcaagcccattgttaatgggtttgaccgcaaaaaaagcctttcacatgtttcaaaacataaaagtaggggtgttccgagaatcgaactcgggacctctcgcacccgaagcgagaatcataccactagaccaaacacccggtgttactaattagagatatttagtcatttatattactaaattatttataacaatttatcttgaattgtgattacccatccaaaattatctgaattacatgtagtcaaaagccataaaactaaaagaaagatacccactgcatcaattaattaccaaacctttctccttactaggaaatattgcctgtgatatggctcctcatagagactaaagaacataaaagagcattctttaaacatccatgttgtttatgtcttcgataacaaccaagagcatcaagaaatgaggatatgatgagttttaagtcattgcaagaggctataagtggggtctgatgcttataatgcactaacagctcagggctaataagaaatatatgatcataatctgctaatctgttttctttttcttgcaagagatgccattcaacacaatctaagcgataacattctaatcaagaattccaaaagccggacttgggatatttgatgtctttatcatacaatctctcgtatagttgttaattgcattcaccacatgccacaaatcaactcttttcattcttaaaattgacttttttggttgaataattgggcctcaaaaacagattatgacaagttaacaacgatctggcttggtttgatttcggaaccagcacgacatactaaaacttgcatcggactttctaatctgattctgatgagcaaccatagcattaaatatctcgataaagtatccattcgccaaagttaaaaagagagaaaatgtaaaatatcaataagccaactaacagtaacacgacgcgatcagtaacttaacattttttttctcaataccaaaaactccaaatacaaaaaaacacagcttataatgttctcaaagcaactggaaagataaattggagagagacaaaactaacttcgaagtgtacccaagaaaatacccacagtctcaagagcacattgcaacgatgatgagcctcatcgtgcaatcagagtcttcttcctcttcgtccaccctttcggcgtgtactgtctgtgggaatcggagtcacatcctctgcaaaatgcattcaagaaagattcagcttccaatgagcaatcataacaaaacaaaacaaaacaacttgagtgagactaagtttgtgtgtttaccaatacgaccaatcttcatgccagaacgagcaagggctctaagagcagactgagcaccaggacctggagtcttggttttgtttcctccagtagcacggagcttcacgtgcatggcagtgatgccaagctcctgtcacataaaccattatagattatcatccagaacctcaaagtcaattaaaaaaaggcatggacatcgaatcatttcagaccttgcatctttgagcaacatcttgagctgcaagcatagcagcataaggagaggactcatcacggtcagccttcaccttcatgccacctgcaaaaggtcacataatcattatatttctcgaaatataaatgaattttacactaacataaacacaggtaataaaattcactactaggaaacataccggtgatgcggacgagagtttctctaccggagagatcagtcacatgctgcaaaatattgaaagcaatgtcataaacgcattacacagaaggttatattacacaaacgctaagaataaatgagaaaaaacttacaatgaaagtgtcattgaaagatgcaaagatgtgaacaacaccaaaaacttgctctccttcacgaacagaaggtccaagagtcacagtctcaacctttggctccttagtttttctcttcgactattatatacagagagaacaaaacacatttgagaaacaaattgttcactggtatttaaccataattacataccatcagctcaatatcaatacatggagattaatcagacaacccctaaactatgaatcagacaagccaagatcaataagtcaattttgcatagctgaaacaaacgtataagtatggaacatcggaaactagcaggactaagtgaaatcgcagatctcaatttcctaacagactaacgaaaaccaaatgatctggcacagaaaaatgttggagagaaagagcttaccatcttcaacaatggatcagagaagagacgaaacgataagtgtttttagattctgctcagtgtaaacaagaaggacactcacggcgctacaaatgcacgttatatattagggttacatcggagtacctctatgaattgacgtaaataccctcatcactttcattacccattacgtcgtcgtttggtgtttttttttcttaaacattacgtcgtcgttcgattattactattagtcttgttaattttcttgatttttttttgacaagtaacaaaattcaccagatttcttattggaaattattatttgacaaatgtgaacaacttcaccttgatcgtaccatcgtacttggtcttatgaagaacaaagaagttttcaagttataacagataactatgtaatttgaatttgactccatagttaaagaatatgatgggaaaaaggaccaaaacgattctgattatagaagagaagaagaatttcattataatacttttgaattcatacggaaacatcatttctcaacaagaaccaatacctttacatataaaacgataaaagatagagaatctaaaatgcagagtttgcaagagagccatctttcaagccttgttcatggagcagatgacataagagacttggctggtgaaatcagagcaacagcacctcttccaagtttcgaatacttcttcaacacaccacgtagcttgctctcccccgctttcgagtgaatgaaagctaaaagctttgagcaatccctgattacacacagaaacgcacatagagaattaatatacaaacaatatgatcacaaacttgctagtgtaaagaattaagaagactaacatgagctgagattcggagtagcctgtgtggaatttcagtgtatcagtccaagtaggagtcttgttcaagcaacaccttgctgtgtagaccgctgatgcagcaagcatggaaggacagaacattaaactgtcgtgatgcatcaaacccaactcagctagaaagtgaaccaagttctccagtttctggtcagaacccgaggctttaataaacctcacaaggaacacatactgtgttggaactgtcaagtaccattcaagattccccaaaatggttttctccatcactagaatctgtctgctgttgtaggagttatcagtcacatataccaaatcattgacctgaggaggccagatttcttcgtacttcgaagctataagcaaagcactaacacctacaagctgtagttctcttctaggcacagtcttcagagaaagaaaacgatcaattatgttgacagtgaggtaaagagtctcaggggagagatcaaacttgacatgaacttctacaagccaatcaataaggattgatctcatcttctcatcaatctcaggttgtgtatgcatatacatctgaggtttgctctcattctgcaacaaagaacaaaacaacaaacttaaagaagacattcacataacttatccataagcataaacaaaagaaggtttcactgtaagtgtaccacaacttctttgtagaaaatgtacatatcctcaacgtattccacagcagcaagatcattttctttgtcgacataatcaatatccaaagtcttagaagcagcctaagtgtgtacaccaatcacaaaaccaaataatcagaactttgcacattatgctttcaatgttgaacaaagaatctaccttgcttcgagcatcaagaaccgaagagtatgtcactttcttcttgttctctttagctttagcaacctcgtttgtatcaggacttatcacaatcacttcgattggttttgacggctcacgcttatcacctcttgctttcttttgaaccgctcttacaacttcttgtttcttagtaactccatcaagaatcggagcctttttgttagcggcggctgcaacttgtgcgttttctagcaactgagcacgaaagttacgagtaatggggcggttaagctttcctccttcgactccaataagagaatcgacgtttccaatgtcgccaagagcacgacgattctttgctgctgcgtttttgaggtcgatgggatcacctgataaattttaacaaaaagcaacctatcaagatttggatccttggaaaacagatttgtaagcaatctttgataacatctaaataaaaggattcatagatgagagtttttatgcagatcctagagttaaaacaaagattcatcagaggggagaaacaaacctctaactggttgaggatgaacaactggtcctgtcgccatgatttctggtgttttcaaactctctgattactccaagataaggggtttctagatgagaagaaggatgattgagatttgagagagagcgcttaagggatagagaagagaggaggagccattaaaagcataatcgcaacggtcaaattattagcgggattagacttctagccgttggatgatgaactttaaatctaacggtggataaggaggttttgtcttataggattgtgaagattcacgcctttcacacacttaatgacaaggtccgagttttaattactggtttatttcttcccattagtgacaagtttggagtttgatttcttcctataattggttttcttttcttttttaagggagtcaaagcaacgtttaaatattgttatcaccttattagcacaccacagttcatgtaaacgattaaagattggtcgttcgttttttgtttgaatttatattttatatgaaccaccttacaagaaaggtagcattctcactttattaatataccattgttgtaagatagtgctttttatccaatgaacatgggtctcttaattaaatcacaaggccacaaaattacttaatgcaatttagtaaacttcgaaataaataactctatgcttaatcttgaggttacatagcaatttgcaagtcacatcattacaaaagggataaacatcatatatcaacgcaaactccaaacagataaacaatcaaactgtttttcaatggcgtaactacaatatgaataagtaaaataattatgtaacactctataaaagttaactcatcattatcaaacatttcgcagacaataaaacaatatcgagttaaaaccacataaaggagatatattggattgaacatagagaaatgggagatgtcagataaattgccaaatagagtttttgaggtcatgatgaaaccattcgcacatctaattgaatcatcatccatttaccattcctccaaattacagaaaaaagagttgacggcgaagtcagattataaaatgccaaataaagtttttgagctcatgatgaaaccattcgcacatctaattgaatcatcatccctcgccgtttttcacttcaaagaaacaaccaacgtaacaaaattaaacgatcgtgcagtctgaaaaacaattcctcagattacaagaaacgatgctgcagattataaaaaacacaaaaaaaaaaaactaaattgcagaacaaccaaccctagacgatgacggctaataataatcgcaaggatatatatatgaaaggggtctcttttaaaattacgcttctacccttatgaagttcatgggcttttattatctgaagggccttcggacattatttcatgaccacgtgttacagttgaaccgttctttgttaatctctcgaagctaatctagggattagggaacattcacaatgatgaattaaactttttcctaaacatgcgaaacaaaatattttggcacttagtttcaggaaaagattcacagtgatgaataaaactttttacaaacattgagtgatacaaagctttacaaaaagagggagaagaacacaactttcttaaccactcatagtaacctcatcttttcttcacactctctttctcatacgaatccaattagtaattcacgagcagcaacatctacgttaccagtcatcatcgagactagcccggtgaaaacacatgacagtgcaaatgaatatgaagaatgatgtgaactctatgagcattgcacctgtctcgatcatctgtgcgtgccttaagatgattgggatagcaaggcttcccacggtcgatgctccggtcaagaacttcgctgcgtctatccacctgcgttttatggacgagccaatttggtaatcgatctttcgtttaactcaaagaagcaataaagtctctagtaactaaccctccaccgtcccgactaataaggaattgggttgagcctcctccaaagaacatacaaggcataggcaccactacatacatgagtgctgatagcattggccaccagttaccatatatcgcgcatgcctgaccattatgaacaaatagttatcactatatctcccagatgactataacacgtgttactcattgcatggtataaccaggtataccaaaggaaatcacaaaatatgggaaacgtatcagatttgtaaatcagatgatcctttcttcttctaatcgaagtgcaaaaaaaaaaaaaaactatacctatacaaggacctgatataagctgaggagagaagatgcttgagtttatagaagttgttcagaaagtctaagtcaattaacaagttagacattgaggtcggctaaggaccccagcttaccatatgctccggtcaaatagtgttgtaaggataagaattctaagtgtaattttggtttttgggatccagagatcgctagtcaacatactacaagagagtaaagctcaaaacttcaaatatgaaagaaggtttgaatgtaacaaactttacttcacagagtatctctcccagtaaaacgggccaaaagactcacaactctgtttgctacatcaacaagggtacaaaaggagaccagtatactcagctcacaacctaacagcagaactagctaaccatctcttgcaggatttaaagctactaagtcatgatcttatgatcaagcttcaagggttataagcagatagctatattcagaaacgtaccaggatctgtaggaggatactagatgaaaacatgaaagcaagtccagcaagtctgtgcaatcaagaaaaataaaatctgtaagatcacgacacacgagaatacactggcagatgtaacaacaagggtaattaaagagcatcaagtcttagaacttacactgtaccaagaaagcaatttgagcattccagaagaaatcagcatcggaaaaaatttagaaaagagcaaacaatgagtgagtttgaacaatgcaaaacccagaaaccctagctcacaaaattaaacaattcacgaagcacaaaataactataatctgagtaaatcaataccaatctctaatacgtatggaatatatgaacatagagcaagggagaaaagtaaaaggggaaaatcgacttgaatctgattcgattccgtcgggaaatgatacagttggaagataggtgattgattaccttcgatggtcatcgccatgtcggcgaatgaaaatgttctgattaccggagatcgagtcttgaatgatcgccggtgacgataaaagagaaggtgatgatttcgttgttccccttagagagatacagaaggagagagcccagagaggagtcgcgatttgagagcaaaatgaaaattagtgaccggtcaaaattggttttctcaccgttcatcgatttcatctttttggtttggttggtttattttggttataattggtttccaggattgtggttttgataatacagctagtagtcgattttaaaatatcacaaactaaatgacatgaaaaaaaaattacgatcaaaatttgggttgcaaggaccacataaaactcattcctaaatcatacgtaataaaaatgattttataactgaaatttttaaccaaagttcataccaatcatcaaaatatgtgaaatgctaaatatttttttcttttcattttttgttatttaaatgcaatcaactatgattgaaactgcatcaacgaaaaagtattattaaactattaagcaaccataagttgagttgattcgtttccataattttagttagagtacgtaaatctccatcataatacactatctatgctatcattgtttgttttttttttcttttttttgctaagaatgtaaatatcattagaaatgaaatgtttggtattacaagagacgtattacctaaattaaattaaccttggcaaaaagaaataaaaacaaggttaagataaagagtagttaatcaggagagattaatggatccaaagtagcataagttgtttccaatgctttctatgtcttcgagaagtaatggtattgcgcacctcacgatctatgctatcatggttggtgcgtttatgacatgctgctgctggtgacgattcaaaagtgtttatcagttgttcattatgatgccattgtgatgtaccattactaatttcttacttaaataaggtgttgttttttgttttgctccaaataataaggtgttgtttaaaaggggctctttcgttttggagtaaaagtctctctgagtagctgtatattatttaagtagcatagtccaattatttgacaatgaaaaaaagtgtatagtccaatgaataccaaatgaattgacgtcaccactagttgagacctgagacaagcaagtgatcgttaaatcaaggagaacgcaagtggacgaggccgacatgatcctaactattggactcccacttgtgaaacttacttgatccatttcccacttcataatttcgtaaaaaaattaagacaatgagaatgaatttatttatttatttttcggtagaacaatgatttttattttgtccaaataaaacaatcgtgaaaaattatgttttggacattatcaactttgtgagtaaaacaaattttgtagtttcttttaaccaatattttcgaagtcaacttttttctacgtgtgagtgtattgagtaaatgatagatatgtcaataataacataactcatcaatcaatctggcttcaatagaactagagaagttataacgtttttttttttttagacaagagggttttataactctagactagtttcatagtccatgaaaaaaacatcaaatctcctaaatggctggacataattcagatgattttgtatgaaataaaacataaaacatatattttcttgcatatctggagatttttgtttctttattacaatgactaattaatttaccttgttcctttttatttttgcaaaatgattactgttatctattttgtccgtttctaataaaataaaataacaatctgagctgtggaaagaaaaaaaaaggaaaagcgaggagagctaatctgagtcgttgcctctgtccactggctcggaccgacctcgtacctctttcatttgtcctcgagcttataatagaggctacgccgtcgccgccacctccgctccatccattcacggccaagcgacgactccaccgcttaggcttggcgtctgaggtatactgatcaacgctttctgttttcggaggagcgaggcggagatcagcttctcttatgtctactcaaacatatcattcttctttagccactcgatttcttctctagcggctccagaggtttcgtcgctacagagtcaagttcctcttttcaggttttgtggtaagtaatcgttaaaccctaagtatcggaccttgttgtttaatctgttcgtgtttactctcaattacatatgcattcttctgcttaatcgtttcttttagtttaatttctagggtttacatcccaaaggtctgatctttttgcatatttgtgtgaatcttagtttttttttttttttttggaattgaatgtgatgagttgggtttgatactgttaaagatcaaatctttagcttcgttgaagcttcatatttatgtcaacaatgcaaggtttatttttcttccacctttgatttgatatttataattgtttctttgaaggtgaacaagattttagttacaaaaaaatggtgggactggaagatgatactgagagagagaggtcaccagtcgtagagaatggtttttccaatgggtctcggtcttcttcttctagcgcaggtgttttgtctccatcacgaaaggtcactcaggggaacgatacactttcttatgccaatattcttcgggcaagaaacaagtttgctgatgcgcttgctctctatgaggctatgctggagaaagatagcaagaatgttgaagctcacattggaaaagggatatgcttgcagacgcagaacaaagggaatctagctttcgattgtttttctgaagcgatcaggttggatccgcataatgcttgtgcccttacacactgtggtatacttcataaagaagaaggacgcctcgtagaagctgctgaggtgcaacattacattaccttctatctgtgatgatttgcattagagggtgctgcattagttagaccattgaacttgttaaattggtgatatgcaattatgcattaggttttttgctaggtaatcagtttctaacgattaatcatcatattttgcacagtcctaccagaaagcattgatggcagatgcatcatacaagccagcagcagagtgtttagccattgttttgaccgaccttggaactagcctgaagctggctgggaatactcaggaaggaattcaaaagtattacgaagcccttaagattgacccacactatgctgtaattttctgttcctctaccatttcacactcttggtaccatttaactgattctctaattcagtatgttataatatatttatgcagcctgcatattacaacttaggtgttgtatactccgaaatgatgcaatatgacaatgccttgagctgctacgagaaggctgcacttgagaggcctatgtatgctgaagcatattgtaacatgggtgtcatttataagaaccgtggtgacttggagatggcaatcacttgttatgagaggtagcatatctgttaattcatctctaactgttgactggtttcttgctactttgttgaacgtgcaagtaaggcgctgatttttttctcttcttcttctgcctttagatgtctagctgtgtctccaaactttgagattgcgaagaacaatatggccatagctctgacagatttaggaacaaaggtaagaatccttaaattttatcacaatttataactcaagtatactttttgtaaggggcgccttctggaaaattcgttataaaacttcgttttgtttagctcccctttgtgctgtgtgtgctttgtacttatgtcacggcaatggcattggaatctgtttatgttctttactagtgaacttttgcgctgaataattttgatttgcagtttcttaatccttcttttccattggcgagaagctgttcagctgtgagtacatctgacttgtcaaatgtcaatgatatttcaggttaaacttgaaggcgatgtaacccaaggagtggcatattacaagaaggctctctattataactggcactatgcagatgctatgtacaatcttggggtggcttatggagaaatgctaaagttcgacatggtatttaatttgtgatttgttcatttctgtaagtcagtaatggtgtggttgttatcgcgtgtttatcctttcctcgccactttactcgcttgataaaatgatatatatcttgactagtttatctacctagatttttatccttctccacatgttctcgtaattaatccaaaactctgtatgtagatctctatattataatggaattgtagagccaaagaatgaaatatgtctgtggtcatgattgcattctcaatgtgcaggcgattgtcttctatgagcttgctttccactttaatccacattgtgctgaggcttgcaacaatttgggagtactttacaaagaccgtgacaaccttgataaagctgtggagtgttatcaggtaatatttttgcagatatctgtagcgtttcatgagaatttcattgtgtttggtggcttattatatctcccaacctatgtagatggctctatcaatcaaaccaaattttgcacagtcgcttaataaccttggtgtcgtctatacagtccaggtttgatatatattaagggcggcttaatgttttcttaattgaatctcctaagtcgatagaatgccaattcctctgatattacaggggaaaatggatgctgctgccagcatgattgagaaggctatacttgctaatcccacatatgcagaagcttttaacaacctaggtctgttttctcatcttctgttctttacgagcttcctcacgtgttacaactgcttagaaactatattcctttgaaatttagattttatgtttgtccttttgtttctacctccctggcgctaagagtcttgtagtgtctgtgataaccagtttcatggtgcgattcaaatgtaggtgttctttacagagatgctggaaatataactatggctatcgatgcttatgaggaatgccttaagatagatccagattctcgcaatgctggccaggtatctatactttagcgtggtcttcttgttatgaggttgaaagatatatgtgtttaaaaccttcttgtccccttttgtagaaccgattgcttgccatgaattacataaatgaaggactcgatgacaaactatttgaggctcacaggtaagcacatatattattaatgtagatttgtattatgttgcttttatgggtcttacagtgaaaaaatcttctgaacacagagactggggttggcgcttcacaagattacaccctcaatacacttcatgggataatctgaaagatccagagcgacctatcaccattggatatatctcaccagatttcttcactcattcagtatcttatttcattgaagctccccttacgcatcatgattatacaaagtacaaagtggtggtttattcagcggtagttaaggtaggatttttacctatataacttatatagatacattttccctctaagcaattcatttcctggttctcgtggcatttttcccttttgagcaatcattggtctctcatggctttgcaggcagatgcaaaaacatacaggtttagggataaagtgttgaagaaaggtggagtttggaaggatatatacgggatagatgagaaaaagatagcaagtatggtcagagaggacaaaatcgacattttggtagaactcactggtcatacggcaaacaacaagttgggaacaatggcctgcagaccagcaccggttcaggtgagaggatatattaaacctatctcattttgttgtttcgggttttgcctttgactttccatttcaagtgtacttatattggctaagataccaggttacttggatcggctatccaaatactacgggtttgcccactgttgattacagaattacagattcgttggctgatccaccagataccaaacaaaagtacgttttggttcaagatgcaattttgggtttcggaagtgctccaaataaaaatcttaatttttatttatttattttgtgatatttgattgcaggcaggtcgaggagctggttaggcttccggactgttttctttgttatacaccttccccagaggctggtcctgtttgtccaacacctgcgctttctaatggctttgtcacatttggtagtttcaacaacctcgcaaaggttaaaaaatttgtgtccttggattatgcacaccaatctcccctagtatctctttcaatgttttgacaggtttatctctgtttgtgcaaatcagataactcctaaggtgctgcaagtgtgggctaggatactgtgtgcagttcccaattctcgtctagtggtaaaatgcaaacctttctgctgcgatagcattaggcagaggtttctcaccacgctggagcagcttgggttagaatcaaagcgtgttgatctcttgcctttgattcttttcaatcacgaccatatgcaagcctattccttgatggatattaggtaagatttgacacatagtgctctgtaaaacaccgaggcttatagattcacatatttaatttacatttattgcagtttggacacattcccttatgctggaactaccactacctgtgagtctctctacatgggagttccatgtgttacaatggctggctcagtacatgctcataatgttggtgtcagtcttctcactaaagttggtaagctcttagcaaaatttttttttttttttttgcaaaaattgttgttagtcggacatcttttagctaattcagccatttcttgattcaggattaggacacctggttgccaaaaatgaggatgagtatgttcagctatctgttgatctagcctctgatgtcacagctctttctaaattgagaatgagtctccgggatctaatggctggatctcctgtttgtaatggtccttcctttgctgttggtcttgaatccgcatatcggaatatgtggaaaaagtactgcaaaggtgaagtgccgtccttaaggcgaatggaaatgctgcaaaaagaggtccatgatgatcccttaatctcaaaagacttgggaccatcaagagtcagcgttactggagaagccactccgtctctcaaggccaatggttctgctcctgtaccttcctctttaccaacccaatccccgcagctctcaaagagaatggactccactagctagataaccagcaaatcgagctgctgcgaaatgccggcagagagtcttgacccatctggaaaaggtgtgaaagaaagagtcgatgagcttttcctgctatttacttccaagacaataggaactagactttagattactgcttgtgtagtaaaaagaatagtaaaaccagctctttcttttgttgtatctctttctactcttagtttagctttacatgattcttgggaagtcgttaggtggtagtggatttggagtttttcttctcatttgagagatcaagttgttgtgtatcgattagggttttaaggctttttaggatgttttcatgtgttggattttgactcatatgatagtaaatatagttatagaaagcttttcggtgcctttacctatttcataatataattatctaaaactcctgcttaagcttaatcccataggtgagacccaatgaaagacttttgacttgtatgattatgttgccaactccatatctctctttaattaattaatatggagagagtaaaaaggcaagcaactaactactcttcaattcaacacttcttctgctccattgcttccaccagaaccctaaagaccttataaaacccaatcccaaatccctttgctcattcaccaccaaagcatccaactttctttgcttcctctttcaaagcaacacaaaatattaaatctcaagaaacaaagtaaagaaaaatgaagaacgaatctaccttcattgatgtccctgcagaatccagctcagccatgaaaggcaaagctcctctaatcggtgtagcaagagaccacactactagtggctcaggtggatacaacagaggactcgccatctttgacttcctcctccgtttagctgccattgttgcagctttagctgctgccgccacgatgggaacaagcgacgagactcttcccttcttcacacagttcttacagttcgaagctagctacgacgatctaccaactttccagtacgactcatagatgcttgattgatcaaacagatgcttgtgtttttcttgagaaacacgtcacctaattaggtcatattttttcttcaggttctttgtgattgccatggcccttgtaggaggatatctcgttctgtctcttccaatctccgtcgtcacaatccttcgccctctcgccaccgccccaagactcctcttgctcgttcttgacactgtatacactcaaaactcttcaaattatattgctttaaaataaaactttagtatcaagtaaaatactaagaattgtgttgggaacagggggtcctggcgttgaacacggcggctgcatcatcggcggcagcaatatcatatctagcacacagtggtaaccagaacacgaactggctccccatttgccaacagtttggagacttctgtcaaaaatccagcggagctgttgtctctgcctttgtctccgtcgtattcttcaccatcctcgttgtcatctccggcgtcgctctgaaaagacactaatcaaaaccttatatgtgtgttcatcattattgtaaaatttatgtcaccattgtgtaattattactcatccatggccttgtgaattgtgttgtattaatctttttaaaaaggaaaatgaaagtgtgattgtagctctgcttttctggaaaaaaattgaaatgagtttctcaattttttgtccaccaaagcctatgagattataaatgtctcctatatttgtctctacgaaaatacccggtaatgataatgttacagtgagtagcagagaaatatcttacgtggtgttatcttagtggacgttcacggagttgtcgttggtcataatgtttctgtcttcctttttttggtttaaggataaacgagccttcctggtgccacgtcaccttttcgtcttctgctacttcgtcttcttcactaaatgattcagtattttctcctcaatcttctccattttctcaccaaaccaaaatcgtgaaagaatattttcccgcttcatgtagatggcagctagactacaacgacctgggcttgtatcctcaaggtaaatcaaactcactacaattttcagatcattcccagaaatttattagtggaattaatcaaatttggggttttctccgtcgtccatcttcaccagtgttcaattttcgattccgtttatacactcgcttagctcaatcattagagtaggtgcagcttagtttaagtcaaacccagaaaagggaaacttagacgaatgattcaattttgtactttgttcacggtagatcattcttttgattttagtggctgcttaataactgaatctcgccttttgtagctctacttcaaaaccatgtcttccaaggatgtccattgttactttcatatcctgcaaaaggactgtacacttggagtacttatcaaattgcttgagcaatccgaggagccaattgtttgttagatatggttttctggaaaggagcaacaagaagaaatcacagaggctggtcttggcatctgctgaagatggagtagctattaatggaagtcctcagccaagatctagtagtaatttggaggacatgaggactagtttcaccggatcattacaagacgaaaacaattctaatggacttaaccagtctttgcatgatgctgctagatctattgaattggctgttaaagagaagattactccgtccagattttcgtggtttccttcgacttggcttggtgctgataaatatgcatgggtgaagactctttcgtatcaggtccgtatgtgccttttagctgcactctcttgttttacattagtttgatgattacagtatttctcagttcaacttacattcatgattttacaggcttctctgtactccttactgcaagcagtaaatgagatttcatctagaggcaattacagagacgaggatattaatgtctttgttcaaagaaggtactgcaccaattacttattgaatctggtatttgacatgaacacaacttttcaattcgtttttttgttacctataagtttatctcagctacttccttgtctaaagattagatttctgtaatggttaaatctatcgatgcaatgtctaagttggctttctgagtcaggccatatcttccggctaagctattcctaatgaatctcaggatcactatgttaactagtgaacagaaagtttctagcttttgcaaagattgtgtgagatttccagtggtgttgctttgttttagttcctgcatatttccctgaggaatcttctttcatcaatgatggaaatctttctggaactggtcgtcgctatctaacacttcaacctttgagtttttatttttaactattttgcttatgttcaatttttggcattatgcagcttatcacgccaagctgctccccttgagaatatgatgcgagagaatctttcttccaagcatcctaaagcctatgaatggttttggtccgagcaagttccttccgtggtgacatcttttgtgaattatcttgagggggaccaacgttttgttgctgccacttctgtgtatgttttctttttcaaaactccttctttttggtttaatgcttagtctcaccttattagtaaatactgtaaaacacgagtttgattgtgaggttttgaaaaagtaatgattctttatggttcctccagctatgcaaaaggaaagtccgcagctgcaagtaatgagattgaagtgtcacttctcatgcttgtactcaattgcattgcagcaatcacgaaagttggcccagcaaaattttcctgcccacccttcttctctatgattccagatacaactggaagattgatggaaaaacttgtagacttcgttccactccctcaagcgtatcattcaatcaaaagcataggcctacaaagagaatttcttactcattttggtcctcgcgcagcagtgtgcagagttaatggtgacattgatacagatgaagttattttctgggttgatcttatacagaaacaactgcagcgggctatagatagggagaaaatatggtcaaagttaacaacatccgaaagtatagaggtaagaactgtccagaggatacatttaaactgtttatagactttctgtgcattggtcaaattagttctttttgatgtttgaatatgagcataatagcttgtctagattactcaccttataaagtgactttgaccatgagaaagtggcacaaatttaagggagccctagaggatctagataaagtgaagctagtagaagcaaaaacaaataatgggagactatagtttacggagttacttttcctaaaaaaacagtgattccaagtttatctcggttttattaccctgcaagatttattgtatacttgtatataaatcttttgaagttaattggcacctgtcggtgccttgcaggttttggagagagatttagcaatttttggattcttcattgctttgggcaggagcacacagtccattttagctgcaaatggttttgattctctggagaatcctttggaagaccttgttaggtaattgtcactgtttcaccctattctcattcctataaacttttgtaagtttgtgtttgcttgtcaaattgttgaccaatactcatgaacttttaatattcaggcatcttattggaggcagcgtcctgtactatcctcaactttcagccatcagttcataccagctgtatgtagaggtagacattaatcacatcatcagttgaaattccctaaggattatattgatgtcttttcatggaaattaattgtgtaggttgtttgcgaagaactagaatggattcctttctatccaaacaatactggaacacagccaccaaaccaatcacatgggcataagaccaaaccagaaggaccacccaattatgaagttattccccaactgttggatgtttgttcttattggctacagagttttattaaatatagtaaatggccagagaatccatctaatgtcaaggcagcaaaattcttatctaaggggtatttgacataatgtttaattgtttactcaatatttggacaagaaagaacgtttttatttatcctgctgatggtctttcttaatgttcaggcacaagactttggttcggtgtaaagaagaactggggatattaaagtaagataacggaacctctctctctgatttatacattcttgcctgcagttggaaaatcactttcctacttgattggtatactcgactaataattgtgattgtccctgtgtgaaaaatacttccaagcaaaatccaaagcatatgtcttggatatttacaattatgtcgtagttacaacaaattgagtggaaagcacccttaacggccatctgcattaactttacatttgtgacattcatgattctggaacctgcctttatcagttaatcccaatctagcagactgtctgcatttggattacttgtgatgcaggatggaagtaacaaataccttcttttttttttacaggaatgcatcatcaattgttagagagtcgaactcatttgacaaggttggtcttttatgaaattttctattgggaagaactgttgtacttcttagttcttacactacttgtatccgattcatgttaaagatttttgtcatattgaagacaatttatatactaacagtacatagtccccaggccctagaaagtgtagatgaggccctcgttagactggaaagcctgctacaggagttgtatgtatcaaactcatcgtctggaaaggaacaaataaaagccgcgtgctctgacctagagaaaatacggaagcttaagaaagaggctgaatttctggaggcaactttcagagccaaagcagcttccttgcaacaggtttttttttttcattgtcactttttgttttgatcctgctagttataatttatctgaatgctagatggaccaaagcaaaccaattgtatccctctctaagcagtgtagcatcagtctcagactctcagtataggacaataaagtaataattgagagtgcatgttttgtttttaaatttgtgtgggagactataacctcatatgttaaactcagggaggtgacaaaaatgattctcaagaatcctacgaggtacaaaaacggtattttaaagggaaagacacaaagaacgcaaatagttctgaggatcaaggcaaaaggtatgctacctattgcttagtattattcatcttcatgcttgccgtgttagtttcatctatataagggtgactactcttttgttccacgctggtcacaatgatgtatttgttccctctgcattagtataagtcgtggattctggggattctttgtacggccttcaaggaagaagcttgatcctgagttatcggtaagctccattttgtgatcctatctcaagtattctggcaacgggctttgcagttgtagtatcctgaaattttctggtgactcttctacgtagcactctgtgtttgttcagtctgttacttagcatatactactcttttgttttcatttatgcatttaaaatccagtcatttccagtctagcacggataaaggtttcaggaattagtttcgcatatgcagggagatgaatatattgggaaatccagtggaaacttacttagcatagactcggaaccaattgagatcagccgattcgaaattctaaggaacgagctaatagaactcgaaaagcgggtcaaaagaagcactgatcagtcagtagatgaggaggttagtaactgctgcaagatttcttagctgtcaaattgctagtttcaataatgcactcttttcatcgtaagttaaataaaaagctcataccgaaaaggaaaaatgaaaatactatttatcatttcagttgagttaaccatcattttagtaagtcaaaccctgtatgatgaataatcccgcactaggataattatgtgttgtgctcttagctctgtttttttcatgattaaacttctcaacatggtagaagatgaccaatcaactcccttatagtaatccaaaatgttgggtcttgcgtcttttgtttcaccagtacaagcttccaagtgtttgttcatatgttacaggaattaatctctgaggatacacctcaatcaagcagtagaacggaaagtgttcagttggttcagactcccaagaaggaaaacatgatggagaaaactcttcaaaagctaagagaagccaccacggtatcaatatcttcaactaaagactacaactatatggcgtgtttctgtgccattgggtcattgtcttttcctcttgtcagctttgttaacatttttccatttacaggacgtgtggcaaggtactcaacttcttgccattgattcagcagctgcagtgcagctacttcggaggtctctgattggtgatgaattaacaggaaaagaaaagaaagccctgcgcagaaccatgactgacctggcgtcagttattcccatcggtattctaatgcttcttcctgtaagtcaaaaataaccttacagataagtttattttcacttctttttttattatacacttttttctgaatcactccaagctacatcttcaattagttgctttgcacaatcttatggcgctaacctctgctgtttaacatttctcattcacagctccattttctaatctatgggactaatatatttagtatgctattctgaacaggttacagcggttggtcacgctgccatgctggctggaattcagagatatgtaccaggcctggtacgcattccttctctgtatatagattcgtcagaattcaaaaacttctcattgaatcagttttgatgatattcttcattcagattccttccacatacgggtccgaaaggttgaacctattgagacagcttgagaaaatcaaggaactgcaaacaaatgaaaccgagagcgaagaaggcgtagaggaaatagcattatgagtagaaggaagcaatatagacttgtacctctattcactttgttcggtaattcattgccaaaagctgcgcatagagaatctcgttccatgtgtccggtactccgggtaagcaccagtgactgcagtcttgaggagcatcttcaggagttcccggttctcgataccgcgaaggatgagcatctttcctgaactcggtcagatatgtaatgttcagaaacttaaccttactatgttcatatctcatttcttggattgcttgagaaatataattgttgtggatagggtcaggttccattttcttcatatcagtctctggctctgtatctgcatcacacaaaccacccaagttccatgtcccattcctacaacacccataaaggtcaaacctgggtcaaagttctaaagactatgtcgtctgattcgtcctcttttaattgtttctgaaacagacctgtagtgtacaggagagaagcttctgaagaagacatgactcctctcagaatctagtctctctaaaacccatgacttccatgtctttaaagacttctcaaatccctccattactcccatcgtcttgttcaatttccctccctcctgaaaatagcaacccctgcaaccacaacaacaacaacaggaagaaacccggtaagactcatcaaacacctttctcttgttaccagaatgttgcattcaacatgaagatcttacgcgataaaggtcttgtcttcgttccaccaatgccctgtattgaagactagaacatcagagccgacccattttttggactgccagttaaactcatcgactctaacagtcattttgacatctaccggtgagttctcaggaggccgaccaaccacaaccagaaacggtgttctatgatattcaacggttaggttttgttccggaaatcgcatcgaaaggaaacccttatgcttgcttatagggtttccattaacttcatatatctcagatttattagacactgcttgtgaaagcatacacagaagagattcccattggtttcttccgatagaatctccgacgaacacaatcctcccattccgactcctctccagaaaatcacttgcgttaaatctgtaatcgttttcacaacaagtaaacatatttaacacatagagtaaaagaaaattgaatttgattggcattggcgcaaagttcataaataaaggtttaaagtttcaacccttacgtcacaaaagcaattcaaaattcaagtgggcaaatctttgtttctttttaatcaaacaagattaaagttagtttttagaaccagtgattgtaataactctataagctctaatggatcaatgtaattgcctgtaaccctaaccctgatgtttgttttactcagaaccataccttcaggtccaagcaaaattacataagaattaccgtggaagatcgcagccatgtggttgccatcgccattgtcgaaaaccagaatcttttcttccattattcagacaacgaaaaccaggatccagaaaccgacactcttctccataataagaggtttcgtccacatcacggcgtcgacgaacccatcttccgtatgaatagtcgcatacgtcgtcgtttcctctttccttcgttagggttcggggcgacaataagaatccgaaacagagatgaggctcgaagccggcaagatcaacgacgataacagagaatattaggaaggtgatgagaagagagatcccaacaaatatatgtttcttgattttcaacgttgagaagaaaggagacgaagatagagagaaaatctccttcagaggatttgattcttgatgatgatccatgtatgtcgtatagaagagacgtgaaaatgtgaatatgctgcgatcttcttttgcgagagaaaagtcttaataaatatgtttctgtagggaaataaattcgttaataaattaatttatagatccatcatcaattcatccatgtgacagacaaaagtattaatgcaaatgcatcccacataattttattaacgtatagtaatagaagtttactcccatgttcgtttctactatatcttttagatcgagacgagttttaatttcccaatatattaaagctgtagtatagcaaactaatttccttatacatcaatttgatgattctgagtatctaatctaatgataataatcaatgcattgtcctaatcgttattctatgatgaaagatagttgatgagagatttaagttgaatttcttcgcctaccatattaatatagataaggaatagcccgcagatatagtgtatatagatataattaattaaattggaccgaacttttcgggtatggtcgagtatccattaccaccactcacaagtagcacatgctgatttgctttacaatttcaatatttttaaaaatccctattggtgaatcattatactaaagagcattaatgggaatgacgaaacaactataagagtgaagaaacaaacactaaaaaggcatattaatatgaaaaggttcatacaagtatgtgaagactttaccttcacaagatggctttgatttaattacgagtccgtgaacttatataaacaagggaacactatcaaaagtaataaaatcttctcttttctacatggaaatgtttcaaatgacaaaggtaattactacactctgtatgatttaatatccgaaaactctttaatttgaagagcactaaagaaaccaaagaacagagagaagaggagaaacaagaattagagaattaaaaaaaaaacaaaaaaaaaatagagaataaagaagactaaaagtcatgattgtttgtttgtgtttatgcttgtgtttgtgttgccgttttagaatgttttaatcatatatagaaacagaaacttgcgtttgtgttgccacttaccatttaccaatacactcatatatatgcagaaacacgaagacaaacataaatgcatagaaagaattgggacctaaacccatttttgtcatagcttgtaaaaatgattcatattccttttacactgtctttgtaatgcaaaaacaaaatagagaatcaaaagaagagtgtaagtaacacagcaacaaataaaatggtccctggctttggctttggaaaagagataaaaggcgatgtaacacaacctatatatttacacacatgctatatatgaatatgctctctcttctttaatcattcgtaattaggcccacaccttttcttctcgtaatctcctcacatgaatctctcaacagttcccaattcatctttcatcatcaaatacatgctacatgtgtataaggtttagcctaggcctagctcaccaatttggggtacctgccctcaaatgacttttgtgctatagaaagctttcattggttttattttagccttcaaatatcaactactataaacccacactaattcacatcttttgcatatactttttttttctgttctgactcaaatgtacaatagaaacaaaatctcatcttttatttttattttcaaattagttaaatactaaatacataacgaagctactaataatattaattcttgtccattttttctctatgacaattgggccaagtatgggcccataatctaaattctaaagttaaaaatctagaaagttgtcacttctttttgaatgtcagtcatcaacctcgtccatctcctacctgctccaatgcttccccagcaaatgatatattctgtttcacaattccaacacgcaattttattatttttattatcatcaaaaacaaattgtacaccgaattgtatagaataatatgaaaaataaaactatctttagtattcactttatttcattaatttaagtatacaaatatataattctaagcatttcaaattatatctgaacattacaaaacatggtaataaattcaaaacttatgtcattgataagtttgtaatgcttttagtcagttttgctttccagcttattagtcaataatttggtttcacaaaaaaaactgacggtgcctaacaaattagaatagtaaaaccaaaatagagactgttttcacaggaaactatatacttacggctgatattaattaatgaacaaaaggaggctacagagacaaaagagtaaacaaaacaaatcaaagtaatcaaataaaaaccaaattggccatgtggttttacagtcaagtgtatagtattattctctctgattcctcctttatataatttattaaacataaaaatctctttcaggtctattttaaaattactaattttcatctgtctcgtctcgagaaacagccacgacatctgtttaataattatatcatacgtaagcaaaaatttgaatctgacaaaaatgtaaaaaaaaaaaatatttaccatgggatgaggagttgagtaatagtaaatgtgttggtcattatagacatcaggacgcggtggtggctcgacggcatcaccatgacattcgaggttcacgccaaaaagcctcaccgtcctcgagctacctgcgaccaccggtggtatcgactgagcatgatcaacgacggcgcctacaatttttttccaccgtcaagacacgtgcgcatcttttagttaaattgtttttttaacatagaattaaaaggaagaaataaagggcacgttagtctaagtggattggacggttctcctcacgcgcatgtaacggattagttacaacttggagaagattatttgaaattgtcgggtccaaaattaaataataagaatgacaaaaataaaagacaaaatgttatttcatgttgttattttatatacattacacacgcaactaaaataattgtcatatagttttagataactcatttgctttttataagaaagatattccaccagctaactaaaatggttgagctttccaagtgcttgccctaacctttaaaaattctcatattttgtttataaaaccaaataaagatgaatgttcttgtttactaccatataaagtaggcagataatctaaaataccatgcataaaatattaatctctattactttttttaagagaacatgtaaatatgcaatacaaattacgaatcatctatttttatgaaaaagacaaatcttaaaagagaacagagaggagtataaatctgacatatagataagagagaaagaaaaaacaaaagaggaaataaagggtttgaatttaccatagtgtgaatactcttggtgaatattagggtaagtagttgacgcgtgtacttgacgataaggtgtagtcaagccgctccaatacgccgtcgtattaactagagcttcttgagacacaacggagacagcgggagaggaagaagcttcaccgcgtctccgccagccaatgaagagtctatggagatcaaaacggtgacgttgaaagaaaacaacgtcgcctgcgtcgaggtgtttgtctttgacgtacctgctccatcctttggtcaacacgtagctttggctactgttccaataagagtatctgaatttccaacacttgcctgactcatcctcgaagctaagaagcatccctttctccgtcgtcgccacgtcatctccgctgccgccattattattattattattgagagggaagtatttctcggcgtgttgttttggtatgactaagcggtttagctttccgacgtcgcttggtgtgagtgatttctcgaacaaagactctcgttgtgctatagctacgtcgttttggtggtgatgatgcaacgagagagtgttgtggtaatggttgactgacatctttttttttggtttcttggagtgagagagagagagaggatttgcaggtgttggtttggtggtgaaagagagatgggtaatggtactaatatagtattatacaaaggagagagacagagagtgaaaaaaattgaaaatggttaaattgatgtgaaaactgtgggaactatttgatgaggagaggacgacacgataccgatagtacttttaaggttttgcgtgatgatatttcctttcaatcattatttttatttttttctcttcttttctatattgttgttgcagtccataatccatatatatttaaaaatgtggtattgtttttttttttctcgtctgataaaatcttgtcctaaacggcattggatccacgagtgttctatagttatagtgtaaaaaaagagtaagccacacaaaacgccgcgacgtaaccctttaattaaagttgaaaaggttttgatcatgtagaagaagaatatgtaattatttatatattagtaaaatttgatgtcttggaatgttataagttcaacatatgttatttcagcattgccggaactaaattcgaaatcctccggagaaaagatgatttgtgttttcttaattaaaaaagtttcagtattcaccggatatgacgtattgattagcaagattctatagactgtcaaagcagataaaccttacatatcaagcagccataaatatgtggattgcgtaagtcaaacaatcctttatcatggactcatgtggtttgcaattacttgatcagatcctcattggtttctgaaggattaaatttctctcataaatggttatttgatcatttactcttgtatgaattttcagctgagaatcttactaactgccattaatttatttgcaagacaaagatagtcgttttgtttttctcaaccatttggttcgtggaattgatgtgtcagtatcttttgtctataaacgtaaaaataatcttttgacaattaaattttgttaaagtaggataagaaattaactagagataacaccttcctatgatatttagtttgtaaatgaatctatgagaaattgaaaacgaaaacaaaaacaaaaagagaaggtaatgaagaaataatgaaggattaaagatcaaacggttgagaagtgaggtggtacatattacgcaaaagtaagaaggtacagaggatacttatccctgacgcaagtgagaagctcaagttgtgtagcatgtgctttgcctttccgacacaccatcgcatgcatcttcacttctacttcataccatcccttatgttcctctctctctttctctttctctttatctacattttattctctctttttcttttcctaatcattttataatcgagagggataaagacttcaagatttatttgtgaaatcgacttgaccttttggcactctttctctttttttcctttacaatattgaacaacgtaaccatcctatacttcgacgctatttaatgctcatcaagctgtgatatttgaccaaacatataagtcatgaatctagatgagaaattgagaacagtgtgaaacatttgatcaattgtagaagaaaaagttctaactaatatatctatggatcgcaagtcaacaagtaaacaaacattttggtctagctagatgcttgagtaaatgttgttttcttgtttgatgggtaaatttccatctgtagttattaccgtgcatcttaagtcgtgagtttcgtatataattctgtgaatataagtaatataacataccaagtctaccacaaaaatcaatgggacgtgcaaatggttacgtgagtggtcctcttctattttatttgacgaatttctcaagtatcgttaattttatttaatatctttatcacttgttaattataggatcatgaaatatctgtcacgtgctttcaggaatatcattggtgcttacacgtttctatttttcctaattttctcgcaaaactaagactagtgatactatttcatatttgttttcatgaaccatttcctctaagaaatggttcctctcacaatttaactcacctaattgggaagcattaacgattaagagcatattttgtaaaaatttccaattcacgttttgtaaaagttttcgttgaggtcaagtcttgtgactgttataacaatagtataacaaatagccgaaacaactagggtttccaaattccaagataattgtaagaataaaagaaaaaaaacaaagatataagattcgttatatttgacgtgtttcactcctctcctcacacttaatcgattcaaaataagtgatataaaataaaataaaatttgtagtgatccatgttaattatgtctaagatatgtcattgtcaaatattagttttgcataattaaaagaggcactgaaggacaaactgacatgattttccaggtcgatttagaggcacctttttgcatgtacgtctgcaactcgaccccattaatatcaaattaaactaactcttcaattcactataagttaaagtattttattttcgtaagtatattttcgaataaatattgaataaaagtaagactagtctaattgttaagtattaattcatgaatatagcacatgtttgggggacatatcccttcccacgaataatagaggttgttggtcgcttgcttacttcgtctttttttctactaaaaaattataagagaaaacaggtgtatcagaattttttgtttacgcatcgtaattttttaaaaaataaactatactaccgacgtctcccatcaaatattaagctttcttttgtaaaatggcgattttttagaagttactatatatgaacagcctatcttaaatgaatgtattactagacaatcactgatccagtaaccactgactgattagattccaggtttagaaaaataaaatttaacaagataaagagtttctgttaattgggtttgatttactagcttcccgatcctagctagtcaataatgctaaatcatgtattcaatcacctaactaaattgatttgcgtcgtataattgacctgtcacacttagtgtacctacatcctagagcaaacctcatttctgatttcataatgtattatggaagaaattacatctttttaatattagaacatatataagacacaaacacaaagttgactgaaatcttctaattcatgttattagtttggtaatattaacgaatgatactccatccgttttcttttaaaagtttttatttgttcatattatttgatttttttcaattcactagacaaagtttatgtttatttaaatgatcatccaaaatctacagtacttgctttcattggttgaattatttttggttatataataaatcacattttattagtttttgtgttttatctaaaatattttagaaaaagtaacggaaggagtacaaattagtactattaaacaaaatttcatcgtgattaacattctcatagtcaaatatttttattacccttcacaacatttcatcgtgattaaaaaattgtttagtgcaaaagaaatgtagattaatgaacttgtgatattaataaacacatgttaattttaattagtttagcctcttctgcgaacaaactttccaacaagactcttaatcacattaatcgcccttttcaacaaacactacagcttgtctagatacgtcaccgaacgatgccacaactttctcaccaaactcgtcaattcaacttttttaatatgatgactttttcctgttatcaaaatccatataaaccctataaacttagctactttattgattaaaataacacgattcccatacttctaacgaatgcgacgttgcctctcaagcacagatccaaaaaaaaacgtattgtattttttctttccataattggttttcaccactactatttttttttccttttttgataaaaactactattgtttatttcaataatttgttaatgaaacctctttaagtttgaaatatttactccttaataacagaagaaatgaagtgttcgaaagtgatttttggtttagatcacaaaacgactggagaattttgtgacatttagaggtcatagctcgaaaaacggagattgttactttatgcgtgtattccagaaatacgacaaaaataatgtttattatatatagtcatggcgtttggacgaaataacaaacaaatcactcagttttccacgatcacataatttacgtgactgttgcattagtggaaaataaataacaaagcaaaacaacttactaccacaagttttaaaacaaatgttttagaagatttccacttggctgcttgtaccatctctttttttttttttggatctaaggccgcatgtgccatctatatatgtaatatcacaaaacatttttggatttgaaattacagattaaagtgtgtttcatgggtatatagacatattacacgacatagacacgaatatataggattataatgatatcttgagcacaaaggaaagacacgagaggaatctgccatgtaattcgtggagggttcctaaaatgataagtctgcaaaaaaaattttgataaaaatgttcagaagacgacaaacctagtttgtcatttatggaaagtgaatggtgcgagaagcttcatgaaactcaggggtaagttgctacttttgctttttatttttctatttctgacattttcaccattccctagcaaattaaagacaggtttatgaattgtctttctatttttttctcttttagttcttgctatggcaatattaatccattggttataatattatgataataaatctacacattaaacgagtcatgttgaaaccaatggtgtagatcctgcatgctgttaattatatacaaatacgtcggcaacaatgttcgagatgattaaatattagccctatctatggctattcaaatattttcttaatggtttaaattggtctccgaatttataagaactactactagtagaaaacaagataattcagtctcttgactaccatatatagtaaacgtcttgttttttacaactgcgacatattttcacttatgatgatggtaaacgactaaatgtgtgtttgacctcgcgttatgattaatgtgtagctaaaaagttgctgcaagcaaggaaaatttatatttatatgggagacgttgtaacattaaccacgtcatcagtctctgcttatttaaaaaaaattgtaagaaaagtggtttaacctttaaagtaactatccagattttgaacaatcctaaagtaaaatagtaacaatcagatatttatatatgtacgtgtgagatttaattagtttgcatataattttaaatttgtttctcctaagtaggggaccaaagctatttgttgtatattctatgaaaccaaagctaaatgctcggagggagtggaccacacatatttcttttacatctttatctttttttgtgttaagaggtttaaaaaataaaaatatctgcactgttcagatataaatttatgcagccgatatcttagacttagaccgaaaatattaaatctcaaagtatagaaagaaaaaaacaagagtaataagtaacaaacaccaaaattccgtagaaaaaacacaccaatagagtaaactgaaatggaaaatatcacaactagagtaaactgaaagataagcaattatgaaacattatatacaacccctaatataataattcattaatttattcacattaagttattggtttctatttgaatattagagttatttaatagctgtcaaaaaaaaatagagttatttaataaacttaaaaaagtcaatattatttttgatcgtatattacaaaaatcataacggatgataagtttaacacactgttcactatagaagataaaacatttaaaacttttacttctaatagaaaattaaaataaagaaggttataaaatggagaagacaaaaataaaaggtacggctaagtttggcggtttgggagagttgaaaaacaaaagaagatagagatggtgggacaatgagaacaacacacaattgcacgcctctctctatctactctctgagctctctacattgcatcaaaatttcgattatttgagagtccccatttcaaagttaaccaccttttgcttcttttattacaatataatgttaaatcagtagtttacgaacgcctatgaaaatgatcaattgtagtcttcaacattaccaatcaagatgacaatataaatacacggtgtgaaatactgtaaataaaaacataagagaaatcatatacgactaattaaaaaaaaaatatatatgattcgatgccttcgcttataatttttatagaaaacaaaaaattattgtattttctaatttttttttttaactttattttctttacgaatgaaagatgtgttttaataaagaacttacattatggggataaataataatagaaaaataaaaataatgaaagcctatatatatgtatccctctaatgatgtgtataattaggattagacatctcataactctcaacaagttgacttgttgacttagctcttcgtcaatgagagcgaacatgtttgttggaacacatcattagtggacaaatgaatgcagattaaaagaaaaattataatcaaattttctagaaaaacatatgacagatactttgagagataatagagtttttgtttgattgaatataacatattgtggtttgttttcacgtggtttagaaaagaaacaagagtgggcttttaaattgggcccacagagtggcagaagcagggctgagagagtaatgggtcctacaaaacgcccatgatcccaaaatttccaaagaaaatggagacaatcttctgtgtttatccgaaagctaccctcacgctttggattttcttcttcttttttttttctctctcttttcttttttaatactacttatttttctataaatttgtatatctagctataaaggtaatagaaaatggtaagttattttttccttccggtacaaaagatgaaaacatgcaatagtcggcaaaggtccacactccacacatttgtctgcacatctatccaatattcattcataggttcaaccacaactttatctactacatatatattttttattttattgaacgaatttatattcgttttccatttctgtcatatatcatagtagatgttgatagttgggtaatggagcaagtgaaagattgatggttggtagaccatagattcatgcattcataccataaggtatactgatggtgattgggtaaatttttgagtcagctattacaattgaaaagttcatcaaatgacaaaactattacaacttagatctttgacagccaaaagaaaaaaaaaaaaaaaagagaaaaaaaaaactaaattgttgttagaaattagaagtcagaagtaagaagactcccataggaatacagttctggcaaccaatttcttagttctttattgggcattcatatcttagttgggcctgactcatatatattttgaactttttgtacgcaattgtatctaacactatagtcttacattgttcatatatttaatgttttatattgattgctacctatatattttgatatgatgtagatccaactatttctaggttgaattgtcttttcgaacagattttgtttccggattcaccataaaaaaaaaaaaaaacttatgtgacagaaagtactatagaaagaatcgtgtttacaacaataaagagacttgacccaaacaaaaaacgtttacaacaataaagagttgaacaataatacggtacgattgtgtatgttgaatcatctcctccacttggacgtgtccatttgacaacggaaaaaagtgtggccgtgttatctttctttgtaacgtttacagtttcaattgtttagtttgatcaaataattaacttgtgaattttatggatgcaatatcttgaaaactaggaaatcatatctgatcatcctgctataaaaaaaataatacatgcattttaatattcatggtttcacatgaatacttcggtcatccatttttcaattacacgagtgtaaatctgtaatatcaatattcatttataattataacgggttgtgatttgtgaaattgtgggtatagataaaacttcaaaacctattgaaatgaatatctatatacttggaatagtagtagacacattttgtaatgagtaacttaagcacaccggttctcactcacactcgtctaatggagaaaaatggtatattatatacctcatataggaacatgatcatatgatttaggagtcataagcatgagattaacaagatattttggtccacattaggaatctactaaaggaactattttcttataacctaaaaatcttggtttggtaaaaagaacaaccttagattatttggtcttttatcgattcatgtaattgtgtatcaaatgattaaaatctaatgcatcctactcaaacacgtcatttaagaaaccctatatagtacaaacacgatccaatctccaaattaacccatagtatatcatagacgagcataatatttttggtcaaatataaaattagatgcactagttccctttatttaggcagatggactttcttctaatcgaaaataattgttctcaatgagccgtcaaactttgtgaaatatggatataaattcatgacatctacataatttttggtttaacatgtgaaattgaacttaggatctatttcattcgaattcttaccatatactaaccaaatataaataatgtttactgctaaatactatttatataagtttgttcttcactaaagaaatttgttgattagtttgtttttctaattgagaatctcttatttcaggaccgataaaaaggaagtgatttccggttttcgattcaattatttcggtttaagtcggtttacaaatcatccaccctgtaaatcacggagcaacatccataatccatacagatcaaaccacgtggacatgttacagtgttccttatcacagaagatgagtactcctgtcatctttccccttttcactttaacataacactctgtacactagtctgatcaaaaaacctcaaaacacagcaaccgccatttctttccaaattcccccaattcccattccaactttatcttctgaagtagaagaagaagccatagaaatgctttgaagtttctgtaagtgttcttactcactctaaaaacttcaattttggtctttgtgcttttttctaacagatcggtgaaattttctgaatctgctttttgtttttccaggtaaagagaaagatctacaattgttttgaatatgccgaggcagaatcaaagcgtagagaatctacttctacttggcaaaatcaggaaacgtggttgttcttcgccgacatcgtcgacttcttcgattctccgtgaaggttatagattcaaaagagcgatagttgttggtaaaagaggaggatccactactcctgtacctacatggagacttatgggtcgatctccttctccacgagcttccggtgctttacacgctgctgcttctccgtcgtctcactgcgggagcaaaaccggtaaagtatcagctcctgctcctgtttcagctaggaagttagctgcgacgctttgggagatgaacgagatgccttcacctagagttgtggaggaggctgcgccaatgattagaaagagtagaaaggagagaatcgcgccgcttcctccgccgagatcatcggttcattctggttctctaccgcctcatctttctgatccgtcgcatagtccagtctctgaggtaaaatgctttggttatgattggttgagaggaagagaatgtgctgtaattccaacttcttgctggctgccatgtgctttaattctgaccgatcaaaagagagagagaaaaacaataatatatatagtatagtattgattgattcggggaagttataaagatctcatctttaactgataaaattgataatctttgtgtgattctaaggtctgaatttagtcaaagttgtgatttttttggcaacctctatgagtattttaatcatcaagggagattattattcgtataagcttctggttgatgttaaggagtgggattagagaagaatagaaaactgttttgatcttaagaatcttttgtcatgtgctctataacgcacatttatgtttatatgaaagggcgtttctttataagttggtgcctattattcttgcataattgggcacttctactagtttttattctttctcattcgttggtcatatggaggtagctggttgttttttagaggttgatttattgtgaataatgtaggcctagattctcttataatggagacctaagaaaaattatatataatgctaaatctggcaatggacaatgcgaagaattctgctttctttacttctgtgtgttaggtaattggatagctgagaaacttgttgatttttgtagaggatggaaagatcagggactgggagtcgccagagaagagcttcatcaactgtgcaaaagcttaggcttggagactgcaatgtgggggctagggatcctattaacagtggcagcttcatggatgtaagttgatttttttatttttttttcactcttggggatgtttctttgagcattatgaggaaccctttcttctagcagttttcataattttctcaaaccaaatttggtatttgattaaggatgaaagtagtatattattgagcattattggctccagaggctgttggtttttttactttggaagcatacgtacacataatctatggtttgttttgttatgcacagaaacattgcaaataacggtataagaaactaggagacactcaatccgttatgattagttaatttgcctccatcatctataaatcaatatgtgtgcaagagagtgatgttcaaaaatatttgaaatgtgtttttccaatgcagattgagactcgatcacgggtggagacaccgactgggtcaactgtgggtgtcaaaacacggttgaaggattgtagtaacgctctcacaacatcaaaagagcttctcaaaatcattaacagaatgtggggtcaagacgaccgcccatcttctagcatgtccctcgtctctgctttacattctgagctcgaaagagctcgcttacaggtcaatcagttaatccacgaacataaaccggaaaacaacgacattagctacttgatgaagcgttttgccgaagagaaagctgtgtggaaaagcaacgagcaagaagttgttgaggctgcaatcgaatctgttgctggtgagctagaagtggagaggaagctgaggagacggtttgagagcttgaacaagaaattgggcaaagaattggctgaaacaaaatcagctctgatgaaagcagttaaagaaatcgagaacgagaagcgagcgagagtgatggttgagaaagtttgtgatgaactagcaagagacataagcgaagacaaagccgaagttgaagaactgaagagagaatcttttaaagtcaaagaagaagtcgaaaaggaaagagagatgttgcagttagcagatgcattgcgggaagagagagtacagatgaaactatcggaggctaaacaccagctcgaggagaaaaacgcagctgttgataagctaagaaaccagcttcaaacttacctcaaagcaaaaagatgtaaagagaagacccgtgaaccacctcaaactcagctacataacgaagaggctggagattatttaaaccatcacatcagttttggatcatataacatcgaagatggagaagtcgagaatggaaatgaagaaggttcaggcgaaagcgaccttcattccatagaactgaacatagacaacaagagctataaatggccttatggtgaagagaacagaggaagaaaatcaacgccaaggaaaagcctttctttacaaagaagcatatcggattgtgttgattgggttgtacagagcgagaagcttcaaaaaagtggagatggagggttggattggggaagatctattgacgttgagcctaaagggtatatagatgaaacacaagcttataaaccaaacaaggcttcttcaaaagatcaccatatcctctcgggttcgagactaagtaacttccgcggtggatctgtttcaaagtcgcggttatcggatgcttcgaaaggcgagaaccagaatgccagaaaatcaagatggtaatatgatcaagaaattttattcacattttcagcgcagagataacagaatctaaagactttacatctacattttttctctgttcgctcgttttgtcaagagtgattctctcatctgtaagtgacataaaacatgaatttgaactggtaatgatccaaacatgtaagagcatgaatttacacgaaatcgtcttttgatttatatcatttaagagttagaacgcctacaagatcgaaaaaaagacactaatcgtcgagccatttcctgattcgatccttgacgaaatcattacgagctttgacgcgagcttgttgcggtgagatgttggcgagtgagagatacgctccggcgacgaagagagaaacgcccgccgcgaaaaaacccaccgacactactaactgccgccgtgtcggcggatacgacataaaaaacaccatcttatcgtttaccgccgtctgttgcaaaagctgtttaatactaactgttaatgggccggggttttttattttattttgggctttatttttaatctccaatttctcaacaaattaaaaaaaaagagtattaaaaaaaaggaatgaagattaaaccgagaaggcgagaactttttttttttttgttattggttatttaatattataaacaatggtttaatggattattttcgaatttagatccatacaaaatttgaaaagagcccaatcaactataccaaaccgaaccaagctcttaaatcaaaatcgacccgagctaataaactgactaaaccgatctactatgaagccctaatcttcaatcggaaaatccaaaaaagccgccggccaacagatctgcgaatattcttcggaataggacttccgacgagtctggacaatgcgagccgaacggagatggtaacacagatttcgtcgccatcccacgactgtagagcaatatatgattgattgttgatttttatggtctgtgtgtgggtttgttgatctaaatcttattgtattgtaagatcaaaagccaagaaacgaaagatccggagtaagctcaacatcatagcaaaaatgttgctcgtgaggaggactaagatttggctttgagctttgattctacgacgttttactcgctatgaatctaaacattttgtaagtaaagcgtgaagcttatgtcgaaatcatattatagctactaaaataagtagaatgtctaatctcttagatcaacaatataatattaataggctacatctttataaaaattaaggctagtatttacttaaaattagtgtttaaggatattttttttaaaaaaaaaatcataacattaacatttatgaaaattatttttgattttcatgatattaactcacaaaatctcattttcaatgagaatatttgaaaaatggtaaaaaaaactcttgtctttaaaagaaaaatatgtattcaaggcaacaatttaaatttttgccttaaaccgcttttgaccttcgcacattatgtttcatagataaaaagagttatggaaaaaactttagatcttaacctaaaatgcatgaattatagttaaggttggttcgatattgataacattatgatattgcacatatattaatgtgattcatgtgcctgaaagatctgaaggtcttgtcaaacgaagtaaatttaatttttgttttaagagatctgagatcaaaaaaattactgagtagctatatcaattaaaatctattgttagttttcagaaatagagaccgaaaaagaactactgttctaaattaatagtgttagacattggacataaaatgtacaatcttgcataaaactggtttgatttgattttttaatgtcgtagttgttataatattacattagtatatgtataaagcaaaatcttcagtcctctaatcttccctctagttttcattttctgttcttagaagcattttccttcactataacattaaagtttttcctaatcttgcttctcttagcatttgtaatagtggtttttacaaaacgataggattaacaaagacaaattcttaaaactaattcggttaattgctctactcgacttgagaatcattcatattctctgtgacaataattactttagcttttgtattgtgaagttgagaataagtaaattaattaagctaaaatgtctaaattatcaaattgtttggttagtctgtccatgtcgtttacacttctaaagatttacgtatttgtaagggattttagtcaactaaactgaatcattagatgatatgcatttaatttaattagccgtatttattataatccacgcgtctatcatgttcagatacggtcaaatttaatctttaaatgtaaaagtatagttcatgaccaccaattaagcaatgtatcaaactatataattgtgtaaatattttttttacaaaaacaaaaagacaagaaatattaaagctaatttattttctgttttgtcgacaaaaataactgtaatttaactttggttctctttattttaacattttaattccatgtatttctacaggtattgttacataagataccaaatccgaacattggttttcattcatacttatctcttaacattaattgtaaatccagccaagcatggtcatagtttcaattaaatgaaattaattgtaaggttgtcagcttttattatactagtagttcggaagatattacctcttccgtgttattattatctttattatctattgtttttaataggaaaatttataaatttgtgtttaccaatttcttcttacaaaaaataaaataaaaaatcattaaataacttcacatgggaaattaactcacactgcaatattaatagcttgcttttggtgtgaagctacgtgatattgcagtcacaacaattaactttgacgtagccattcttttagtatcttgtaagtttctttagaagattttgtaatcctgtgattaacattaatatatatacatttaattcttttcctgcttcgattaagacaccttttacatatacgtatatctgttctctttaatacatttaaaatactattctgtatttttttcagaaaacatattttacaaacatacactgatacacataatctttacacttatacataaacgtacacaaagaggtgtatatataacctagctaccaaaaaataacaacaaaatggaataacagttaaagcatttactaatataaccaattgaagaaagctgagattacttgagactgtactaaaaagtatgattagaatgaatgatttacgtctacaaatctagcacgtatattgctcgactagttccgtgtcaatgaagattgtctagaacaattaaagacgttttcttttcttttcttcttttgtcaacagactaacagagcaattaaagacttaaaagtactgttactttcagttaaaatttgtcgaggatattaaaaataatttctcggacttgagattttttttcttttttaccatatggtttgctttcattcgaattttattatttgaatcttagtagtatttgcgatgttcaaaagtaaaaagttactataattgttcgcagttaaagactagctagtctctctagctattatcgttggagtattatttatatattttcacctatcataattaaattaggccttaatgaatatatctctctctctccctctaaccaactttatgtttgttttataaaatggcataagcataaccaacaagaagacgactttctcaataaaaccaaaacctctttctcaatcccacatagagagaaagagagagagagagatgagtcggaggaacaagaacggccctaagctcgagctgaggctgaatctttcgccgcctccttctcaagccagccagatgagtcttgttcgatcaccaaaccgatccaacacgacttcaccaagctcatgcgtttcatctgaaactaaccaggaggagaacgagacaataacctcaatggttcttgtgggttgccctcgttgccttatgtacgttatgctttctgatgatgaccctaaatgtcctaaatgcaaaagcaccgttcttcttgatttcctccaagaaaacgcttttgccgctacaaccgctaccgctgccaataccagacgcaagaagaagacctggtggaactgaatttattaatgatccaaccgcgttttttttgttgttgtatgtaatcgagggatctcaaaagtcaaaccgaaatctaaactaatccaaccgtatttttctggtttctccttttatttatctctttagttgttttgtctttagagtagtgctaatcacgctccacttttagaccagactcgaagtgtagcgcgactagcactaactttgcttaaaatggaagaatgattatttttgttataactggtgatgcttagtatgacgaaacatgtgttgttgttttttttacatatttactttttgtttttactatgaagttattacagttcagcctttccggtgaattttccggtaaccatcttaccccaaacaagtttctttcactagaaaatcttaatcagtgactcctcatgcaagtggagatgtttctcatcctcggtttctcgaacatatctaagagtttttcggattatgtaagactcgtaagagaattgtagaagagtaataaaaattggcacttttttttttctcaacctttgttccttggagatgtgatagagcaacttcctctgtttcttgattactttgttttcatttcctaagcaatcacaaaggcttatagtgtattaaaagtgaaaaaagtaaacgaaaagttaggttaagttacaaatggttagagataaacgccaagaggtgataatcaaataatcttaatatctagcaagaaatgttgtaaagtgttttggttgtcccaggagcaaaggaataattttggactaggatccagattaaatttttagtctctgtggtcctactaaatagaagtctttgagtttgcagttgattactcaaatggtttgggtaccaatatttgactccccatcataactcagacctaaacccctgtttgaatgtttttttttggttattgtccttggggaaccaaatttatagatttttctattttgttgcgcaatgatgatttacccttcacaaataataccaaaaactagttcctgatcactaacaatatttttgtttcctgaaaattgcattattagtcaatgacagtaaaaaaattggagttgtttgtgtggcaaagaaaaaaagaacactgaaaaatataaatgataaattcagaaaatctattttttttttttgagaatgctattgctaggggtgaaagttggttaaaattgaagaggaggtagttcagataggtttcaatatactatttaaaagtaatgttttcatttaaatcaaatataaatgcaatagtaattgaggcagttgagaattatgagcgttacgtaaaatgataaatacgaatttaattccaccttcaataatttatttatttttgtcaaaaataaacaaagaaaatggtactacaatttacctttcttgttgagttatatcttcttcttttctttattattatcttctttatcattcactaaatgtcacctttctgttgcaaccttcatatttaagcaaaaatctcattcttcaaagcctcattttctgtttattaagagtcactatccattatatagttctttttcttcccgggaaaaatctagaaatttcggtttatagtttacgtaaatgggaccaagaattaaaatcttactaatcgcgatttattggattttatatacgaattcatacaacttttgtggttgcaagatgatttgcgattgaccaacttgcactctcctaaaatttctttgtaactagataaccaaacattttttacataaaccatctctctgacaattactattaaactaatctgtttaaaacaaacattttgatggttgacacttattttgttggaaggaagagacaggggaatgtactttactggagctgtgaaaaccggttcttgattagagtggctacgtgctgcgcaacccatgccgagccagccaccgtgcagcagaatccgtgcgtgtgaccttccctctcgatagataaggaagtatgcggagcttgctttgaaatctggacaatggagagattctatgagagaccttccttctatcgttaggataatgcattttgattaagcgagaagaagggaaaccaagtaacctcttcaaagagttgcagtggaccccaatgatcatcaatgccaaataaaaatgcaagcttgctctggttttctctcatgaaatcccaatctggctctgctgcaagcttatatgccaaaaatgaaacagtggatcgtcacctagaatgctttagttggagatcaactatagggcaagcttggtcatgttgtagagctttcaagtaaacactttgcatactttgaattcaaaatgagactctaaactctatacaacacattgttgaaagaagagtacctctctaaactctgactttgccatgaagagaacattgcgcatggtgtgatactgcaagcatcagatgaagttaagtcgtctgaatagttagtagggaataagaacttaaagtatcaagaaaagaagatgtaatggccatcttcaagtctttatacaactaggttcaagtgtaaaacccaagaaaatcagtgaatatgagataatcaatacctgcctcaagtgagtgcaggtagcttgaacagcagtatcagaccatgaagctccaatggatttagatacaagcagccgtgcagctgacataggtaaaagtctcagcgatgcaatcagaaaacttgctgtagccgacagaacagaagacctgcacaacatgataacgatttcacaacattctaaataaagactgattggttctttcctatcgaggattcgtattgagaacaaaagctcacgctgcaagtttgccaattaatgattgctttgttgattgttggttcaaagtcaaaaatggatataggccaatgcaatataccacctgcaaagcattccagagaataatataagaaaaatcacatagcactgaaagaaattgtgatggagaaagtactactcttagaggaagccatctataccttgtccgagaatttcttcaataactcaagggatatataagacccaatagaatgcccaacctaccaagatcaattaagcttagagttgtaaattttcatgaaaatctggaaatccatccaactaatggacatatatattttggtcataagaagcaatatgtcaatggcttatacacatgacagtcttaccaatattattggaactttcacactctccaactcctgtctgataaaatcaatctgtatgataactaacagattaagatcttaacttcacaggatgaacaatacaagaacctaaaggctttcaaatccaagagcaatgaagaaaaatgatttttattaccttatgatcaatttgttcttgaaatgaaaatagcctcccagactcccagtcctaaaagtgaaaataatcaagtatcatgaaagcctatcaaactaagatattatatgaagagaaccatcaaagtttacacacagtaaaacctgaaaccaaagttaacgtaccttgctcgtgtgagatatttgcccaatagctacacaaataaaacaaaccactccaccattagagatcagaagaacaaactcaaactcagaaataaacagcttccatcttaaggactcaaagaaatcaaactcgaaaagtagagcagccataccaattacagaagcatttccaccaagaaactcgtataaagattccaaaaagtccttgtaaaatgacacaactcctgaaaaattacaagccaatgtatgaagcacactagtatatacacgtgcatgcataagagtcttgagcataataatgaaacctggatttcccggaataaacaatacatggaatgtgggattctcagcttgaatttccatcatctccgtcatcgaactttgatcacaaatacaaaaaacaaaacaaaaagtgtaactatagtcaaagaaattagaaaatttcgtaaaagattaatgtaacaatacccagaaactctgcacaatctggatttaacatgtcttttagtttcattcatcaatttgttttgagtctccatgtctccggtcacgcgattcaacttatatcttctctcagaactgtcaacacttgaaaggagaagatcgagagaattaatgagacaacagagaaaccactaaaaatcaaaactttgcaaaataagtgaagaagccttttaaagtaaaccaagtgaagagagcacaacaatgcacctgaaacaacaggagtagattagatactttggagaactgaaccaccgatcggaggaagaaagtaacggagagacggagttacccaaggtagaagaagaagacgcatatttgcagcaatagtaatacgacctcgttttgagtaacgcgacgtcgttttatgagtttgggtgtcgtcaggcttatctccacctcatacttccactacaaagagaggtgattgacagatagataagagtgtttggtagctcagactcagagagtcacaaagtgtgtgtagcagcaatggcgtctgttgcttcttcaactactctcatctcttctccctcttctagggtttttccagcaaagtcttcactttcctctccatctgtttctttccttcgaaccctttcttctccttccgcatctgcttctctccgctccggatttgctcgacgctcttccctcagctccacttctcgtcggagctttgctgtcaaagcccaggccgtaagtttatctaaatgtcgatacttttcttattcgatgtcattgaaatctgaattcattagcctgttatagatttcactctcttcctacttgttagccctataggttttggggaaatagttaacgatttataggttatgcgaccgtgtttctgcagattactcgaaaagttcagaaatttgagtgacattttcgtttagggttgttaatttctctggtgaagtgaaattgagtgacatatgagctatactcattgactgattagtatgttcggatgaggtctatgtagttttggtatagtaccatggttatctgattgtcaatttgactgatctttctccttagatttgatgtgttaacgagttttaatttggtgattataggatgatcttccactggttggaaacaaggcgcctgattttgaggcagaggctgtgtttgatcaagagttcatcaaggtacttacagcagttatcaatcacagttgctgcttctagttaatctgagattaagtttagttttgaagctgaatgagtagtctttagtgttttttatttagtgagtatatgtcttattgtgattggaaactaattggtaactgatgaatgtatggtttcaggttaagctctctgattacattggaaagaagtatgtgattctctttttctacccattggactttactttcgtctgcccaacaggttagcattgctcgagaagtatatcaaaattgaatatccaaggttccctcatccttgagtcctaatctttctcattttttccttatgtcttttagagattactgccttcagtgaccggcattcagaatttgagaagttgaacaccgaagtattaggtgtttctgtcgatagtgtggtaagtatcactatacatttactatgttctcattttactcagttcctcatccttggttgacatcaccatgttcttatctgtttgcaaatttttgattcattcttatttctgtgtgtcctcgtagttctctcaccttgcatgggtccaaacagacaggaaatctggagggcttggtgatctgaactatccccttatttcagatgtcactaaatcaatctcaaagtcgttcggagtgctcatccatgatcaggtaattgttagcctttaaatcttggctaccttcctttaaactttcgaagtgtttgggataaatgaaaacaagaactttgtttgtgtaagaacagggaatagcactgagaggacttttcataatcgacaaggaaggagtgatccaacattccaccatcaacaatcttggtattggccgaagcgttgatgagacaatgagaaccctccaggtaaagatacaaataaatacacacaactccaaaaaccgctctttcctttcactcgatttccggtatgcttaatacgttttcaatgttgcaggcattacagtacatccaggaaaacccggatgaagtctgcccagcaggatggaagccgggtgagaagtcaatgaaacccgacccaaaactcagcaaagagtacttctcagctatttagaaactctactatgatagcaaaaaggtacaatctttgttatatgtgagcagagttttttttcttgtacgctaaaacaatcctttgtttgattctcactttgtccccaaaattataataaaaaactttttccgttaatggaagtcttattgtgttacgcctacaaattcatattcagttgatcacttacctaagcatgtacactgtacatattaatggtaaaaatcaagaccattttgtgatcttctttgatagcacagagaagccattgttctaccatatacgctagtcatattaaaggacctgtaaaaaaaccaaaggacagaaattataaaactatcatttctctttctttaatgcatctatatgataattatgatccttaaaaagctgatgctacctgtaaaaaagttgctcatgtgtccccctgccaacaaattccaacatcattaatcatcatcaacccaacctcctccgtcaactgatgaccggtaaacgccggtcaactctcctgctttaactacactacgtcccggtcattattttttcacactctctctcaaacgatgcatgccctcaccaactccggcgccgtacttctcgccgtgttactcttctttctgctcatccttttcgccgagctctcttacatcttttgttgccgcaccggatctttaccgtctccggcaagtaaagaggttcttttccaattcttgatgtgttgcaagaagaatcaccaccactctcgtattgagccatgcaccggtattgtttctgtacagatggaggaggatgttgttgctgcggcggtgcctgaggaggaattc

SEQ ID NO: 407 - DNA, 45173 bp, Arabidopsis thaliana
aagcttcaaaaaagtggagatggagggttggattggggaagatctattgacgttgagcctaaagggtatatagatgaaacacaagcttataaaccaaacaaggcttcttcaaaagatcaccatatcctctcgggttcgagactaagtaacttccgcggtggatctgtttcaaagtcgcggttatcggatgcttcgaaaggcgagaaccagaatgccagaaaatcaagatggtaatatgatcaagaaattttattcacattttcagcgcagagataacagaatctaaagactttacatctacattttttctctgttcgctcgttttgtcaagagtgattctctcatctgtaagtgacataaaacatgaatttgaactggtaatgatccaaacatgtaagagcatgaatttacacgaaatcgtcttttgatttatatcatttaagagttagaacgcctacaagatcgaaaaaaagacactaatcgtcgagccatttcctgattcgatccttgacgaaatcattacgagctttgacgcgagcttgttgcggtgagatgttggcgagtgagagatacgctccggcgacgaagagagaaacgcccgccgcgaaaaaacccaccgacactactaactgccgccgtgtcggcggatacgacataaaaaacaccatcttatcgtttaccgccgtctgttgcaaaagctgtttaatactaactgttaatgggccggggttttttattttattttgggctttatttttaatctccaatttctcaacaaattaaaaaaaaagagtattaaaaaaaaggaatgaagattaaaccgagaaggcgagaactttttttttttttgttattggttatttaatattataaacaatggtttaatggattattttcgaatttagatccatacaaaatttgaaaagagcccaatcaactataccaaaccgaaccaagctcttaaatcaaaatcgacccgagctaataaactgactaaaccgatctactatgaagccctaatcttcaatcggaaaatccaaaaaagccgccggccaacagatctgcgaatattcttcggaataggacttccgacgagtctggacaatgcgagccgaacggagatggtaacacagatttcgtcgccatcccacgactgtagagcaatatatgattgattgttgatttttatggtctgtgtgtgggtttgttgatctaaatcttattgtattgtaagatcaaaagccaagaaacgaaagatccggagtaagctcaacatcatagcaaaaatgttgctcgtgaggaggactaagatttggctttgagctttgattctacgacgttttactcgctatgaatctaaacattttgtaagtaaagcgtgaagcttatgtcgaaatcatattatagctactaaaataagtagaatgtctaatctcttagatcaacaatataatattaataggctacatctttataaaaattaaggctagtatttacttaaaattagtgtttaaggatattttttttaaaaaaaaaatcataacattaacatttatgaaaattatttttgattttcatgatattaactcacaaaatctcattttcaatgagaatatttgaaaaatggtaaaaaaaactcttgtctttaaaagaaaaatatgtattcaaggcaacaatttaaatttttgccttaaaccgcttttgaccttcgcacattatgtttcatagataaaaagagttatggaaaaaactttagatcttaacctaaaatgcatgaattatagttaaggttggttcgatattgataacattatgatattgcacatatattaatgtgattcatgtgcctgaaagatctgaaggtcttgtcaaacgaagtaaatttaatttttgttttaagagatctgagatcaaaaaaattactgagtagctatatcaattaaaatctattgttagttttcagaaatagagaccgaaaaagaactactgttctaaattaatagtgttagacattggacataaaatgtacaatcttgcataaaactggtttgatttgattttttaatgtcgtagttgttataatattacattagtatatgtataaagcaaaatcttcagtcctctaatcttccctctagttttcattttctgttcttagaagcattttccttcactataacattaaagtttttcctaatcttgcttctcttagcatttgtaatagtggtttttacaaaacgataggattaacaaagacaaattcttaaaactaattcggttaattgctctactcgacttgagaatcattcatattctctgtgacaataattactttagcttttgtattgtgaagttgagaataagtaaattaattaagctaaaatgtctaaattatcaaattgtttggttagtctgtccatgtcgtttacacttctaaagatttacgtatttgtaagggattttagtcaactaaactgaatcattagatgatatgcatttaatttaattagccgtatttattataatccacgcgtctatcatgttcagatacggtcaaatttaatctttaaatgtaaaagtatagttcatgaccaccaattaagcaatgtatcaaactatataattgtgtaaatattttttttacaaaaacaaaaagacaagaaatattaaagctaatttattttctgttttgtcgacaaaaataactgtaatttaactttggttctctttattttaacattttaattccatgtatttctacaggtattgttacataagataccaaatccgaacattggttttcattcatacttatctcttaacattaattgtaaatccagccaagcatggtcatagtttcaattaaatgaaattaattgtaaggttgtcagcttttattatactagtagttcggaagatattacctcttccgtgttattattatctttattatctattgtttttaataggaaaatttataaatttgtgtttaccaatttcttcttacaaaaaataaaataaaaaatcattaaataacttcacatgggaaattaactcacactgcaatattaatagcttgcttttggtgtgaagctacgtgatattgcagtcacaacaattaactttgacgtagccattcttttagtatcttgtaagtttctttagaagattttgtaatcctgtgattaacattaatatatatacatttaattcttttcctgcttcgattaagacaccttttacatatacgtatatctgttctctttaatacatttaaaatactattctgtatttttttcagaaaacatattttacaaacatacactgatacacataatctttacacttatacataaacgtacacaaagaggtgtatatataacctagctaccaaaaaataacaacaaaatggaataacagttaaagcatttactaatataaccaattgaagaaagctgagattacttgagactgtactaaaaagtatgattagaatgaatgatttacgtctacaaatctagcacgtatattgctcgactagttccgtgtcaatgaagattgtctagaacaattaaagacgttttcttttcttttcttcttttgtcaacagactaacagagcaattaaagacttaaaagtactgttactttcagttaaaatttgtcgaggatattaaaaataatttctcggacttgagattttttttcttttttaccatatggtttgctttcattcgaattttattatttgaatcttagtagtatttgcgatgttcaaaagtaaaaagttactataattgttcgcagttaaagactagctagtctctctagctattatcgttggagtattatttatatattttcacctatcataattaaattaggccttaatgaatatatctctctctctccctctaaccaactttatgtttgttttataaaatggcataagcataaccaacaagaagacgactttctcaataaaaccaaaacctctttctcaatcccacatagagagaaagagagagagagagatgagtcggaggaacaagaacggccctaagctcgagctgaggctgaatctttcgccgcctccttctcaagccagccagatgagtcttgttcgatcaccaaaccgatccaacacgacttcaccaagctcatgcgtttcatctgaaactaaccaggaggagaacgagacaataacctcaatggttcttgtgggttgccctcgttgccttatgtacgttatgctttctgatgatgaccctaaatgtcctaaatgcaaaagcaccgttcttcttgatttcctccaagaaaacgcttttgccgctacaaccgctaccgctgccaataccagacgcaagaagaagacctggtggaactgaatttattaatgatccaaccgcgttttttttgttgttgtatgtaatcgagggatctcaaaagtcaaaccgaaatctaaactaatccaaccgtatttttctggtttctccttttatttatctctttagttgttttgtctttagagtagtgctaatcacgctccacttttagaccagactcgaagtgtagcgcgactagcactaactttgcttaaaatggaagaatgattatttttgttataactggtgatgcttagtatgacgaaacatgtgttgttgttttttttacatatttactttttgtttttactatgaagttattacagttcagcctttccggtgaattttccggtaaccatcttaccccaaacaagtttctttcactagaaaatcttaatcagtgactcctcatgcaagtggagatgtttctcatcctcggtttctcgaacatatctaagagtttttcggattatgtaagactcgtaagagaattgtagaagagtaataaaaattggcacttttttttttctcaacctttgttccttggagatgtgatagagcaacttcctctgtttcttgattactttgttttcatttcctaagcaatcacaaaggcttatagtgtattaaaagtgaaaaaagtaaacgaaaagttaggttaagttacaaatggttagagataaacgccaagaggtgataatcaaataatcttaatatctagcaagaaatgttgtaaagtgttttggttgtcccaggagcaaaggaataattttggactaggatccagattaaatttttagtctctgtggtcctactaaatagaagtctttgagtttgcagttgattactcaaatggtttgggtaccaatatttgactccccatcataactcagacctaaacccctgtttgaatgtttttttttggttattgtccttggggaaccaaatttatagatttttctattttgttgcgcaatgatgatttacccttcacaaataataccaaaaactagttcctgatcactaacaatatttttgtttcctgaaaattgcattattagtcaatgacagtaaaaaaattggagttgtttgtgtggcaaagaaaaaaagaacactgaaaaatataaatgataaattcagaaaatctattttttttttttgagaatgctattgctaggggtgaaagttggttaaaattgaagaggaggtagttcagataggtttcaatatactatttaaaagtaatgttttcatttaaatcaaatataaatgcaatagtaattgaggcagttgagaattatgagcgttacgtaagaatgataaatacgaatttaattccaccttcaataatttatttatttttgtcaaaaataaacaaagaaaatggtactacaatttacctttcttgttgagttatatcttcttcttttctttattattatcttctttatcattcactaaatgtcacctttctgttgcaaccttcatatttaagcaaaaatctcattcttcaaagcctcattttctgtttattaagagtcactatccattatatagttctttttcttcccgggaaaaatctagaaatttcggtttatagtttacgtaaatgggaccaagaattaaaatcttactaatcgcgatttattggattttatatacgaattcatacaacttttgtggttgcaagatgatttgcgattgaccaacttgcactctcctaaaatttctttgtaactagataaccaaacattttttacataaaccatctctctgacaattactattaaactaatctgtttaaaacaaacattttgatggttgacacttattttgttggaaggaagagacaggggaatgtactttactggagctgtgaaaaccggttcttgattagagtggctacgtgctgcgcaacccatgccgagccagccaccgtgcagcagaatccgtgcgtgtgaccttccctctcgatagataaggaagtatgcggagcttgctttgaaatctggacaatggagagattctatgagagaccttccttctatcgttaggataatgcattttgattaagcgagaagaagggaaaccaagtaacctcttcaaagagttgcagtggaccccaatgatcatcaatgccaaataaaaatgcaagcttgctctggttttctctcatgaaatcccaatctggctctgctgcaagcttatatgccaaaaatgaaacagtggatcgtcacctagaatgctttagttggagatcaactatagggcaagcttggtcatgttgtagagctttcaagtaaacactttgcatactttgaattcaaaatgagactctaaactctatacaacacattgttgaaagaagagtacctctctaaactctgactttgccatgaagagaacattgcgcatggtgtgatactgcaagcatcagatgaagttaagtcgtctgaatagttagtagggaataagaacttaaagtatcaagaaaagaagatgtaatggccatcttcaagtctttatacaactaggttcaagtgtaaaacccaagaaaatcagtgaatatgagataatcaatacctgcctcaagtgagtgcaggtagcttgaacagcagtatcagaccatgaagctccaatggatttagatacaagcagccgtgcagctgacataggtaaaagtctcagcgatgcaatcagaaaacttgctgtagccgacagaacagaagacctgcacaacatgataacgatttcacaacattctaaataaagactgattggttctttcctatcgaggattcgtattgagaacaaaagctcacgctgcaagtttgccaattaatgattgctttgttgattgttggttcaaagtcaaaaatggatataggccaatgcaatataccacctgcaaagcattccagagaataatataagaaaaatcacatagcactgaaagaaattgtgatggagaaagtactactcttagaggaagccatctataccttgtccgagaatttcttcaataactcaagggatatataagacccaatagaatgcccaacctaccaagatcaattaagcttagagttgtaaattttcatgaaaatctggaaatccatccaactaatggacatatatattttggtcataagaagcaatatgtcaatggcttatacacatgacagtcttaccaatattattggaactttcacactctccaactcctgtctgataaaatcaatctgtatgataactaacagattaagatcttaacttcacaggatgaacaatacaagaacctaaaggctttcaaatccaagagcaatgaagaaaaatgatttttattaccttatgatcaatttgttcttgaaatgaaaatagcctcccagactcccagtcctaaaagtgaaaataatcaagtatcatgaaagcctatcaaactaagatattatatgaagagaaccatcaaagtttacacacagtaaaacctgaaaccaaagttaacgtaccttgctcgtgtgagatatttgcccaatagctacacaaataaaacaaaccactccaccattagagatcagaagaacaaactcaaactcagaaataaacagcttccatcttaaggactcaaagaaatcaaactcgaaaagtagagcagccataccaattacagaagcatttccaccaagaaactcgtataaagattccaaaaagtccttgtaaaatgacacaactcctgaaaaattacaagccaatgtatgaagcacactagtatatacacgtgcatgcataagagtcttgagcataataatgaaacctggatttcccggaataaacaatacatggaatgtgggattctcagcttgaatttccatcatctccgtcatcgaactttgatcacaaatacaaaaaacaaaacaaaaagtgtaactatagtcaaagaaattagaaaatttcgtaaaagattaatgtaacaatacccagaaactctgcacaatctggatttaacatgtcttttagtttcattcatcaatttgttttgagtctccatgtctccggtcacgcgattcaacttatatcttctctcagaactgtcaacacttgaaaggagaagatcgagagaattaatgagacaacagagaaaccactaaaaatcaaaactttgcaaaataagtgaagaagccttttaaagtaaaccaagtgaagagagcacaacaatgcacctgaaacaacaggagtagattagatactttggagaactgaaccaccgatcggaggaagaaagtaacggagagacggagttacccaaggtagaagaagaagacgcatatttgcagcaatagtaatacgacctcgttttgagtaacgcgacgtcgttttatgagtttgggtgtcgtcaggcttatctccacctcatacttccactacaaagagaggtgattgacagatagataagagtgtttggtagctcagactcagagagtcacaaagtgtgtgtagcagcaatggcgtctgttgcttcttcaactactctcatctcttctccctcttctagggtttttccagcaaagtcttcactttcctctccatctgtttctttccttcgaaccctttcttctccttccgcatctgcttctctccgctccggatttgctcgacgctcttccctcagctccacttctcgtcggagctttgctgtcaaagcccaggccgtaagtttatctaaatgtcgatacttttcttattcgatgtcattgaaatctgaattcattagcctgttatagatttcactctcttcctacttgttagccctataggttttggggaaatagttaacgatttataggttatgcgaccgtgtttctgcagattactcgaaaagttcagaaatttgagtgacattttcgtttagggttgttaatttctctggtgaagtgaaattgagtgacatatgagctatactcattgactgattagtatgttcggatgaggtctatgtagttttggtatagtaccatggttatctgattgtcaatttgactgatctttctccttagatttgatgtgttaacgagttttaatttggtgattataggatgatcttccactggttggaaacaaggcgcctgattttgaggcagaggctgtgtttgatcaagagttcatcaaggtacttacagcagttatcaatcacagttgctgcttctagttaatctgagattaagtttagttttgaagctgaatgagtagtctttagtgttttttatttagtgagtatatgtcttattgtgattggaaactaattggtaactgatgaatgtatggtttcaggttaagctctctgattacattggaaagaagtatgtgattctctttttctacccattggactttactttcgtctgcccaacaggttagcattgctcgagaagtatatcaaaattgaatatccaaggttccctcatccttgagtcctaatctttctcattttttccttatgtcttttagagattactgccttcagtgaccggcattcagaatttgagaagttgaacaccgaagtattaggtgtttctgtcgatagtgtggtaagtatcactatacatttactatgttctcattttactcagttcctcatccttggttgacatcaccatgttcttatctgtttgcaaatttttgattcattcttatttctgtgtgtcctcgtagttctctcaccttgcatgggtccaaacagacaggaaatctggagggcttggtgatctgaactatccccttatttcagatgtcactaaatcaatctcaaagtcgttcggagtgctcatccatgatcaggtaattgttagcctttaaatcttggctaccttcctttaaactttcgaagtgtttgggataaatgaaaacaagaactttgtttgtgtaagaacagggaatagcactgagaggacttttcataatcgacaaggaaggagtgatccaacattccaccatcaacaatcttggtattggccgaagcgttgatgagacaatgagaaccctccaggtaaagatacaaataaatacacacaactccaaaaaccgctctttcctttcactcgatttccggtatgcttaatacgttttcaatgttgcaggcattacagtacatccaggaaaacccggatgaagtctgcccagcaggatggaagccgggtgagaagtcaatgaaacccgacccaaaactcagcaaagagtacttctcagctatttagaaactctactatgatagcaaaaaggtacaatctttgttatatgtgagcagagttttttttcttgtacgctaaaacaatcctttgtttgattctcactttgtccccaaaattataataaaaaactttttccgttaatggaagtcttattgtgttacgcctacaaattcatattcagttgatcacttacctaagcatgtacactgtacatattaatggtaaaaatcaagaccattttgtgatcttctttgatagcacagagaagccattgttctaccatatacgctagtcatattaaaggacctgtaaaaaaaccaaaggacagaaattataaaactatcatttctctttctttaatgcatctatatgataattatgatccttaaaaagctgatgctacctgtaaaaaagttgctcatgtgtccccctgccaacaaattccaacatcattaatcatcatcaacccaacctcctccgtcaactgatgaccggtaaacgccggtcaactctcctgctttaactacactacgtcccggtcattattttttcacactctctctcaaacgatgcatgccctcaccaactccggcgccgtacttctcgccgtgttactcttctttctgctcatccttttcgccgagctctcttacatcttttgttgccgcaccggatctttaccgtctccggcaagtaaagaggttcttttccaattcttgatgtgttgcaagaagaatcaccaccactctcgtattgagccatgcaccggtattgtttctgtacagatggaggaggatgttgttgctgcggcggtgcctgaggaggaattcgcggcggcggacaagtggcgggtgtcgaggcttctcttcacaattgaagaagaggatttggaactggaagatgatgatgatgatgtgatctctgcggaggtagataatggcttcgaagtccaagttgatattccggtggagtattccggcgatccaactccgttcttgacgccgtgcaactcacctccttactttactccttcgccatctcctggtcgggatatggatgacgtcattgatgtatatgaagtcagcagcagaaactgttgtttcaatttccaaggctctcagatgtgttaacattttttgcataattccaatggtttaacagattaggtggaacattttcgtaattatttacaggttttgtcggaattatttgttcttgtttttggtttatataactttgtcgtcattttttccccggcaatttgaatattcatcaacacaacttggttcaacgcgtatatatgtttggttctacgtacattagaataggacgtaatgtgttaaagtcgtggagatgacgacgctatgaagtatggaatggttcattgaaacttttgtttggttatgttttattttgttgttacctaaactaaatgaaccaaattattttggttcccttgactttgatttccgtttagtttcaagtgtgattaaattactaaatgtttaggtatttttgggtcttgtaattttatgagatacatagttggtcttagagaccaaaaaaaaaaatgcacctttcaagaaaaatttccaagaagacagcatcatactacaatactgaattgactgcacatataaaaattgactcgacagagaattaaaggacatgagtcaggcctcatggcaagtaaaaaaaaaagaagacctatttttaaagaattgagaaaaaaaaagtttaccaaaagtgaaagacagataatgtttttagctagagttgtaagttttaagttttggtaatatctcaggatgagcaaccagatataaaccacaagaaccgaaaaaaaaaaacatatcatctatacattgacactatttagatgaatgtctgcaaatgaaattgaatcagcaaacttgcgttcatttaaactcatattaagaacttggaaaaaaatctattgtttggcaatactaacttttgttttctgaactttggcttttcttttttcgaaaacgttgctaaaaagccaaagaaaaaggcttacaaaagtaaagatgttttatgccgtttggattagcttttagtgcgatacacacaaaaagcaatttgttatccaaattctatcccgcgtttgaagtgtatactttagtcattggtcttagttctaattgacaattgagtaagtgcatttcgattggttttcataggaaaaatagagtaagaacaaataaatcaacataatccatatcaagcgaagaaacaaaatctaatgtagataaatagaagaaaaaaaacatgaaaagaaaaaagaattcataaaacttggagtttactaagataagtcaaagtcacactgcaccggttgaaacttaaaccctcctgtagaattagaggaaccaagaggaatcttaagatcatcacacttaatctttggtttaagcttccacgactttataaaccaaaacttaaacctaacacttagcctcaatttcgcattaatccgataaatcccagatttctcatcatcttttagatctgttctcgctccgtcgccgagcaccaccagattctgtccttcaattttggttaaaatcaccgtcgtattcttatgcccttgataaaacgacgaaacgttcgcagatccgaatctctgatctccgtaatagccactaaccgagaactcatcgtagtagactccgactcgttgattagggttacggattgtgaaattgagatcgagactgtaatggaggttgttgtttggatcgaagctgaatcggttcagattagcgtcggcgacgtagaatttgacggcgtttggacggaagatgagccagaggataagagcggcgactccgaggattacggctacagctatgaggatgttgcagatcaggcttaagatgcagcaaccgcagcaacgtagacagcttccgaggcagctgaagcaacagcatccgaatccaggtgagttatagctgcggtgagccttaggcggtggtggaattgatggtccgtagtacgcgccgtttaggtatggttgtttggaccccatgttgttcgacgaattgcctcagagagaaattcaaaacagaggtttcagaattcgaatttgtttagcctaagaataaaaatggctcagtgaagaagaataagaagattatatagatagagaaagagataaattctgcttttaatgaaacgcgttttatttttaattaaggaaacgaattcaaaacgacgcgaatatttgattttgttggtctgatttggttaatgaatgaaggatttggtcaaggaaaattaattgtgaccattatttgctattttgttgttgttattgatagataaccaagatcggttatacttaaccaacggtttaattttttgaaaaagaagtgccgttacgttttgaatgtggtcagagctttttcagcaatcgagaagcatttcaaatgtaaaggtttaataattaaacgtctagccactattgttactaaaaagaaacaatttatttagtgtgcagctccataaaactaggtttaagtaggcgttattttcaagtttgtttctcaatgctaaggaagaaagtaggaatatgtaaaatgtgatgagtgatatcccaaattgtagaaggcttatcccaaattcggcccaacataaaatagtgtagcccgttagtagacgaacataaagacgctactaaaaccctagtttcatggaactacactaaatatagtcatgaacacataaactcaaaatgtctaagatagagatcataattattaacatttttaaaacacttaatttgtttgaatgaagaattatattacaaatagttgatcagtattattttgagatagatccactgcatatgtaatcaatattgattcattccaaatatgcatgcactgatgcacgcactattgatcaatgatcaactatctaaagtttccgttgttgtaaattatttttaagttaggtagcaaaggccatttttcagaaaattatgtgagtttggctgagcattactcggacgttctagtgcctttgtgtgaacagcacacacagcacgttcataaccactttatttttattgaaaatcaaaggaaatccaaagttaggtttctcaactttatttgagatagaagtatggaacgttgcttatatactactatatatcatgtgactgatatccaaagtcttattggtgactgacttttttcgtctaacgtttcttatattattttcattcccaacttagataataagttttaaaggaccatattcccctttaatttctttggtcaatttcatggaccacattataagttaaatgaatggaaatgcagataaacgagaaataagtctctagaccggattctgattttcacaattcaagatccaagaatattcacggtaatccaagaatatccacgataatatccacgataatatccacggattctaaattcttgtaagtaacgttatgtattaactttatttcaatgtagcaaaactctaggagaatgggcttttaaagtgcacgaaaaacatttttttaagccagacaccaacaaatagaacttatctataaatccatagatgtgactaaaaataatccaatccacaaaatttatctttttgaaatgtcttatttgttgtagaatagtctctatataaaatgcatctctctatttaatttaataaaaagatggagacaaatggacaatgacaccatcacacaacgtccacaaaacattaacgagcctaatctattcaactaaaaattaatctccatcgccatcaaactttaccatatacataagaaaaagtcatcaaaagtcgatttgacaggatcagaagatgcatcaaaatcagcaaaaaaaatacttcgaaaaaatcatcacaacttataatagaatttagaattcaactataataaaaaaaaagtatacatattgaaattcttaaaattcgttacaacatcacgaatctgtaatatttgctattcgtataagcaaaatgtacaattcacatcactaagacagattacttaacgaagacgtttagttaccttatttttcttcgtcgccgtttcacacactaacactacaactagtggtaaacgtatacttaacggcgttgtctccgacgataactccgttagctttgttaccgaagtttatatatgctggacacttcacatgaagatgatacttcccggtgataaaagtcccaaccttccacctcactctaccatcagcacgaatgatcaacaaaacgacaccgttatctttatcggtgtcaagactaacgccgttaaaaggagcgatgggaacggaggttccgtaaacaaacggcgaccagatgtcgacatctttgtgtccctgatacgtgggagggattgatgttgggaaagtgatttgttggctccggtaagtagcgtagacgtcaagccggtcgtagtaaatgccgattttgttgttagggttccgggaagagagagtgatttggaagttggaggtgaggaggttcggtggattgccggagacgttgaaggcgtagacggtggcgtcttggaggatgaagcgtggctttgatggttggagaattgcccaaatgaggaggattgttaggaagatgatgaagaggacgaagattattgaccaaaatattcgccttattagtttccggcgagagtggccgtggttttcacagtctttcatggtggttgttttttttctttctccgacggtgagtggtggtggtggggagaaggtggagaagttgttaagagattttttgttttagtgatggctctaaataatgggctaattatatgtaggatttataggagtgtgatagggaaataaaggtattctcatattataaactataataattctccctaatattaaaggtattctttaaaaaaaaaaattgtaatcaaaacaaagacccttttaaagaaacaagtattctacatttttattttccatttaatcacaacaatatatttttaaaaatcatgctaaccttcttacataaaatttatgttgtgatatatttattgttaactgtcattttgtattctctataattcattttgtttttttcctacatttatataaatgttgaaaatttatgaatgcgtgattgatgtggtcggtgcaagtgttctttagaaaggtgactttatgtgtggtcgaagaatttttcatcggctcccctccaaccataataagcaattcaactagctagttataatttcactttcagcttcacgatatataaaaaattcattatcagtagattctctagtgtgaaatcaaactacatatatagtaacttgcttgtttcaaacagtaatttgtgtttgttaaatttgatttttccatgatcatggaactcggatttgtaccatccctcaaaataaaaagttcagaaatttggagctgtcacatgggtaaatgagttttcactacaaattattagtccatttgtgatacgaatttatagaccaatctaactttttatttatttaatgatcatatattgcgtatacatgtgtggattaataatttgatagagattgaaagaaagttcaatttatccacgtaatttccaatacagaaaaagaggacgtaagtgacctaacactagttgccaaagcagaaaccaccactttttccatcattttccttgtcgtgttacgttgattaactactctaaatattctgtaattttggagagaaagtattagacggggcactaatttctctatcggtatcggtcgacatatatttggtctagtcgtgattaaagtagttttcgaaattttagacaatagcgatattaatagggagggttcttttcatctttggcgtaaaaaaaggggaatagcttgaattcgtgaaacaaaagaacaaaatcacgaaaacggccttcatagttcatatttttgccaatatagttattttatatatcatcaaatacgcttcgtattgatattttacaaaaagacatctaataataatctaccctttctattaacaaacaaacgacctacaacaactgtaaaagtaaaaaaggataacaataacgtagtggtttaataagtcacaagcaataactgggtggcctatggggaaatatctaccagccgaagattggcttgtgaacgtgaggtggtacgagattcagatccttgcaatgttgattatcatagtcttttgttcttggtgttgctccagtgcatagtctcaagaaatcgttccctgttagaacatagtgtgagaatgccaatcctccatcgaccacctcgttaaagctcggaaccgatcttgattttcgcatcttccttcctccctctccattgtttaagatcttatcgagatctgaatactccatgaacctctgtgttgctgcttcccaagagagattgtacatttgttcaggagtgagaggtagtggctctttcgtcattgcttcttgcactttggacacaaagtcttcggatgttttgtaagttaagcagttcgggaatgatctaaagaattcgtttgaagggtgatctgcacacaccacaaacttccccatggctagtgcttctgcggttgctgtgcatagaacatcgctgatgctggggtttatgaacactttgtaccttcatcaagatgtgggaaagacaatcaaagagcgaaaccttaacaagtttttaaaagcaaagcacatttttcagaacttacttgtgaagagcatcgtcagcgtggtcccttcctttgaggaaattgagattcaagtcatgtttctttgctgcacgttggacctcgactgcatcttcaccgttcccatatacatctagattgaagctcccaagttcgcttttgtgtttagccatcagatctattagttctctgtatcctttagcccacaccatttttcctaagaagtatgcaccttttgagaaagcttgttcaccacgggatctctcttcagcaattttctccccaatcataaggaacttgggattgacaccatggacattgcatacaacagactttggtaaatcttgtgttgccgcagagaggcgaagaacctttcatgagtagaaaatatgtattagctcgtgtactatttattagtaaagaggattcaagcaacagaacaaggcttgaagaaatagagtagatgattcaccttgtcacaatacgctcgtgtgacccaattgtttacatggttcacaaaaaatgcttgaagagctccattcttctccctcttgatgtactctaagtagtttgtgtggacaattccaacaacatggttgaatttatcagtccaacgcttgccgtgataataccagttgagatgttcaggttcttcaagtatagcaatgtcagcatcttttgacgatataaattgagaagtgtcaccagcaggaaatatgctgcgcctttcttttgaaaactataagaaaccagaaagctcagttactctatagaaataattgaaaaacatattggcagccatagaaataaaaaaatagaatccaaaatgatcaacatacctttcctgggtaaaaggagattttaaaatcagccttgaaaccaatcctttcctccaaccatttacgtatataactctcttgttcttcaggtgagctgaaggtgagattgtttggatacactagttcttgatcagattcgcagagccaaggaaccacgagagtaacactctgttttgcagcttttgccaaatacgccgctctgaatagcggatttacagctgttccggtcatccaaggaagactagctgttgtaacaattgccacatgccttttgttttccggtgtctcaggcttcacaaaatcagtccaaaacccaccatcataatggtgtcctgtgctttgaagaacactggctatcctcatatccaaatcaactccatggttatcattttcaattaaatcggatgcttgtgcagatggcagacgccaaagttgttggctcttgcatttgcaaaggctttctactattcggtcacatgtatctgaaagaaaattcagcagaacagaatcaggaactttgtatgtaaacactgaaactataagataatgtacaagaaagggtgtttaaaaccaataacctacacatctagaaatttttatgtctacggcagatgtcatttgattgatctgtctcatacagaatctagacttacacatatttgatatccaggattagtgtgataatgcagaacatcaaatctcaccatctaaacttctggtgaagcaagcaacccacttaacaaagacactctaatatcagagagaagattcaaacttttgacggaaaaaccacctatggtagagaaacaactcaatacatacaacagacaaaataattaaccatcatgaagagaaaaatgcaatcttaccctttctaacaccaatctgatcaagaaaaggttcagattgtctaaccaaacatgccaacagttcaggtacatccaacggagggacatcctgcaccaaagtaaaaggaggccaagttaaactcccaatccaacactgaactcgacctaaaaatatataaagtaacaagaaaaactgatagagctccaacttccaaataccaaccttagcctcatcagtttctttgtaaattgatttctgcaaataaaacaaaagaaaaaagcaccattagaaaagttgccaaacaccataagaaactcaatcaatcattccaagaacagtaactatcaagtcagcatacgaaaatgtcgtggctattgaaagagaagccacttctacagtaagatagaagaaacttttgaaataggttcccaaaaagttggagaaacttacaaagctggttttgagcttctcaacaaattcactgttcttgaatccactcaatatttctaacgagcttcgtttctcaaactctttaaatctactcttcaaagacctaatcggttcccaatcaccgaaataagcttctccatctctctcagcctccgcgaaaaactccgtaaacctaaccctatcactattacgccgtctcctcaatctactcatctccaaaactccctgacgctcatccaattccatctcagacacaatcgccttcttaatcgccgatagatccattccaagcttcgctctcgcaggtccccatctctccataaccttgcgactaatctccggcgccgaataaaccctacgaaactccgaaatcttcggctgaagcttcttcatgataccaatttcatttgagaaagacgacgccgatggtgaaccaacgggaaacgcagacctcgccgagttattgaggaaattctcgatctctctatcgaacgttgatgctagattcttaacagagttagctctgtctcgcatcagctgcaaatccgcatctgctgaatcccatacctctctccatcctttcgacaaaaacgataacgcgtttgttgaggataacgtcattgaaagagacgaagaagaagatgttccggtcgtcattgacgtagatgacggaggaattagagtttcctttaccatgacttagggtttatcgtttcgtcacgacgatttcgtgagagtgctgctaataaggttttctctatctgttgagagaatttgggaagaagaagaagagaaattgacggctgagattaatttggattgttttatttttttaattctctttctgattattctggaagattaacacgtggaaaataaacaagtcggacggacgataggcgctctttactgaagccttgtcccgtgagaccgtgtccaacgtggcatgggttccacatcattgattacgtggcgtgttgtgagtggttgacgagattatccgattgtgtcggatttaacttaggaatatgctggaatcgaagaatctggtcctacggggcatggtattgacaatgacatttaacaaaaaaaaacattggaaagtgatatcagtggacgtaattagaccgtaacgagttccattaacggatcaaaatagaggccgacttaaccaaaacaaccaacggacgccacgcgagaccttgtgaaattgttagaaatttagcaaattttgataccattatacaatagtagaacctttgtcttcaccatcttgaccatatatatatcatacaaaatatcacggtcgacatgaactcttgctcaagagtttctagtgatttgcctttgatcgctctcgttaaagctttttatcaaagaataccaaataaaaataaaaattaacaagctcaacttacgataaattaacaaattaaattgaatccaaatggtaagcttgagaaacgtccctgtatatgaaattgaatccaaatcatggctctagatattcgagctgacagagaaattcattagataatgaataagctcaagatcacgcacgtgtctagccaatattcatctttcatgatcttcaggtttgtatccacttatccccaatcctgagatgcattgtttctagaactggagccttgcttagcagcagcaaatcgtttacaaaagctgaacctatctcatgcaatggagtaccacatagtcaagccttggaaccagtttccacaccgaaagccaccgttttgacaaaagactcgtggctacaacatcttttgtgctaaccaatgacagtatcttcatgagcaagtcatcactcaggtcacaaatactactcatattaaacttcaaatctcatctgctcgctctaaatcagcctcactgataacagaatttattttcaattcagccgaactagaagaattcattaataattaaacaaaatcctaacgaatcttaaaaagaaaaaaaaaacagagacttttaacggtggtaacaaaagagaaaaaaaagtaagaaagagccctaactaattcaaggttcactatcaagttcaaattcgacgacaaagtagtcaaaagtgttgatgttataagagcttacgatgaacaatatgggggagatgaagaggtacataaattatttgtgtttgtagattttagcttatataagtcttaagcgctttatgtctctctatgggtgtcatatgacccttatactccttaactacctttgccactagcctttcaccttcaaaaaaggcgccaacgcaattatgtttgtacagtaaaacctcgataatttcataaatttaataaattaataaattcttctgatatcgagttgagactagtgtaaatcgataaaaaaatagtataaatcgatcaaataataagataataactttttcaaaatcctatgtaaatatatgatctcatgtcataaattaataattatataaacttatcaatatatatatatatataacttaaatatttttactacatcgaaatatgactctagtgttatttgtttttggtaaatttgtattaattttttgtagagtttatttctaatatctttagtacaaaaaaagattgtattgtttactaaacttaatacttgattttctacttgtaattagttttaaaaaagatatagattataaaaagaaaagaacatcttaaatttcaggtaccttagctgattcttttgaaaaacattatttttataagagaatgatcattattctaacttacgtttgttgttaggagagagtgtctgagcattttggagtgccaacttacagactacgattttacaattccaaacctccatcttgtctcgttttgcccaaaagactatatgataaaggtaatattttggaccttgtaacacataatagatgttgaatattaaagcctccaattaataaactttgaatttgttttttatatctaaggacaatcttaacttaagcatgtatttatcctatcatatcactagattcactacacataacacatgacatctaatgttataagtaggaaatcaactacattattatcaatggttgattataattctattaattggcaataactaagtagaatgcggatatctcttatatactaaataatgttctcttgaaagagtgtgtaattgtttcgcaatgaacaaaaatattcacacaatatctactctagtcttctctgctcccaaaacgttcttcgcggtggccgtcggtagatatccttcatcatggacagtgataagaacatgacatgagctattgtcttctttctcgttgtcgccatctagaaccggctttacacatcccctgtggagtaattgatgttgtcctatctccgctgatagttttgaatccaaagtctctttgaaatgtgcaagaccagagaattcttccacagcctcgtagatcttctcgacgcaattcacgacctcgatcaggattgatgccattgtgactccgggaatgatctccaaaagatctttatatgtctctggataagaagatttgagtgcaatctttaagtttttaatggcctttttggagttgtcaatgtgtgcgttcacacaagcactatcgttcctcattgttttaatagatttggctatggcttttagggcttcaccaacttctctgctcatagtcgtgattggctcttgaatcttactttcgaattcttgtggtgcctgcttaagtagcaagtaaaaaaaaaaaaagaattgattgggtcaaacaattagtaatttttatctttttgcttaaccctttattatttgttaatactctgtccttcaattaaagattagttttctagaattttcacataattaaaatgtttaattacatatggaccattttcatactaaaacttttccacaactatgaaatatacaatttaataaacctaaacattctctatcaaatttttcaaaaaattacaatttatcaacatcaagtaatatagattcatgataggattataaaaattagtctccatatatcaaacaaaataaaaacgtaattaaaaggtcaatcttcatggaatggatgaagtatgtaatttcttatctagggccattttcgtcattcagggggttgacattttatacacaatgtttgatatgagaagtaataaacttatgataaaaagttatttatgaatggtaaaggcacacgaaataacaaaaaaaaatcaaatatacacacgtcaagtaacaatacttattccctcgaaatggcgatttagttgattcacacgaaccttatcgtttgaaagaacgtagccattgaggatttctaaatggacggcacattggcgaacgagtcctgcaattttcaagtactttttccacgggtgccgtaacctgaaacgtccatgccctggttcccatcttgcaagattcgcctgcaagaaatcagtaattaattagtatatatatgaacgttaaatgatcagtactatatattattcgttcaaaacatatacatatacataccaaactatcttcagtgctttttgatgttagaatgcttttgtattctcgaacacacgagcttgtctcctttgaaatcttctccggttgaaaatattcaccctcgaatccttttataaaaagcgtgtatgcatgcataagaaatagatctatggtatatatattctttgaagaaggtaattcaaaatgttggatatatttagtcaccttctaggtacttagcaagtttgttaatgttgttagcaatcatcttgtgaagatcttcgccagcccatacaggacaaatgaaaatcgacacaaggatgcagatcgtgccaccgataagaatagtcgatagtctttgatatgccataatcaatatttcatctgtacggtaacccgaaatcgcaacgaaactaaatgtgagtatgaatatcagagcaccatagtcatatctctgtttaatccgtgggaaaaaccgcgaaaatgttgcagctgcgcctagtgagaacactaagatcccaagaactatgggctctccttgatgcccaaagaaacgagcaaggtgtactgccccaacccctaaggctcctgctattaatgttgcaaaccctctgtttaaacctttggaaagtgttccacctacacaaaaatggttattagatagtgttttttaatcagaatctttaattaatactacatcctgttttttcaaggtaataaattagtacggtttgatagacttaccaacagtgaattcgaagaccacgactacggtaagtatcgcccacatacccgtgaccccaaagctgatgtagagtggtcgcacatagtacaacaatgacactaatgtgagagcaacccccactttcatggagtggatgatccgtcttggatcatctttcgcaaacttttgcacattctttacgcgtttggtgacatcgtctttgagcttgctagggaaatcctgaagcctttgaaagaaccctgctttcttctcttgagcattcaaatccatttccatatgagaatctcaaagaaaatgttaaagctagtgaaattggcttatattcgtaaaacctttgggatgtgtggtgcttatgtgggatagttttgggctatatttataggtagaaaaagcttagtttgtgaagagacagatttttcattgctgactaagctagcagctcaaccaatattttatggatttgattttgctttttaagtgatggtgatttttcttagttagatcttattaattgatggatggcttttcatctagctagctaggtagaatatagatgtacatgttgttataacgtacgacaaatataagactaataattattttatatatatttattttatttacaacacacggtaatattcaggaaaaatgaagaaagtgatatgtagaaaatgaaaagttgaagaaaaataaaacaaaaggaccaagttgatcgaacccactagaactcagcagagaagctatatatctaaatcagaggttgagaatgtttgcctataactttacagcagttaatgtttgtatgataaaaagaaaatattcagacaactttatgtaacaaaataaatcaatgtgtattatgatgattagataatgataattatataaataaataaagataatgtgttaatgttattcatgtggctgataagtgaataaaattgttatagcaagaacttctgaacttgtatattattgttttgacttttgagctttcttctctacctaacccattttttcttcaaacctttgtaaattttaatattttttaaaaataaatttaacatttaaaaaaaacttgtaaatttaatttaaaatattttcatattaaatttctttaagaacaaaaaaacgattagttctacggttcacagtgaactattcaaaaataaaatatttttgacttctttatttatttatttcatgaaactgatacacatgatttctgtatctaaaccgtacgtttaaaaaaaaaaaaaaagactaaagtttttttttttttttttttttttgacaaaaaaagactaaagttatatatgcttatatatgcttatgggtttttttcttaaaggatctgaacttatatatgctatgatcatgatatctgtaaatttgagaaatggtagccatggaaagaggtgtaagaattcgaagattgattagatgatgattcaatctctagaaaaccactgatttataatattaaaaggtgtaagatgaatttaagtgcaagatctatttataaacaatggtcatttcgtccattcttttatgtttctactttagaatttgtaaaaaaaacacaccacttatttttttcattttgttggcaccaaatctaagcattattcccaaagcataattccaagaatataacatgaatgtatgatcgagatttcattctgagttctgcaccaatccgtacatcgtatatcatattcttgtttttttttcattttcacatctttaaacatgacaagataacttatcactacaaaggaacaattttgtgtcacactagatttaataatgatatactctctgtttttcaaaaagttttagattgattcttgtataacctgtgtacattacttgctaatccatagcaaataactacttaagatattctattatatcgacaatgattcgttagaacacaaaataactactcgaataaaaaaatatttgtgattattagtgttccctctgatatgtctgcatcactgcatgcttatgaccagctgctgcaacctctcgagtctcgaccaccccttatcgttaccgagtcgctaattcttatgtaccaaatctgaaaactttagaattgtaatagtaataagaaaccaaaacaattagaattgaatttaaaaatctattaccaaaacaagtaaatatttcgatgtctttaggtgatacatcaatatgagttaattgttttgtccaaatgttaaaacgttagtgattggagatttcttgttgaagttgtatatcgattgatcacattaggatttacaagttttgcactgaaatcttgttgattaactttcttcactatataagacaatatgttggtgataaattccaatagaacgtagtgcgtgactaattcctaaacgaagaagatcaatgtgaccggaacttggatcttctcataacgtaggactggtcagcaatatgacatcaaaattcacaactatatataaaaataaaataaaaaatcacaactatatgacaatttagcttaactttattcgtttttttattatttttttttctatttttttttacttttcttaattctgataatatagttcttatcccaccttcatacacatgcttttgcaactgttataatttgcgtgtctgtctttttataaataatatcttatgtatattacttaacattgagatcatttaaatcctagaaccgacccattttgtacccataaacttgagacacacactccaaaataaatagtctgttataataaactcaagaaccgtgaatgaattaaatatgtgtgaagaagaaaaagaaaaaaaaatcgactatggccgagcaaaatggttgagcaatatttgtctagcgcaatgattgggccgaaacatgttacaggcctgaattaagacccagtccgtgacttctattcacgttatgggccacttatttaacacaagtatatatcgaactatgtatcgaatctagtttacccaaccgaatcaaccatcttaactatcaaatgtttttaattaattgaaaatttctttttattagctattatgatcaacacaataataacagatataccaaaataaatcaggctgtaaatttgcattccaaataatatccacccgtgtctggaatcctggggaatgaatcggctcagtgattgaacatgattttttctgtcttggacacgtgtatgattgttgtcgtctgtgtcttacgtattttatccaatctccattcagtgccatgttcttcttttaaaaccaaaactaattttagtgacatgttagttcaagatatgaaatattagcatttatgtcgttttccattactggtttacacgtgtaatttatatcactaaaatgaaagggaccatcaatccaaaaatcaatcaaccagaaaaaatcaccctctctacgtccaaaagctaaagtaagcttttctaattaatacttcacatgtatatgatagtcaagtgcaagtacagaacaaagatccagatatgagattttgtagtcttctggaactttctgaagctacagagagaagctaatcaatatgagaatgctatccgatgtcgttttcgcttagcattctcgcgcacttgcgtaagctcatctttctccattcccatcttcttatttctttttcttttttgtcaaaatcattttctacttgaataggttgtgaattcgattacgaaattttaactaaatattgttggaatcaagctatcatatatctatatatgtcatacttctcttcatgaattatgacatgtataatacataacagtgagatagcgtacgtgaaatagacaatgacttgattagaacattaagaattaaaattatgaaattatgtataaaatttggatgcagacaagatgaaaaactgaaccattttctgtccacattagctatgcataaagggtccacatatttgtatgtatttgagtaatcgacctaattttgaaacatggattatattagtaactaatacccggtttggttgtttcctactattcttgtatactaacatgacccatgcaagttgtcaataagttcatcaaaagataatttgacgtgagaggaaaccaacgccactagaagaaaaataataataatgttttgagaatatgttaggtgctagttaaaattccgaggagcgttacatctataatctgatgaatctatgcgtaggcgcatgtctcttttgcagatcatttgtatcttttttgttttgttttgttttgttgtttatttcttctttctcctcaagcatcttttggtttctatttttaaaattaaatgggatatttgcctaactatttaaacgaccgttagcctaataatcaattggtttatatcacagaatgcgtctaaaataccagtttttttggtgtgacaaacaaatatttgaatatctaaaccaaaatactcattgtatcaaattatacacaatacatatataaatacaaaatttcgagtgcctcttaatcagataaaagatactcgcgggactcttgaggtcgtgagtgatcttgtaacccaagccggtccaagggaagtgaagagtgatcactgtaaaagcaaatatttctaaaattgttcactatttcctaaattatagtccaatttactgtatttactattcacctttgccacttatggattgattcctctcgtctgttgtgttttggaattactattagcattatctactttttacacattttggacatgtaatttaatactttgaacgagaatctataatttctattttaaacgcttcacttaaatagatcctggaattgttttcggtatattttttcatgacattctttacatgaaacctctttaataaacttgtcaatgtaaagtaaaaaataaaaacaatacttaagattgatgtgttatttaggttccgatattcttggtccattttcctcaaccttttaatatacgcgatagaatgattttacttaaataaattatctcaagacatgaagacaatgcatcattactttttaattgccaaattttcttaatacactgaatcattactttttttttttttttttaaatacaatgcatcattaccttttcttggtccagatacgaatattttgaagatgagtacttgcattgaccttttaactatgtccctcgagggcgtgaaccagtcaccaaaatcaagaaaattctaaaacctttaaagataatatatacatatcggtatatacttctttaaattcttcaactgatagtggtacgccatacttgatttttgtttgttttgtttttctgattaagatattcttacaaatcatcaattagttcacgaacatcaacagtgaaaaaatataacccaaaaaaaacaaaccaatcaaccgctagaagatgacgtctaataaattaatccagatattgtcagattttttatacaaacatacatgtatatatgatagtattgaattattgatagataagctaatcattatttatctatattcttcgacaacaaattaaaatgtcattttcgttttgatttttatagcgctatgatatgctttctacttcatttttgttatcaacaaaaaaaaaatcgttaacaaaataaaaaatgaggaggaaattgttgtttgtatatagcatacaaaaataaacctacaaatgttacatgaaactgtttacagatttcactaggtatatactatatagtttggaaatgaactaatcataattctagattttctgttgtagctagtcaaatatttataacaactaatatgtaaataaaataaggaatacaaaataataaaaagatgtaaaaaaaaaaacctttaaagccattgtaagagaattcactactaacagagaaagcccaaacctgaagaagataacaaaataaataactttggtttagtttagactctctctttctttgtttgtatataaatacacaaaccattttattcagctccttcttcttcaaccttcgcacgacctcaaaaatctctcaacaacacacaaaaagatccaaaatccaaaatcatcctctccctccatttcggacgaccctctaaattcttttgtctaccggaaaattttcgattggatccaaattttctggcgcctaatttatcgatttggttttctattgtcattttcttttcacaggtcactcgattttctccattttcttttcatttgggactctcttctcgccgtcgccatcaccggagataaattccgtggtgctgcgtttggccttaccaaaatttgagatctcaattgaagaaagaaacatagcgaagaagaagacgatcaaggaattgaaattagattctgttatctctctatcatcttcaatttttttaatttgattgttttcaccaaaaaaacaaaaactatgaacacgacgttacgttacgatccgagacagatctcgaggcaaacgaaaccgtcagatacaccatcgtcttctccgtctcgtagtaaccggagacagcctttgcttcagagaagtctctcttctccgtcaccacgagcttcttgcggcggatctactcccgccgagttttgcggtggtacgacggcgagttgcgccgccgtgtggtgttgttgtccctgcggactcgttaacctactcgttctcgcgatctacaaagttcctaaaggaatctgccgtcgcgctatcagaagtcgccgccgtaaacaactcgtgaagaacggaatccttccgccgcttccgacggacgggaaaaacgagcggatgcagagagtttttcagaattctgaattcgcgattcatccgttggatagcgacgatgtgtctgacgacgaagatgatgataatttcttggatctgaagtatatcggaaaatcggtagcgacggggtttacgacggaggaggagactgatgaagatgatgaggcggtgttagcattagagaaagagatgtggaataggttttacggagctggattttggcgaagtccgtcacagagagaatcagtttcgtctccgagagtttccaagtctctttcgtcatcgccgagacaatcgtttactgaagtataccggaatagggatacaacggttagaggaggaggaggaggagctacggtggtggcggcgacaccaagagccgttaggcattttgattagggtaaagaaagagagcttatgaaaaaaatgtctcaaaatgtcttttgttaatagtttcattcgtgtggcgagagttgttgtgtgtgtgagctcaaagtgtgtgtctgcgtttgtcaaatctttggtgtgtgactttatttgcctatggtatgggattttgtgatcatcaaatatgaaaattcgaaatggaattgtgttttgtcgaaatgtgacatgacatgagatctttgactatcaaagtctattgagggtttagtttggatgtttaatcactcataacacaaggtataattacattgttagattcgcaagaagaagaatagatcatgaggtaaataattagtgtgacatggtcatggatcagttaaaaagataaagataagattcaaagggtaaaaggagagtctagggtttaaaaaaacaagtggggagctgtccttttctttcaagggggtttggaacttgtagccttgtaggttgtgatgtaaactatgaggaccacaacaatcaatcagtacttggtcattagtgttaagcattaattcaggtgttgctaacaactactaccaccttcttcttctgcatctctctaatgactcttctttcctttttcatctctgtttttttttttgttaactttgacctgctttgttgtgtttcaattgtctttttactattactcactaattcagctttgatgtgaccctacttcatttatttcattatttggtgaatctcatgcaactgtttttttgtttcttttttcagatgtttgtaagaaaataaacgacttgtaattataatcgaatagtaaaatgtgtatttattttttcgacaaagagtgggcaaccaaatgttcctcaaccattgattgttgaaatataaatttttattattctaaatgaaatcgtgcgtcttgtatcgaaaggaaatgcttgaggattcaacttataacaagataacatttattaattaagaagattttggttgttattttgttcttaatataaaattcacgaggattgttttaaaatgtattatctttcggctctttcggcaacttttagttgattatacttggaccttacagtttcttgttattcaaagataacgaatatttaattcttgaatgagaggcaaaaggtcgtcaccagtatatacttctaactttaacaaaaatggcgtcaccgaaatgaatcttggatagcccatagatttttatatagcagtgcctagcatctctcgacacctcatttagcttccccttctcatgttcatttgatagttggcccatttcggcccaatattttacatgctgttcgtgagatgggtttatgcatgacttgtgtttcctaatttcagatcgttctagatgaccttctgggtatataaagtgtatgcgattttttgtttcttttcgaagaaaaaaacgagttaggcccgtagcaaaacaataagagaaatcgggcttaagataaaagacttcgaaaagatgggtttaaattcagttgggccttaaagcctgtcttcttatcaggcgggaacaatcagaatcgcataattgtgttacaattttccacaagtccacaaccattagccaaagacgctgtcctctggctcttttgatgtagttggacgtaagggcacgtgccaagttggagagcgtgagagtaacaggtaagtggaattgaggtgggacattacacgattcacgaacttagcgtagcaaccaaaaggtgtcccaataaataaataaatgatggttgtattaggtcatacaccgacagcttcaattcaagccacgtgttctcccttcttcttcggctgcttctctttgcttcacatgatgtctttcttttttatgtttggttacatatttcttcttaatttcactttcaatttaagtatcattaactatagaaaactgactaattaactactatcccatttttatcatctagtactcgccgattgccttagtccttcttatgttaagaattaaaagacttgaggaaaagttcaattaccatcactttcactactctaccgtattacaggcaaatatttaattatctagttccgaatattttcttttaactatgattcttatttatgattaattatgtccaaaatgtattcaagattcttttctgattatactatagtattcggaaattgatgtaacagttttgtatttgagtatcaaagaatattatgaccattggaattgttgcgcatgactatttaatatattacctaaatcacggatcaaaaatcaatagttattcactttgcataagtagaattccatctgaagagtttaatataagagcagagcttgtttgttctgaaatagtaatactttcatttattaaaaaaatagtttatcaataaaagacaaaaacaaactgctgtgtttattcaatgattataaataaaaaagattaagccgacgctgagccgagacttaaaaaagaaagccaaaaaagtcagagctaaaataattaaatgttattcagacaccgtgtagtccccaccaccagcctgtccgaaaacccaaacctgttttgatacacaaacaacacagaccacccccaaaactcacatctatctctatctctcttctctgtctctcactctccactttccgatcaccgacgattcaacaaaacatagtaaaaaacaaagcaaattctttttttctccttagttacttcttctacagattatctcaatcttacagagcaccatggatcgttgtatctatggttgctccgtcattactatcttcttctccttcttcttcctcctcaatgcatccgctttagaatcgggtcaccacaacataactgggtcgggtcaaataaactcaaactccgtcctcgtagctctcctcgattctcgttacactgaactcgccgagctagttgagaaggctcttcttctccaaaccctcgaagacgccgttggtcgtcacaatattactattttcgccccacgcaatgaagcactcgagcgtgaccttgacccggattttaaacggttcttgctccaaccaggtaacctcaaatctctccaaacgcttctcttgtctcacattatccccaaacgagtcgggtcaaaccaatggcctgaggagaattcgggtcgggtcaaacacgtcacgttagggcatgaccaagtgctgcatttgagtaaactcaaaggaacaaatggaaagagattggtgaattccgctgtaattacccgacccgatgatttaacccgacccgacgggttgatccacggaatcgaacggcttttaatccctcgttccgttcaagaagatttcaaccgacggagaaatctccgatcaatctccgccgtattacccgaaggagctccggaaatcgacccgagaaccaaccgtctcaagaaatctgccaccgccgtctcagtacccgccggatctccaccagtgcttccgattgaatccgctatggctccaggtccatcgctagctccggctccggctccaggacctggaggtgcacacaaacatttcaacggcgatgctcaggtcaaagatttcatccacacattgttacattacggtggatacaacgaaatggcggatattctcgtgaatctgacgtcacttgcgacggagatgggtcgattggtgtcagaaggttacgtcctcaccgtgttagctccgaacgatgaagctatggggaaattaacgactgatcagcttagcgagcccggagctccggagcaaattatgtattaccacattattccagagtatcagacggaggaaagcatgtataattctgttaggagatttgggaaggtgaagtatgaaacgctgcgttttcctcacaaggttggggctaaagaagctgatggctcggttaaattcggttctggtgaccggtcggcttatttgtttgatccggatatttacaccgatggtcgcatttcggttcaggggattgatggtgttttgttcccagaggagaaggaagaagagacggttaagaaaccgaccggtccggttaagaaagttgttcagccgagaagaggtacgtttgattcatcttttgtttgattcaattgtgttgtgtgtttattgttaattgattcggtgacattagttataggtgaaatgatctaatgtagattcatcgaattttcttataacatgaccattgtgacttgtgagggactaattatgcttataattgtgtcatgttacacggatacaagttatagcttttgggtttgtggttgcttgaattgtgatttttagtacatgattaaggctattaagattcaagacattggattattcctataatctccggcgaaatgggatatttccggtgagaagtaatagaattccggtgagaagtcatagaattgaagattttgtgaggatatttcaatcagaagaaagaatcattagaagcttcttcacattagctaaaagcatcttctcacgtttacaaacttcacttattatattggttaattaaattattgggttttagctttttcaagaactaatttaattaggtgacaggagattgtgatagtgattgtgatagtgattgtgatcatgacctaataattattaaactatattatttaactaatgatggaaaattaaacagggaagttgctggaagtagcatgtagtatgcttggagctattgggaaggactcatatctaagcagatgctgatgaattcacaaacctgaagagattattgaaggaaaatctctcaagtgttatctgtaaacacacacaaaaggttaggatttgtggtattagtttcacgatctttagttactttgaatgattgttaaccataagtgtattcatagttttcatgatgttgcttgcaggttctttggagcagaatgaaagatttagaagaagagcaaaaaaaaaaaaaaaaaacaagagagtaatacatcaatgtccaaaacttcaaaagaatattcttcagtggaatatgagaatagggtttgttgagtttttttatataaaaaatattttttttgggtggggttttgattttggggttataaatactgtaattagatataagaactcattttttcaattgatttggtgtatgaaaaatgaatcaaaaagtggggagcaaaagaaaaagtcttgagaacccaccaccactttctttcttctacttggtcctttatttgtgaatggtttggtaagtaaaatttccacttaattgagaatagtaacatcttttcatcatcattataccattagacaaataaacaaacgaagtctataaactcggggtactcttctaaatatttatgtggcaagaaaactccatttctgttgggtgtaataatagcattatagtaatagtgaaaggtatgactttttattatgtatagacacaaatacaagaaaagaaaggtatttggtaaagaacgataatgaaacatgtgttggagagaggagatgagttggcttatggctgtcttgtgagatattattatgaattgagacccaattgcaacacaaagcttcaagctttttgactttttctatgtgatcattgatcatattcaatcggtgacttatcttttttattccccttcaaacttgtaaattagctgtataaactctaaacaaaacagtaataccatttcaaccacttaaacaagtcttaggtctaaatatgataatacaatagagtggattatttgtttttcttttttaacaaagaacgcacttcacttcataataatgttgaattgttgaaatgataagagggccggcaataacacactagaagaaccacctactactcgtctcccattcatatacccttagcttaccggtcttccatgtttagaccgtttaagaaagctcatgttatacaaatacatggacactaattcttaaaaaaggcccttcaatataagtgaaatcactactaattgcaaaaaagtcttacaaaggtttttgataataattaattggtattttttttttgaaaaatatggtctgcaattacaagtaacttgagaacagagtgcataatagcgaattgactaagcttagtcagaaaacttgtgtagactccttatttcttctcttctgttaaaggagctgtgatattaaaaaaccaggttttaaattgcaatcgtgagggaaaagttacctgtcgattattactaaataaccagttagttcgtaccttgagcggctgctgactcctcctgtggtggcctcattgccgggaagaaaagaacctcctgtaacaacatattccatatcatgagtgcagtcaaaacgaatagattattcactgaagtgtaaatttggaggtaagagagtgaccttgatgttcagtgagtcggtcaaaagcatagagagtctgtctattcctaatccccagccacctgtaggagccaacccatattctaaagcattacaaaatgtttcatctaaagccatcgcttcatcgtctccagactgtcgatccttgagctgatcagcaaaacgctggcgctgtaccacaggatcgtttagctccgtgtaggcattgcagagctacagtccagttataacatgttagtcaagcaactctaaagaaaggacaaggtcatcatcagctttttattttttgcttacttcatgtttgttgatgaacagctcgaatctctctgtcaatccactcttcgatctgtgccatttagccaaaggactcatgatctcgggctggttgatgatgaaagttgggttcacacatgtcggttccagaaattctccaacaagctgcaaaataaaataaaaagggacaaaattcagatttaaatttcttaaaccaaatatgctagaaaggcaggagggagacagaagattttactttatctaacagacgagctgttgtctgaggaggagggcatttgacatcaaacctcgcacatgcatcaatcagatacttgttagcttcttcgctagccaagtcttttggtatattgagcttagcaaccttctctaactctcctatcatctcaatcctcctacaaaaaacaaaaattgagtagattattaccaaaggaaagttcctacaaacagctttatcctgaagattgtgtttaatcaatgaagatattgtctcaaacctgaatggtggagtaaagtcgatttcaattggatccttgtcatacccattagcattatacttgattttataaccacctgttaattccttaaccatgccactcaacataacctcagtcatttccatcaggtcattgtagtctgcaaaagccatatagaactcgcaagtggtgaactccggattgtgggtcaggtctataccctcgtttctgaattgctttcctatctcgtaaacacgttccaagccaccaacaataagttgcttgagatagagttcaggtgcgattcgcatgtacagcctcatatctagatcattgtgatgtgtcacaaaaggtctagcagctgctccaccagcaatcatgttcatcataggtgtctcgacctaaataaaatttaaggatatcaaatgcaggaaagaacacttgaaccagaggcaatatcaaaagaaggtaaagatttttcttgggagaaattgaacacctccaagaaatttttgttgtcgaggaatctgcggacataggagatgattttagctctagtcctgaatatctgacgaacctccacgttcaaaatcatatcaagatgacgctgacgatatcttgattcctgacaacaaacaaagacatcacaagtttgctcggatagaaagagtcactagaatctaagccaccgacaggcaacagagtgaaccacccaaaaaaatgacatttaacaatgtaagaggctataacattctcaatagacctttgtaaaaattacctggtctttcagaacatatgcttcaggatttctcgtttgacctggaacccagatttcaggtttctacagtagagcaaaaaaagtgaaagaggttagtgtaaaacgaataaggtgacttaaaaggtactataacagccacagagaatttactctacctttgcattaacattatcagcctttctcggcatcatgtggaggcaatgggacagaagaataaatgatcggggaaagatactcaattctcccctcttagtttttcctgaaattagagtaatgtaaacagtgaaaaagaatgttggggtaggctttaagattgaaaatagaagaaaaaaatagaggctgcacgaacctggaaacccaatgactccaacaatatcaccacgcttagcattcgaatggagctttaagaactcagcttcatccaatcctgacttactggaatgataaaaatgtaataaatctaagtaatgtgcataaagttattctttataaaaaagaagagaatccggtaaacaaagcattcaccttgcatcagccatgacttggaccttgaaatcatcaccgtgtagatcatagaagaagagcttggaagaggaagatcgcttgctcattatccgccctagcaaagattttccaatgtaagaatcaagcggcaaataaaacttatgcaaatagcatttagcagtttaatataccagctaaagactcctcagcgttttcaacatgatctccattgttcaaactaccatacgtctcaatgtatttaggaatcgacattgacacagcgaacttgtgaggatatggattctcccctttagccttctcagccgcaagatatttcaatctgttctcatagtattgctgcaacaagaatatcaacaagcattatctgttagaagatgcatttcataaaatcacaaggaaactatcgaacagattcataccgttgcatccatctcttcatcatctgctgccactgccttctgggagcttgctttaggtgcctgcatcaatagaatcaaatctcaataactacgaaaactggatatctgaatcaaatctgctaccaagaggattcaataatctatgatgacatccccagaatatagagaatgttaggaatcataagaaagctaagaagagtgctcacttgtttagccttttcagctttctcttcgtcctttcgtctcttctcttcctctttctgcttcattttctgttccttcttcaaagcactacaaaagaattcaacgcatccgctacaatcaaatcccgtacgaaggaagatacacagaaatcggagagtaatataataacatcagacgaaaacgtactttttactccgaggtccagctccatcaccagcgctagactcagcagcattcaaggtggtagaagaatccatggctaattcagataacgctttcgtagtttgatcagccgcaccttccatcgtaatggagattccaaaatcaacaagataaaacgctctttgctcagattgttgtttcaagtttctctatatgaaatgttaagtctatgagaaagacggcgacgatgagacttgcttagggtttattatcccctttacgcgggtccaagcccattagccatttagggcttattcggtttactcacgaaccgaaccggtttgttttgagttaaccatattaagtttcggtttattcatacacaactttattgtatcttctttctatggttacatttttattgaaacacttgctctcaaaatcttaacactatgtttccttgtatataatgatctgcaacttcaaagagacaaaatatttggatttaccaatgacaatttcaagtccttcttctccaaaacctgaaaccaaagcagctcggtttacgtttcctctgcagatttgagctcttacctccgtttaaaccgctcggtttgtaattgtcgtcactattctctgttgtttggcagaaaagatttgttgcttgcgagactgttatccttgttacctcagagtttgttgtaagatcgatctcgggtgatgcaggagctattttgttgctgttgtgataatgtgcaaaggatgcttcatcgagaagttcagtgttaggatcttgaatacaaactttgctactagaaacaatctgagtgctccctgaatgctgcattggagatgatgatgcttcttcttcttcttcctccgaagaggttgatgtattattattatctgttttggattttctaaccattgatattactctctctaatgtccctaaagcttgcttcacctccggacttatgcagaaacgtgttttgccattcttgtcttcatcctcagaagaagaagaagaagaagaagaagaagaaggagaacttttgttttcttcctttaaatcatcaacacattcttcttcctcgatctcaggaacatctcttttgcaaggtacagattcattctcgcagtctcgagtctcattctctttttccatatcatcatcagcttccaacttgggttctttctcttcacaatctcttccttgttggctatgaagctcatttacttggcagatttcatcagttttatcactagaatacagagcttcacgtatatgagtatacaatggatcagctaaaactgtcttgtaatcatcggattcagccaccgaaccaatagtctgtaaacattcaagtaaacaccacaacatcacacaagctagcaaccaggcatatcaagtttttgtgaagtaaataaaactggaactgaccttcttgaaaagtttgaaaccgttaccaagaagctgcctagacataaaattaataagagatggaggaaccaagtccagctttatatccacttccgctataaatctacaaaagtttagcgattcaaaaaacccgccaaagacattcgaaatgtttggttatagaaacatgttctcattcactcaacactcaccttatgtaactcttctctggagtcactttttgtatcgcaactccgcctacgaagtcaatcctcaccgcattcacttcagctacactgccgctctccacttcgatctaaagatgtactaatagataagagtttaggatactgtcaaatcactaagaactggattaagatgcaaaaaaacaaagctaacatggttttaccgagttaagtaggatgatgactaaatcatctttaaagtattcgaatacgaaaaactgcagaacagcttctctgtctgtcagtggccacggtgctttcaccctacctccccaaaaaatatgatcaaagttttcagctttggattagcttcacgaaaatgtaactgtaggaacaaacattattacaatttgtgaaaacaaacctcagtaaacatatctgttcatcaatcctaaacttttgcaagcatttagcttctaagaccctgaatgacggaaatgtcaactttggccacctgaaagacatagaaaacatcaaacaaaaagaccaaaaaatttcgcaaacaatagacaattccataaacaaaacattaaactctcaccatttctcatagaatgatgattcccagcatacacataaacctgtataaacatagttagatacaaatcgaaaactgttttcttgcggtgcaaactctatagaaaaacttacagtcttcgatagtcccatcagtgcaaccttcaacgagcaatgtatgaaatggacttcctttaagtccttcacggtacataacacgacaatctttatcatcatgtttcacctataaacaagaaaacactaattggctaacattatgacaattctgtttcacaaaaactgtccaatagagccaaaagagaaacatactttccaatcaccataagatgcctcggtgcttgatttagacaagtcttgatcctttgttgatacactcctaagcttctcaattgtactggataaagcagctactctttgatccaatatatcaacactacactctgtgaaaacataaaaaaaaaacattgtagcaaaggcaaaattaaagagtatatagcaaatcaacaacaagaaaaaccttcattgagttgttttctgactagggttttaagagtttgctcattaatgagctcaggagacgacaaggtctcattaagtctctctctgtactcagaaacatctcgtttcttctccatactcaattgaatcagcagacacctttagaaaacaaattaatcctcaaatcaaagaccaaagagaatcaaagattgccctgaatttgtggagtcaagatgaatcatggggaagaagtgagaagagaacaccttaaaacgtaaggcaatttataagaaaggaagctt

SEQ ID NO: 408 - DNA, 79125 bp, Arabidopsis thaliana
gatctgataaatcaaatggtgcacgtcgtggtagacaatggagaagccagccgactaatgtctctgagatccctcctcttctgagctctgaggttcacaaaattcataactacgagaagaaagatcataaacaccgacataataaaaggtctccatctccgcaggctcaatctcagaggaaaaggtctagaactgacgactcacggaatgaacaggtctgttattttgttaatttctgttgaatagcaatcaccacgtaatacttggattggaaaattgaaaaaaatgctaaaatagtttattggatgggatattgtgaagacattctcagtgtaaagttttggtcagagggcatctttgcgttctgctttgtatgagactaacaagtcagacgtccgtattactcttatctttgtgttataaggttgccttgttccagtatttgtcctgctgtaaagccaatgtatggatactggttatggttctctgattttgttttctttgacttgtttgatagagggaagctaaacctgatgtctctcgccggctgcttcagtttgctgtgcgagatgctctagctatatcaaggccggcaaatagttcgactgaatcctcattaaaacgtcttcgttcagtggtgtccacatctactcaaaactcatctgaccctgatccagctcggaaaattcgatctgttgctagggttgtgaatcccatggctactgttatgaaagctgtcgccgaagcagccgaagatgccaagaaaccaaaatctgggagaagtgtctttgacagaattagtcattctactggatcagagaccctggaccagaatatggtacttggtgaagtttcccccaaggatgaagaatctaggaattttagccaaggtcaggaagcggtacagcttcaatacacacagagtcttgccaataatggagtgtattttgagaacatgacaactaatgacactggcttgaatccagatttttcgtctgatcgaggcagactcggttcaagtgttaatgtgtctcacccaagtacttatcttgggaacagaattaacaatccaaatagtctgcagcatcgtttagtcgatgactccaaacgagttaaagggacaaattatcaaaatcgccttcctgaagttgcaaccaagcataagactgcaagtttctcaggcaatatagatacagggaaaacagtaaagttagaggagcagaggaaaataccagatgtgggtctgcaaagatatatggacgaaggcagattagtttctagtgaagctaccactcaattatcgacgcagaaaatcttgggtgatacaatagggaatggaaatgtaagttccatgttttagatgcatgctcttactagctatttcaatgatagtcatcttccacaatatgttggccatgaaatataaaacatctcgaaagtttcttgttaatatttacccctcatgtctatgtcctgatgacttatttcgttcttactagtgatatcaactagactcctaatacaagctgccttgttgttctttgataggtaaaacctgctgccagtgtgaaagaagaatcaacgaccaataaatctgttcctggtgagttgttaaatatatcagtcttaagctatttgaagattcatgctattggaatttctattttttttttccttgacaacctcacttctttggtccctgttgttgtagttcctatgttaaagttgatctaagatgatatactggcctttgcagggacattatccactacccgccctttggaagatgctagttctcgaacaatctttgtcgccaatgtaataattgttaatgtttttatactcgtgaacttgaattgagcaaaaacttgtcaattggtgtattaatttgaatgtgattggtcgtaaaacaggttcattttggtgccaccaaggacagcctttcaaggcattttaacaagtttggtgaagtgcttaaagctttcatagttactgatccagcaacaggacaaccaagtgggtaagttgtctgaattcatgaccccaattaatgtcttgatatgtcacagttcagttatcgaggataccttagtgacccaagttgatcgccttttgcagatcagcgtacattgagttcacacgcaaagaagctgcagagaatgcattgtctctggatggtacctctttcatgtctcggattctcaaggtaaatattgaagcccgtgtttaactgtttaccatagccaacttattgtgatctttaggattggttagcatcttagtaggataaggaatgagtttgtgtatattttgatggatacagattgtgaaaggaagcaatggacaaaatcaagaggctgcatcgagcatgtcatggtctcgaggtggaaggttcacaagagccccatcatactttagaggtggtgcagttaggggtcgttctgttgttagaggtggaggcaggagtatgcaatggaagcgtgattcagctgacacaggaaacaacaacaatgtagctcccaacaatgctcgtagtctcacgtatgtcagagcagaatcaaaatcagacggagttgccaacgattgattgattagaaagagaagcaagagcttaggtaaaacaaaggaagatgagttttatcatctaccttatcggatattattctcaattgtttttttttttggctctataaagctactccaaaactttcacttgtattgactttcatgcttcttcaatcgtttggttattaatgaaaaaagaaagacaaaaaatattgtatttcaagctctcatggtgataacaagaggaacaagttaccgaaacacaaggcaacaacgcacaagatggaaacaacacgagctctaacgaacaacagattgagattcttagcaacttgaagtgtcaaagtaagaatctgcagcctacctaactcttccatcttcttgaagaagtacattggcttcaacgatcttctcaccatcaacgccatcgcaaacgggaatccgaaagctatacagctctgaattgtcatttccttcatcggatctgctcgagtggcgtataaaatcgccgctccaagaatcaattgagttaaacccaaagcacccatagctccacttagactatacatattcttcatcatcccttccaacacttgtctcgtctcatttcctaacgctgacaaatcgcgttccacagttggtccttcgatctcctggtgcttcatcttctgcagctcctcttccttcgattcctctggcttcttcggctcggtctctccgcttggtgtcgagaaatacctcggtgaccatgtttcagatctaagtttgtcgatattgaaaacagaaaaggatcttaagagaccaagctccttagttactgatccgtggatcagatggtttcttatgagagatgaggaagattggagatgacggcgagagacgtggaaagatggagaagacaagggtttaaggaattttgaaaccaatcgacgagagatcatcatcgtcgtcgccgatttcgatgcagagaagaagctctacgtaattaatttagggtttctattattgccaattgttttgggctcatctttcactttcggcccaatccatcaaattatagcttctagccaagtcaacggtttagatcaattttaaccggttctttggtttagactatcatcgatactaacaagattttggctcatgaccatttacattatcatcatcgctctatgagattactcgtatatcccaatgcatagaactcgatgtgcaacaagtggcttactctaaagtgaattgagcaatataatcggtacctacaagtgctcttaatccaagacaaaacaccaagttcccacaaagtttggagaaacacactctcttcctcatgcctattcaatataaaagccaaatgccaccaaattttttaaataaactcatcaagcgattcacaagtcacaacaatgtcttcttcacttacaatcttcttcttcttttttgcttccacattcctctacacttcatcaaattcattcaacatcactaacatcttaaacgagcacgatgatttctcaaatttcaaccagcttctctccgaaactcagctcgcttctaccatcaacaaacgtcaaaccataaccgtccttgtggtttccaacggtgcactctcctctctctctggccaaccaacctccgtcatcaagaaaatccttagccttcacattgttttagattactacgaccagaagaaactcaagaatctgagcaagaaaacagtactcctcaccactcttttccaatctagcggtctagccagaggccaacaagggttcttgaacgcaaccgttatgaaaaacggagacgtggcgtttggttctgcggttcctgggtctagccttgatgctcagcttcaagacactgtagcagcactaccgtttaacatctctgtgcttcatattagtagtgctataatgattgatgttaaaggtgataatgcacctactgcttctcctttgtcaccggtatcatctccaccacgccctgcagaatcacctaatgatgatggtcaagattttgacgagccaccatcctctgctcctggtgctgctgctgatgaaccttccgaaaacgccggctcagctaatggagtttcaagaaacgattctcagcccgctttcgcgtttacgctgttgatgtcattcatttggtggttcatggctcgacttcgatgagaaacagtgtgcaaagaactaaacagatcagttcaggtttttgtaaggaaagccaaaaaaaaaagataaaacagacgcagctcggatggctgcaaaaacatgaacactaaaaagtacgaaaagatttagcttgacaagttctatgggaaaaataaattgagcgatacaataaagacagaaaaatgtaacattcaaagttcttggatattatctttacttaagttgttgaaagcacctattagttacaaaacacaaactgcaaatttttgttattattcaacgagccagaagaaactagaatatagatctttattagtttttagctatgaaaggtaaaaagtaacccaagaacaggaagcacattcatatccatgtctctccccaaaccctaacaacgaaaccaaacaagttttcaagacaaggaaacaaaactcagggactatacatgtcgacttgcttaaagaaagctttgattaaaagcaaaaaagcttaaaaagtgcagtaaaattgttcctttctcgagtcagtggtgaagcccgtttccattgctatagacattgccgttctgatgaactttccccattgcagatccattggctactccatttttcgaaactatgttcaccttgccacctgtttgcaatactgattctagacacccagacgctgctgcgataagacctgttgaatcaaagtgtttcttagtaagccaccacattaccacagattcttgctcaaaaaagctatcaaactataacctagactttacctagaaacaatgcagaaggtttcccaggtctggacttgaattcaggatggaactgagcacccacaaagtatggatgacttggtagttcaacaatctgcacaccaaaccagtagaataatgaagcataacatcacaaaagcattcaattattgttccaatcccagacagagtcacacattaaacatgttttccacaagcatattacctccatacgacgcccagtctcatctttcccaacaaaggagaggccagccttctcaatttctgatatcatatctggatttacctgccaaaaatatatatttcactgtcaacaactcacaagaaatctcaaggaaaataacatgtataatagaagaagctgaaatattacctcatatctgtgcctgtgtcgctcatctacaaactttgcattaccgtacctgaatgtagagattagaagttatatagattttggaaatgaatcctacgagttatcatgtgctactgtattatgtgcttacagcttggcagacttgcaatcagcaacctggaagtaagtcttccttgaccctaagcgcattgtgccccccatatgagttgtggatccctattgagagattgaacaagtataagtagatacttaatacatgaaaaccatgtaatcaatcaaatgagagagccagattgtttagtacttctggcataaatatgatgcaagggcttgaagtttctggttcaaactctgtgctgtttgcatcgtgaaaaccaagaatggagcgggcaaattcaacaacagccagctgcattcccaggcatatgccaaggaaagggacttgattttcacgggcgtactttgtagcaagtatcttcccttgcactcctctatcaccaaaccctcctggtactaggataccatcagcaccctgcaacaaccgaagtgttgagtcaaacatatttaccaaattggtgtgccaggctccattaaaattcacgtaccttcaaaagatcccatgcagccttatggacatctggcgtctgcaagggtacgtcatacaaaagctcatgagagtaaatacattttttcgtaccctgagagaaacaaaaaccagagtgccaggctcacctcttgtgcagttatctcttcaaggtcactagctgcaacccactctatgacaagcttcttgtgacatgcaacagaagcatgcaaaagggcctgcagtgaacacaaatcccatttttaagaatcgtcaatattagacacggttgttgtaaggaaatcaattataaactaaaggttgggattataaaatgcaacatttggtttgtttaagaacacagaaaaacaattaccttcaacacggaaaggtaagaatcagtaaggccagtgtactttccaaccatagctattctcacctgaaagagaacacaccatcgagaatgaacaatggttttgattatatagacacaatggcatcaaaaacataattagaaaaagctgactaacagggtcttgcagtgtgtcataaattttagtccttgcagtccattctgtcaagtcaggctttatagcattactgcagaataagcaaatgtcaaacgactagagaaaaagccatcacagacaatcttatagtgtggagccaagagcaaaataaaacttacactcaagagagagaaaaaagaaaagatggttcagaaacaaacctaagatttaactctcttaggatcgcttcatgagctttttgatcctattgaagagaagttaacaccaaaagaatgataagagaaaaaatccagcataggaacaagctcattagattttagtaagaaactattcaactgaaatgtacttacccttaaaagcagaggaacgtgccaaatatttggaacatcatagagcgttactatattcacttcctgggaaaccataggaaagcagacagaaatgtttactcggacaggggtcttttgatgagaaatctgaccttcctaggctaagaagcgcaaataagaaccaaaaatttaacaagatataccggcacatggcaaaattgagatagttttgtcttgacattttcttcaagtgcctgttacaaaacaagaactgataagattaaaaaccaaaaaccatagctaacatcaacacttaaaggacatgacaatattggagcgcccattaccttcgtgctgcgacatgctaggatatttggtgtcaaaccaaggctcctgaggcctcgcacactatgctgggttggcttcgtcttctgcaatataggctcatatctccgtcgttacaaactaataaaatagaatctcaatggaagatatcaactatatagacgattacctgttcaccaacaacactgagaacaggcacaaggctgacatgaaccaagcagaaattaccaggtcctaagaacaaaagacagatgcggtgatgaagccgataagcaatagcctaagaaaattactgaatcttcaaaagttaatataaattagagcaccgctcaccaactttatacgagaattgaccaagggcctcaataaagggcatagattcaatatcacctgtacagaaaatagaataataaaactcactcttctgaacaattgtcaggaaatgtaatataatccaacaaacagtacctatagtcccgcctaattcgatgacacaaacatcaggaggaccttcctttccatccacaggaacattagctacacgctcaatccactcttggattgcgtcagtaacatgaggaacaaccttaaataaagttaaaaactttgttcaaacactgaatcaaattagaaccagaggaagttaagtaagagcacaagtaatgtatgaacctgtacagttcttccgaggtagtcccccttcctttccttgtcaataactgactgcaaaattgagggtacacaaatttgtaacctggctctaacaagagataactattgaggaggtagtacaaatacctggtatatctttccagtagttatattgttgtcacgggtcaatgtactgtctaaaaatcgttcatagtttccaaggtccaaatccacctgaaaggggtcacaatgcatcaagtttgaggaacaatacctgagatgattagaaaatacatcaaaaatcacaatatgacatacctctccaccatcatccaatacaaatacttctccatgctcaaacggagacattgttccagcatcagtgttaagataaggatctacatacaaggaatgtaaatgtgaaaaaaggatctcatagctacgaaattcacttaaattggcttcacaatacaagccgttacacaataaaaggtgactttttttggcgggtgaccaataatacagagtgttgcatgcaatccagatagacaagaatctcaccaattttaatggaagtgacacgaagaccacatgcttgaaggagaagtccaatgctactagcagtgacacctttgccaagaccactcaccactcctcctgtcaccaaaacgtacttcataatcgtttttgtctctgcttcttcttcttcacctaaatcatcaaaaaacacagaacacggtaaggaaagataagactttgagaagatatctctaccaaacatagaagagattatcgggtatgagtcgaaacaataaagtgagcagaagaaatttacgaattctacctttcaccaacaaaaatggccttctggattttcaaggcggcggcttataagctaacctgcgagaccctcactcttatttaaacccaaattgaaagcaaatcaaaatagtttttttatttggtcaaaagttttttaatctcaaaataatacatcaacattgggcttgagtaagaaaataaaataaaaagggactgaaacggtaaatttcaaaaccatggtaaatttatttttctgctccagactcttgagattagatttagggtttgtgacactcgtgtttgtgttgtggaagtttgcataattttggtaagataggcccaaaagagtattttggattatagaagtattatagggaagtgtgctcatatttttaaaagatccaatcaaaaaggcatcaaactttttgagtcctcctttgctactttcatcatttgtcgttataccattaatagaggccttccacatgtttcatcaaaacttaaaatcagagacacggagacaactagtccatgttttcttcctttgcctctgtttctcatgtcatgtcctcttcttcgactcttaagaacaaaacattggacccacttttgatttagcagttagcaccgacatgtgtcttgctgaagaagcatgtttcatgcactggctctctgtcgtcactctgtcacatcttgttgttacgtgttgtttcatcttattgtggagattagttggagtttactgacaattgctataaacaaaatcacaatggaaacgatatttatccaagagaaccgaatcaacggcagataaatgctcaattggatcattgaggagagaagagtggtgatgaacaattttgcttttatgagctcaactgagtaaaagaagactcactcaacgatatcttttttgttttaggatgataaagagaagtagagaactcacgagcgataagcatttcgaaacgaaacagatgcagtacataggaagtaaactaggattacaacaagatatcatcttatgttacacaaagctgggaaactcattgagtagtgtcggtgttggttgctccagcagcatcggcttctgaagtggtcttagccatcacctcacctggaggaggatggtcaaacttgcatgttgccccgtatttgcaagttcctgtcttcatgtaataagggcaattaagcgcaccctgcaacagtttttgttttgtctatgagattaccacacaaactcacaacatgcaggcttctaataataccactttataggtacctctcttctgggataccctgcaagactcagctttacatttggttgttgaggagcttgtttggtcattgcacttaacctatctgctgggtgatggaatttgcatctctctccaaacttgcactcccctgtcttcatgtagtactgtaatattgaaagacagagcttttggtataaaatttcaactaacatgtgggagaaaaagctcagcaatctctaaaagaaacaaggatactaacgtcacattctgattgtccaggtctttggggataagttgctgaaatcactccaagctgaaacaatttccactctaattaaacccctatcaactaaagaagcgctcttgaatatttctcacaacatgaataaaggcttttaccgtgggttgagtaagagtctgatagaaagaggtagctggtgtaaccagcccaaggttcaaattcgcagtgttcgatgaaactagagaatagtttaccccagcagcttggggaatgaatgctgtgcacagaatcaaaacatcgcacattatgagaatttagggataaaagtaatacgttaaaggttctaaaaaccacaaaattttggcatgatcacaaaccagtcctctcaggatgattgtagcgacaagtggctccatacttgcagctgattatggaaaaggaaaacaagttagaacgttaatgtcacgttctttgtttcaatgttctaaacaacaaaatagtattatacaagagatattcaccttcccgttttgagatagaatgggcagtccacttcaccctgaaaaagctacaatctaattagtgaaacttcattctcagacgtcagaacaggtcagcatacaatgctagcaaaccataatcagttctaagtatagtgccaataagatagtagaaagtcacaaattgtgcctatatgattataagtcagtcttatgcaaagtgaagatgaattcattaccgatctaacaggtagtccttttgagttgtgatacaatgctggggtaaatgtgacatgcggattgtttgtggcatcaggctcactggttaaccccacactgctaccaatatcttgactcgatgatggtagctggatatcctttggatggtggaatttgcatgacaaaccaaatttacattttccagtcttcatgtagaactgatgcagagtagaaatgccaaattaataatcgatattagtttcatatgtaagagcatttataaaaataggataggtcaatcaattatgtttatatcttactgtgcacataggttcagaaggcctctcaggcaatgaatcttgagtttcaacactaacctgaaataaagaagagcatcaagcttctaggtgcatgcacagcccaagaaaaaactaaagcagtacatattacaagcacaagattttatgcgagtgtctgcaggcaaatacacaacccgagggataattttatttggaaaaggaaaattcacttactgcagcctcttctcttggatgattaaatttgcactttgaaccatatttgcagcgttgtgtttttatatagtactggataacagtgaaaataaaagaaagatagtctcaggtcttcaggcgaaacagaaataaaatagctcgaaaagttttcacgaacagcttacaggacaatctggttctcctggtctctcaggatactcttcatttggaacaactggtgcctgaatgaaaagatattcataagcaaaaacaatcatatcattttatcatgtaatgcctagacaatgagtatgatgtctcttccaagtcaaggaatgatctgacaaagggaaaagcaaggataacaaacacggttgcagaagtcgggaagctcaaatcttgaataacaataagataccatttgtcatacctatacctacactatcatgataatgtagtaattctataacctcgtataccaaacaaaaacaatatatatagttacaaagtaattaggcacaaactcccacagtataaaacatataagtacataacagaatatagaaaaacgttatcataataatgtaaaaatcatatgagggcataagaaatacttagatagtagtaaacgatcacctctttccaatctgggattccgccctcaggaacccaaataggatgatcaaacctgcagctttctccaaatttacatgttcttgtttgcatatagtgggtacaatctttctctcctgccctctgtggatatataggcaaatggcttgtactctccaacttagggcgcttggtaaaatagtctgtagtataccaagcttcggtttgaccaattgtattatgggcacccaacagagtcggatagtagagcgctaaattacataataaacaataatatacaacgaaatgagaagatatatactgactataagtataatttgaaaataaatttgggagatactatagcaaaaaccaagatatagcatcaataatcaattgtatctttagttaaacttacagtaagaaattctggcttacatacaatcatgtctgaaaatctattggaaaccatagagttacaacaaaacataaatcatcaatcaattctgcaaaatcaccaagtgttccaataaacattaaggtcaaaactaaaaacaattatcgttaggcaatcctaaagcaacaaagacttaatcaagaacactaccataagctatatagtttatagatgcaatccctaagcatctcctgaaagatgattctaactgtcaagcttcgcgttgtccagactcaaaacaaagcaattggccaaaccaatccaacctctatttcagctaacgagaaagcacagaggaatacaaaccaacatcattgtgcttgagcaaatgtaaattaaaatctatcctagaaagaatcaggctagagaccatgactaaagctgagttttttatgctgcaattgaagaaacaaaccatcaaaaacactaatttccgctacagaactagagtatcacgatgagcagagaaaagggaaagctgaagtctttaacttttcaagttatgcggcatagttctccaagcaataaataagaaaatgatgcagatcccataaatagtaaggtaaacaaagagcctaccttcagaggtgcgtttgacaccaggaggaagtggctcgacggcggaagcagcaccgggaacctccacaccaggtggccaagcaacttcctgatgctgaagcagctgaggatacgccaaatgcgatgccgtcgtgttaggcaaatgatggtacatagaggaagacgatgcaagagtccctgaatagttgctcaaagcttcggatccatcacgagctaagaaacgatacgtggtatccggaaagtaatggtcagcagaagaaccgtagagagaagaaagaccggtttttggcggcagtggttgttgcggcggaggaggagctggagatacggtggaggcagcagcagcataagaaggttgaagggcgtagctatacaattgacgatgtgccattcgatcgaaaaaggaaaccctaaaggaaaaagctttctacttttttggtgtcaaacaaattatcaaaattgttgtgtttgtggggtttacaaccaactcaaacagaacaaaaattctcagatccataaaacttgatttgacattaccactgattctctgttttattgcagtttgcacattattaaattctctttctttcttatcaacacaaaaaatatatagtttttataaagttgggagcttttttacatcagggaataaacactgagggtaactaagaaaccgaacaaagcccctgctatgacttcaacttcagtgtgtcctattgattctttcaatggaggagcaatctcctcactgatctcttctgatgtcaaagctttgttagattcgttgccctttaaactcattacttcacttctacgagcattagctgttagtttgttcaacactttggcatgttttccaacttctctcctcaccccctgcaatgttacaatcagtgagacattaagataacactagaatcagacattgagaatttgagaataaccaacaaagacctattgaacaaaagccagcctaagcttttctctatagactattttacctgggcatcatacatgataaggccagcataaaccacagttagaccaaaaatggagtcagcaaatcccctgaagccaaaccatattcaggaaattgcataagctgagtatatttaggggaattgagaagagaaaggttcaggctaatcacctttcaaaagcaatagcagttgctgcagccacaacagactggtttctcaagaattaggccaaaatgtcagagaagtagacaaacaatattaccagaggaaacaagaataaaaaaaggataagcttacagaagaatgtgttgaagggaaacctccagcttgaaagacacttctaaagtccagatttttcccatacaaaacgacagaagtgaatggctttgagagctgcccaatcacagcagaagtcccagcagctatgagtaccttcacgccggtgaaatcaaaagcctaagtgacgatgaccctccaaaaaaaggaatgaaagaagagaaaaaggcgaaaccttgttgtggatgacctcagcgatatcttggaatccaacattgacaacgcaggtgagacgaggtggcttctttgggcagcttgcaagattgaatttggagttggagaaagagaaacagagatcattggcgttatgagacacaaaacagtgcttcatcaacatctctgtgcagaagatggaactttggtcggaggatgacgataagaataaggcagcgagaaatttggaaccaatggttctgacgctctgttatgtcgagaagagtgttgtctcttaggacattttaattgactcagagaagcttttgtggattttttcattgacaaattgttatctcacacacaaaatctgctttaactcttttagtaaaactcttttagtctcttaaaccaagtcatctgttcttcttttataaatcacaatttgtattcgccaaaattaaagaatatgaacaaaaacaaacatatcgaaactttcagcttgtggagttttaagtctaaaagtactcgaaatctatatacgccgtatcatccgtgggaccagcagcacaggcgaccagaggctccggcttcattgagttacagtgatcaccacctccatggctcttggtcttacctctagcggccgcgtacggtcccaagtccacggggtctggaatgtgaggtggggcagcactacgaactagagcccaattcactccttcaaagaaagggtgttgctttatctctgtggcccccctcgtgtaagcgatccttctgtgtggatccttcactagtagtccgcggatgagatcacgtgccgctgagctcacatgcggggtatccgggaacttcagcggctgacccaccacattgtgcaacgtggctctgtttccctgccccttgaacggggtggtcccatggaggagctcataaaggaagatcccgaatgtccaccagtccacagcgctgccatgtccctcgccacgtatgatctctggagctaggtactcgtgtgtgcccacaaaggacattgaccgcacatctgttggctctgccatgagctctggcatagagaggccaccgagaccagagtctgatttcgctttacgggttttcttggaagggagtaggcggggaagaaaggcggatggatgcatgcagccattgacagcaaactcctcattgaggatagcacctcccccgctgcagactgaggaggatttaacgagggtcggattaaaggtgcaacggagggagaggtcgaagtctgagagcattatgtggccttcatctcgaacaaggatgttctctggctttaagtctctgtacacaacccccagcatgtgtagatactccaaagccaatagcacttcagacgcgtagaacctgtcaacaaactcatcagagaagataacatgtaagctccaaagccaaatatattgaatgttatctctaacctcgcggcctcttctgtgaaacgcctgctgggttgcttctgtctgagagaatggagatttccgccgctgcagaactccatgaccaaacagtagaatttatctgtctcaaagtaagaatagagagtcggcaagaaaggatgatcaagcagggataggatttctctttcggtttgtgctctcagcaacttgtttctgctggccaaggaggccttatccatcactttcattgcaaaaaccgcatttgtcccccgcaggtctgcaagataaacgctgcctatatccccataccctagacgtttcagaagcctgaagttgtcgagacctatttgaggacctttagaagcgattgagttaatggcatcccacctcacgtcccctcccgtgtgaggcttgaaaggttgagctgatggacctaccaagttatcaccataggcatagtccccattatgtctaggggctctcttcttgtctggggactttgtcctgtggtggtgatgatttctggcacttggcgagtatgtttcagatgtggtcaaaggaacaatctttttgggatcataatgaagatttttaggagcattcttccgcattgctaagctatcaccatcgctagaataggtgttatgctttaagtcaccctcgctattggtccctctagtcgaggggggaggttcaagagactttggcggttgatgtttgacgagaggatccatcttcttgggatcaaaatgagggtttcggggaacattgtctcctagtttaagtgaaaatggagagaggcttgaacgaggcgacttaggttttattgggtctatctccttggaaccgacattagctgtgttcttcttagaagctaagtccattttcggaatatctccaggttaatgacgattcttcttccgttataaagtagctcacctacatcatcaataaaagcaccttaagatgttttgtgctatgcaacatgatgacaaaaaaaaaagcatgggaaaacattaagatcacctttgacctgagatgatcacgcttccttgctgatgtaaaagacaagctgaggataatcaaaccgaagaaactgccaccagaatccaatggacaaaacatacaaagagagagagagggattgtaatgcgtcagagaaacgtaaaaagcgagaaccttgaaacaggttcggaaaaatcaagaatgcagaccatgtttagatatcataagtgtaggtagttcccatgatgcaaatctcaaaactctaaaacaaaagccagttagtaattgcaaggttccaatacagaaatgaagaaatgaattgtcctgtctttgtaaacgtgtaaatccccttaatagtatctcaacctggaaaaaccagagagagagtatttttgaaaggaggagatgcaaaagagatggagagagggaaattttcttagcctctcatcatccctctacgcttacattgccgtttattcctctctctctcccaaacaaaaatttgagtgtctaaattaaccatttttttcctctttgcctaaattggtttcattgacagagacatatgtcaacaaatgcagagatacattgttaacaagagagatatagttacagtaatagctcacctggtctctcctcgtcttcttgttctgacgaacggagaaactgatgtttccagttgaattgttctcgacggggtccaagtagtagtaggtttgaaccgttgcgcaacgttttctcgaaaaagaagcattttttcgccatgactcgggaataaggagttgcgaagtatttgtctttctcctccgattccattggctcacgaataacagtaacccagaaaaacggggagaggaggagataccaccaccgaccggcgaatttatgattgggctttacgtttacttgtacttcaacgaatcatggccctgtttaagaaggcccattttagtaatattcagcattcgccgtacaaaatttaggcccatatttgtatgtttttttttttttttttttaaaacagtttcttcttcatttttttttacttgttaacatttttttaatataaataaagatgtatactattttctgatgatgggggaacattgcattgacatttttgtaaaagaaaaaaggtgaataattggaccgttttcgtaattagatgatgagggaaatatgagttgtgtttgtgtataagtcaatgagataagtacaaaaatcaattataagatagatgatccggaaattaagcaatggcggggcatggatgatgtcattgatacacacttgacattacaatttacacaccatctccatcgttccttgtaccatacgtcgtctacactcttaattagacctagttaacgaaggtgcgagtataactacggtcattcttcttttgacgtgtgtttatctcccacacgtctataaaccaaaatgcataattacttagtctagcaaaatatacactaatcaagtgatcatttgtatattcacttgtcacacgaatgctattagctgttttttcttctactttagtgtggaccgatccgtgatttgcggaccaaatcaatattggatctaaaaccagacaaaaacaaacatgactaaataaaaatcatataaatcagactaagcctagtccaatacgaaccgtttggcctattcctacatctctaggggtgagttgtgtgatgacatacatacgtgggatccaaacaatgaggcgtttggtaataacatggattgtgagacttttcattcaaccaaccaaaattagagtacatccacaacaacgatggtaccccctcatgtgatcctagaaaaaacgaatacattttctttaatttcgaaatattcaatttggttttacgtatcatatctggtttcatgtgtttctctggcctgttcattttcacgtttaccatataaatggttattaatgactagcgaacaaaataaatatcgtcatgtggctacttgctcataattattaaggtaagtcgtttttctacacttgcggcatagaatcaacaccggcctttcatgcctttatcctttaccaacttctcattacatttggccttctcacattaaaataaaaccaggttcagtattagtatcaacggttggattttactgaatccgcagagccttgttacttctttttttcttcctgataaagccctgttacttgttagctagtgtatgatttatttaaacaccgaaaagacccgtgattaaaccaaataatgcctccctgtattattcaactctgtcgagttattatgacaattattatatataaaaaatagtagaacgccgccatgtaacaacatattgctgtttgaatcacagtgcacaatttacattggtaataaaataggggtcgaggtggaccatgctaattacataattataggttattttctcacttttttgcaattgctatattaatgaatcaagacaatgtaagaaaaattttgtaaggctgtccatgaagtcctttagggttgttataatattttttttgtcgtcacgttgagattgttataatcatataactaaaattattgggtgcaaactggcagtttgaattaatctcctttcctcctcctatgtctttgtcgttcgttacatatttctcgagcagttaggattttctactagatattacttttacttttatagtcttaatttagaagttcggtgataccgactaaattagcaactatattacaaaggaataaaataacaaacatatcactgattgttcaatatatacacacgcgtagacgaagtgatgggagatggtgttaatccgtgacactacgagtacacgacagtgttacggatatgatttaatgagataaatttgtttataaatttgagtttaaagaagacaagagacactttgtagcttggattggaattcaacgcaacacagtgtacacgcatctctttcgatttggctaatccaagttatatatatttgtcatgttttgtgtctctctatcttctaaaatacagttttttaagtttttaatttgaaccgacgattataaaatctaagaaattttagaagaatccaaggacgcaaatgacagccaataagattatgacagctatacatcttactctcgccattgtgactttgactctctgcccctcttgtcctcaccacgtataatccatccaaccatatagtattatacctaccctcaatcatatcaaacgtattttggtcgttaatttgtctgtttcttataattaattattgccgtaagtgttacccttaattacgtttgcataacgcgcaaaaaaaatacgtttgcataccttcggtttcttcctagttgtcttaaatgagtaaaataaaaaccgacttaatttgttggatgcaaactctagttttgttactacttagtctatgatgtcaaacaaaaaaaagtctacgtactagttactactactaacccttaattaggggggcttttcatttttattaatcttaaattaaacaaaaagaacaacgaaataacattgaatgcaatttcagtttttgagttgtaaaacaaataactcgaggaggattcaacagtaaaaattctattgaaatgaagtgagaaattcaataatttgagaacagatctttctcagtatatctgtcattgttgaccattagctacatttcaaaggtttacttttgttttcttgttgaatgaactaactaaaaagacgaaagaaaaaagtgaaatcatccgggagtatctgttctttaaacattacgtgttgaatatataatttagacgaagaacagtagtactttttattttagaatattagaggaaataaacaaatttaagagaatgttttggtttaatactgtgttctgtttagccgttttatgaataatcgccataatgcatgtggaattcaaacgtgggcgtgtttcttttcgtcttaagtaacactttaagcgtctcgtaaatggttagtatttacgattaaattagaacaaagttaactaagtatttgtcgttaatttactagataatgatttttaaaatataagtttcgagttaatacaaagggaagtaaataatatggcttatacatttagattacgttattttagttttggatctaaatttgtaaagaaattagctaaattaaaggggaaaagggatatgttttttttttttttgttaaagggatatgtaatatttagtcaacgagaattggttaattgggaaacaaaagttattggaagagatcaaaaattttaaatattaatttttgagtttatacaaagggaaagaaatcttatgatttaaacatttagattacattattttaattttcggatttaaatttgtaaagaaattagctacattaaaggggaaaattggagagattaattgccccccataaccagaattggttaattgggaaacaaacaattttagagggggcaagagagaatctttttatggggtgcaattaatttaattccttaaaatgcttaagaaaattcaaaaatttagggagggacaactgccccatattaattaacaaagatcatccccatgagagaaaggcgtttcatcaatgtatataaatactctgttttggaaacagaacccaacaggggacaaaaaaaatcaagaagaaaaaatgcagaagacattgctctcatgtctcatcacgacgctcctcctaatcaccgtcgcagattccatgaaagacacctcggtgcggctaaaattagcgcacagggacactctcttgccgaaacctctcagccgcattgaggacgttatcggcgccgaccagaagcgtcatagtttgatatctcggaagcgtaactccacagtaggagtgaaaatggatttgggatcagggattgattacggaacggcgcagtatttcacggagattagagttggaactccggcgaagaagttcagagtggtggttgatacaggaagcgagcttacttgggtgaattgtagataccgtgcgagaggcaaagacaatcggagagtgtttagagctgacgaatcaaagagctttaagaccgttggatgtttaactcagacttgtaaagttgatctgatgaatctcttctcactcactacttgtcctactccttccactccttgctcctatgattacaggtactttctcaatttggtaatggtgattgcattatttaatacagagtcaaaatgtgattaggtagattattaagaagtgatggtgatggtgggatttacagacattttaatggagaacaatttactgtttaaggaattgtgtgtgtttgagagttgagacaagatattttagatagattttggggaaaagtttggtggtcaatcaattagaagaagagggtcctctctttctctgtctctcttgtcaccatatcattgtctcttctcatcacattttctcacaactatttagagaattctttggggtggcatggattagatgcaagtgcattgcaagggagggtgaaattaaatgtgagttgagctataattcagcacaatacataaatgtcacttattgtatgacttgtgagttaggtttgacatttgagcatacataaattcaacctctcttatgacatttaacctaatacaaaaattgttaatgtattgtattaacattaattttttcggttgggttagatatgcagatgggtcagcagcacaaggcgtattcgcaaaggagactatcacagttggtctcactaatggtcgtatggctagactccctggtcacctcattggttgtagtagttcctttacaggacagagcttccaaggagccgatggggttcttggtttagcctttagcgatttctccttcacttccacagccactagtctctatggtgccaaattttcatactgccttgttgaccatctttccaacaaaaacgtctccaactatctcatcttcggctcctccagatccaccaaaaccgccttccgacgaaccactccgcttgatctcactcgcatcccacccttctacgcaatcaacgtcattggaatctccctcggatacgacatgcttgatatcccctcgcaagtatgggacgcaacttccggtggtgggactatcttagactctggaaccagcctcacgttattggctgacgccgcgtacaaacaggtggttacagggctcgcacgctaccttgttgagttgaaaagagtcaaaccagaaggagtaccaatagagtactgttttagtttcacttccggatttaacgtgagcaagttaccgcagctgacatttcatttaaaaggcggtgcacgatttgagccacatcgtaaaagttacctagtagatgcagcgcctggagtcaagtgtttaggatttgtgtcggctggaacgccggcgactaatgtgatcggtaatataatgcagcagaattatttgtgggagtttgatctcatggcctcaactttgtcttttgctccctctgcttgcacttagctgtcttgtccatctctcgtgtttattattattgatttgttcgaatatttattgtttgctagtgaatgaataaaaaacatgtttgttagtgaacgaatacacacctctctaatcatcatatcatcttgtaattcgaatgatcgcattcactgcctctacaagattcgtcattattgggcctttaggagataaagtacattcaaccactaaatgggctgtaaagagagcaggtagtaaatttattattgatgggctcttaagcccagtcttaataagttcatactttgacagataacactgcttctgaaaataggaatctgattgcatcgctgttttaaacccatgcgctctcttctcaaagcatattttctttctcttttctttttacactctgtctcacttatggaatctttagcttgtagaatactctgttttgtaccaaatatagaactcatctttgcttaaagatcacatcatcttgattcttgaacacacacacaagttaaaaccttctaaagaaaaatagagaaataatatccaggtggtatacaaaaagagtgaagaaggaagaaggagcgttgttggtgttggaacttgtgaaaataataaaagggtggaattgggaaataagttaaagttgggaatggggggaaacacatagtcacatacccaatgaccaatcccatcatggcatccactaaaatgatccaatcattattggtgacagagaagcgtcacatgctacatcatcatgatatttgcttctacgagaatcaatcactacttactcttctttcaatagtacatttgaagataaaataaacatcatagtccatcgaccaccgtataatattaatatgtatgaaaaccaagaatcctcaagtttcccatgaaccgatgaacctcctcaatgtcatactcatacatgacagctaaattaaatgtttaaagatttggtcgtttaggcggccaaaatgatccggcaagttaaattttggtctaattgatcaatggaaaaatgttaaacgacttttgtttaaggtgttcgtttaattatttgtaactcttttaaaaccatattcgatatgtttttgtgaatataggaaaagctgttctaaatttttatatattataggttactctattgtagtcttgtttttactttttgttgcaaggattactctatattctaggcaagattacactaatacacagtcccactaatttcatattgttggtcattcttttttttgctaagaatcgttggccactctcgaactaacaaattttgaacaatagataaatcaaatgaaaatcaattactatttcaatttgccacaccacacatacatcaaaaaccattatacatgtgattttaaacacctcacacacaagaaaaaaatcaaaccagctggtttatcttacattgccaattttaaaaaactgcaatctcttttctcctaaacctacattttgcactcgaaagttaaataaaaacaccactttcaattaaattaaaaattaataattagggattggttgcaaggagagtgcaaggagcgtggcgacagcaagtgatcaagtggtcgtttgtaagaccagcggcttgcatgaatgagtgaaccacagtgggacccacgaaccggaagcctcgacgaaccatgtctttgctgatgctctccgacttcgatgtcttgaccggaatcttgtgtccaagcttgtagttcgtggagattggtttgtggttcacaaatccccaaaggtatttctctaatgacacaaacgctttcttgatctctacgatctttttagcgttttccacaacacctctcactttgctcatctctatcttgtattcgatgcttattgcattcatctctttctcggtgagtttggcaaccacttccgcctcaaactccataaaggccttcctatagtcatggcgttttctcaaggttgaagtccaatcggagcctacttgtgcgccgcttagggtcagcagttcgaacaacgtcctgaaaatttaacataactaatttaattttgaacaaaatgaactaatgtacaatgacgttttcatttggaaagaagtattaattatgtcacgcacttgtcatcatgaactggaactccccattcttcatcatggtaggccacgtaaataggatctaaaggtaaccaaacaaatcagttaggaatccaagtattttataagatggaacctaaagttacaaagaaaacttaaaataatatacaaggggtttaagctgattcaaacaataccaaaatggaaattaagagggtgaaacttaataaaatcagttcataagtgaaattaactaacattaaccggaaaacaaacaagtaataaagagagaaataggtttataccagaagtgggggtgaggaagctgcatctctgaggatgagggttagggttagggttaagaagagggacgactttggaagaagtgaaattaatggttgatttggatctaccgtaatgagcaatctttagtttccttagtgcttgttgtgccgccacttgctctctcctcacggcggctatactcccaggagcctccgttatgagccacgaagaataactatctccttccttaaaactctttgatttcttgcgctccaagcttcctctcactttggctgcaccattgcccatcacactgtccctcttaagggactcagagcggtccattaggctattgcaactacttggcggcaacattccccttttggtcaagctgattgcttccgttttgctcatattctctatatatggtgatggatgataagttgtactgagagagagagagagagggttgagataatgaataagaaatagagaagagaagtgattgtgaacgtatatatattaactatgagaggcagagagaattgaaaggtagttatatactcgtaataataatatgtgaacattattctaaaaataaaaccgtgtggataaattttgtattagtattgacaacaagtaacaacaaaataaaaagagagaaggaatatagaaaagagaagaagcagagcatgtgcaggatttgatgcaatgatgccaccaaatcatcccatgtgacctttaagtcttcccctaactatttgtgtttacttttcttttggtacttcgatattctttcttgtatcattttaggctgctttcttatatttgtcatatttaaaaattatggttggtatccgatattatgtgatttttttagcagcaatttttttgttttgtgagatttttaatcaaacattaaacccatattttccaaaggcaattctgttatatacaagaataactgtatattagtattttagtcaacaacttattcaagtatttttctttcaattgtatgtcaccgcatctactgtcgttctcgtttcatttactttccatatataatctatctcttcatgtacaattagattttctatgaaatgcaaatgttaacattatttatacatgtaggtcgaaagaagtagaagagaaattgtggtgaacttgatgaaattaaaggaccaaatcctaagtaactaaagtgtttacgatgaagataaggagacagaccatgtggttccacttatcttgtatatacattattaccaatactataataataaacactacttaatacatgtcctttattctcgatctactgtgcctcggtgtcggtcttcgtgttgcttgctcctcaatcatttcaatattcatgagattattatgtttgcttcatccgtattgttcatttcaatcaaacgcgggacgtaataattggattcccattttgtgaatcttttcttctgattactataatttgaccttttcaacacctgtatgcatattcatgtacaagtgtacgcccgcaatttaattagaagaatgtggtgtggcaatgtaacatgttccctctttgccttcgctcttcccacgaagtttcattaaaaactagcattattatttcaatggaataccgccgtgtagtctctcatcaatcatagcgcgcgaacgcaagacacttattgaatctattgggcctctagtgggctactttctttattggttgaatctcacacccatatttacaattaacatagcccatttaggcgcatgttaatatgggcggtgcaagtatagattagccaaaaagcctttattagatggtgaaaatttcaatttgcacataacaaagtcttagtgggattgatggagaaaaaaatgagacactgatttggaaaattctcagcttttcaaaactagtgaaaagcagaaagtggcaattattcatatatatacacttgagaaaatgaaaatattgtagagtaaaagctaaaaggtccagctgccaagatcatccatgggattgaaatcgatagacattgcagaggagaaaatggaagcaaaatcaggatcaaaagcagaagaagaaggagtgttaaacaaaatgtccatgttgagatcatcatcatccactcccactactgccttatcactaggcaacatcggagcttcgtggatcgccattccatcaacatctgaccagtgaggaatcatattctcatcatctaaaagacttgacatgggatcattgatagggatcatggtttgagtacttgacatgttatcattgatagggatcacggtttgagatgggattgtagtctggttaggagatttaagtttgtttggtttagtggaagtgggtggattgatgtttgtgattgaaaaagcagtggttgattgatcaagatcagtagggttcttcatgatggacgtcgttttgtttggcttggggatattattattgtttgaagaagaagatcttttgtgtgaaggcataagattatgtgtagaaggatctaagccttgagaaagaagtttcttcttaatgcatgagttccaaaagttcttgacttcattatcagtgcgtccaggtaagtgcttagcaatctgagcccatttgttaccaagaatacgatgtacgtcgatgataatctgctcttcttcctcattaaacgaacctctcctcagatcaggccttagatagtttatccaccttaatctgcaactcttcccacatctctgcaaccctatacacacatatagatactgttaggattaatccacatcgagcatatagtatataaaaaacataggctaattcactcattgctaattagttttgaattgaaagactattattttttcacatgttgtatgtttagactcatgaacaaaaaatagtaaaaagaaaagggaagtagagatagaagatacaaaaccggcaagctttggaacggaactccaactaggatgaccatgagtggtgatataacgaagaagcttctcgtcttcctctggagaccaaagacctctcttcactttgtgttttccacaacatcgatgtcccatttcatctcttttcatttcccacttctctctcatcttcctaacttatatattacaaggtctcttggtgttgattaaccagcagggtggtcactatttgatgtattttccctgatcagtactaatatctttcttgggagaattaatctactatatatgattaaccaaacttgtgtcgtttctctttttttctctgtgtgtcttcaaatggaagcctgattagagacaccagtagttcacgtcactttccttaacaaaatcatctatgtatctcgttaacttgtgtttctagttattgtcatacattgcatgcttaaaatcctataattatcagtttagtttaatgcaatggtttaatgatcttatatatgtatgctttaaccaggacactcattactagtttttagtttctgtttcactcattacttgttgtctactagacttcacaaatatttcggatcattggtaagaaaatagtagaatgactcgttgggttttactaccccttcacgtataacttgtacttatatatgctcataaatttttgtcccagtctgctacttttatcgtcatcatgggagacttttctgcaaatgtgttagcttgttgaacagtcgtagaagcgaatgagcactcaattttggatatttggaatcataaatagtattgccatccgtaaatacgttttcatttactaacaaattagttaaaattagaggtaaagtagggagcacgattgcataaaaattccgacctaatctcaactactagtaaattggatctttccctggaacttccgaataacatgtcctcttaagtaagccacgtacgcgtcaagcttaatagataaagagagagataggtgtacaacgcaacgtttatttgaacccgtcaagttaaacgtaagaataaactaatgggtagggagaaagcggttaattaacataataatataaagacgtcgctgttaattaccgtatatgtaaaaatctttgtgtagatgaagcttcgtatatttaactatacacttgttctaggtttccattaatataacgtagtcctctctttcagtcttttttcttgcaattaaatattgataaaccctaaccctgagtaaactgatggaattagaccacttggtaatctttttgtttaaaaattctaaaattaaagaaataagaggcaaattttgggccattctggtattaatttgacatcatgaagtcagaatgatgtaacacaattcattttcgtgaaaagctataataactgggtaatcacttatcatgattcatgagttgcaaaagacacgtacgtgatttaaatgtcggagtagtaaataagaagctctatatatactacgtagctcttttggtgttgtctttctttgtacaaaatttctaatttacttaccaaatgtttagtttagcgtagcagtttaatttacatttttcaacgtgatcaacattacagcatttgtgatctggattgtttttacttattttgtgtcattgtgtgtaattaccaacgtttagtttgacgtagcagattaatttacatttttcaacattacatcattgtgatctgtttttaaaacaaaaaattaagactccttattttgtttgtaattatatttcagcttaaaaggtagtatatgatgaacttgtatatgatgttaaaagtaaaaatgagacatgtaaatgtaattacattaacttatttttgttagaaataaaaggtgagcaacaacgaataataacaaagatctgaaaactgatgaagtgtgagagaaaacaaacaacatatttactccatcgtccaatcttatctttaagttatgtaccagcgcagtccttacaaaagattaaaaaattacatccatttttgaccgtttcggatccataagacttccattgactcgtcaaccgacatacttaagacttgagaatacaacattaccagactctctctagctggtttacaggtctatgaaccctcaaatataattcgagtttttgaccatttaaggagggggggggggggggggacctgatataggaatgggcttttctagttttaggctttcggccctaatttcaattatcggactagtacagaattattagaatgcacatggataaattcaaattttccataattccatgaaatggcaaaattttcacaaaagcctgcaagtactgcagtgatattctatttaagactactggagatgaacaggccagtatcggtgggtggtgatgatggctagaaaagtgactagatagaaagacgcaagattgatcggttataattgtgcatataaacttttataaacaaaaattgaccggagagattttgcatgtaaatggatgtgactttaaaatatataaattcatatatcatgggcttctagaaaaaacaaaaccatccgaagaacaaaaaacaagaaatcaggttgtgagaactaggatcgaatttagaactatagaattgtccaaattgagtaaaatatatgtatcattgtgcaagtgaacacatatataacaaaacacaagagttgtgataatcatgaggcagcatacgttccacatcatcgcatatatagatcaagggaataacgaagacttcatatgtttggcataagttattacaagtaattttgtgcataattttatacaccaagtgcgcattagaaactagagaagaaagagtcaagtagctagatctatatttgatatatctcttctctaaccgagacaaaccgtacggcccttagtgatggaactcctagaatcttgtagggagaagttggaattgatgtcggggagaatcaacgtagagtccatggaggaagaggaaggaaaatgatcctcgaaccatgggattgggatggacgatgtgttgttacaaatattggtgcggtcgaaaaatagagtagagtagtctttagtgaggcttgcttcttgggtttcacatgctttctctaacatgctctccatgtatttcccttgtgccgctatcctttgattcacctgtctttctattactacctcttcctctatccttctttgcacctccatttgcatccttcattaccatccataattaccatttttatattataaaattttgagtaatatatctatttatatatgaatcaatatatagttaggatttggaattgaaggcacatactcgttcatattgcgaccaatgatgagcggactagtcgtgaaaacagcattccttcgaagatccaacatggaagctgcatgcatgatgtttattaattaacatatattcatggcatagtcacagatgaattaattaaccaatgtatatatgaattaataattaagtttatgacagacctctatttgtatctctaatacaaatggagtgattttgactatgctccttgtgaggctgcttcccaagtctgaacttctgtagttgaaacacacatacagtatatgttttaaatcctaattactacggcaagattataaaagaagctaataacaaaaaaattaaagaagaggaaactgaggaagaaggtatatacacctggagatggctcttgagatgataaagagtgagacccttcacacccataactctcattattgtctttggtgtagcctctgctcatatatagcgcaattaatatagctttaaaggtttatctatatagggagatgtatatgatgatgatgatgaaaacgtactttcagggcctccaaggtgagtgacggcgtcaacgaagcgttcgtgaagctctgtggtccagcgaaggcgaggcttagggtcagtggtgaggacgagacctgatgatgaatcatctctgatctcctctctcgactgcatcatttaactaacaaagtactaaatgccgattgatgatgctctaatcaacaagagaatattagtatttatgaaagatggaaaaaggaacacacgacgtcttgcaaattacaagtataaattattaagagacattgacataaataatttttaatatatggaaaataatgggagacatatctatatatgcagtagggtttaggctttgaagttgtaaaccatgcaagcttttttgcatccacacatgtctaaataccaaaaaattcaaatttacatgtctaactccttctatttccaatgtattgacgcatgtggccttgcaaatatcatcatccataactcataagatatgaaaattacttttttttttttttttcatttagtgatttagtatgcacatgcatgggattaaggaacaaaattaaagcatctaatctgttgtaaaatttgtttaatctcgatgaaaagattcgtgtgctttgtacctttcaataaagatgacaagtggagcaaagctgatgtttaacttttagctcatcaattgagtacatatgtatgcaaataggaatcagaagttggaaaaaaatgaaaaaaggaagaaagtattttgttttggttgcttagattttaagcagtctcctttattttatgggttcttcttatattactttacagatgaatctattccctttcatctcactctaatatgaagaagacttgtcttgatccagcttgagaaaaaaagaagaagaagacttgtcttgatccagcttgagaaaaaaagcaatacaaatattggaccgaataaaaaaaaagcggaggcctttttaaaaatagtttaagcccaatttatgtattaaaggcccaatgaattggtcgctatctacgcgtcctaacgtgacgtttgccatgcatagatttttcaatttttttgaccactctagtctatagtgctctatttgttttttgttcttgtttctttttgtctccctaattcaatattcatgctgtgatcataagtccataacaaaataaaatacttggtcatgcattaatctcgtaatatttagttgtatttttcagcttacaacaaaaaacaaaaaaacaaaaacagagcagtagtagcaaaaagaaaaaagggacagtctttaccaataggaaactgacacgatccatcctaagaaacttcaattttggggtttctcttcgtcttcttcttcttcttcttctagatcgagagggacatgggtcttaccagccgccgttgacgactacgacgaccattctcttcctcttcatcttctctccttctgcttttctctatttcctattctctccaaattcaccatttccttccaccactcagagatctccctttcttattagctatgtcttcttctaacacgccatcttctagcgccgccgctgccggatcgatagattcttccgccgcccggagaaattccaagagacccaagtgtatttctcctttccctcttcctcttcctttcgattctcgttggttagattcaatcaatattcgctgtgtctttgaattttgacttcaagttctttagtcaaaaatgattattagggttcttattttttcatcgaaagaattgatttttagctggaagtcttagctaggaatcgagaatgctatagctaaaagttgattgatctgcagattcgaaatttactcagcaggagcttcctgcttgcaaaccaattcttacgcctggttgggtaagcttctcttcgtattactcatgtttgagtctcccaagttttgtctttgaatcgctatcaaatttatcctttttccttatctctttttctgcaggtgatttcaacgtttttgatcattagtgttatcttcattccccttggtgttatttctctctttgcttctcaggatgtaagtgaccatgaccctgtgctaatcttcgtttcattgttatctatctcaaatgtttcaactctcatgcgcaggttgttgagatcgttgatcggtatgatagtgcatgcatacctctatctgatagggctaacaaggttgcatacattcaaggaactggaaataaatcttgtacccggacgctaattgtgagttccctatgcatgtgctttgttcttggagattttattagcctctgaatgcttttgtttactttctctgttctctttgggtatttttaggtgcctaagcgtatgaagcagcctatctacgtatattaccagcttgagaacttctaccagaatcaccgcaggtattgttgaaccgctacattgatatcacaaagtggttgggtgcaaggaaagaaatgttcgcatttaaaattagatgtgacttagattccttacatatttctggcatttgatatcataggtatgtgaaaagccgaagtgattcgcaattgagaagtgtgaaagatgagaatcaaatagacgcatgcaagcctgaggatgattttggtgggcagccaattgtgccatgtggtctaattgcttggagtctctttaatgacacatacgttctatcaagaaataaccagggtttaacggtaaacaagaaaggaattgcatggaagagcgacaaggaacacaagtttgggaaaaatgtgtttcccaagaactttcagaagggcaatctcactggtggtgccagtctagatccaaataaaccagtaagcgtttaataccacagtacagtcttagacccagtcatatcctttgcaaaacgcttaacttagtctccctttctctctatctctttcagttgagtgatcaagaggatctgatcgtgtggatgaggactgctgcgttgccaacatttagaaaattatacgggaagatagagagtgacttggagaagggtgagaacatacaagtgactctgcagaacaactacaacacatacagtttcagtgggaagaagaagcttgttctgtcaacaacaagttggcttggtggaaagaacgacttcctcggcattgcttacctcaccgttgggggaatctgtttcgtcttggcacttgcatttaccgtcatgtatcttgtgaaacccaggttagtagcttatccttggccttttaaatgtattactcatgttcacgtagataggtgttgatttggtgtggtatggggtttgtgcaggcgactcggtgatcctacctacttgtcgtggaacagaattcctggaggtcgttaaacagatgactgcatcatctgcgtatataaatctacttatctctggttgtaatttgatccaaaattgaaagtgatgatctttttttttttaatatagatgtgaaatgtatgtatgatgttacagttggaatatgctcattacatagaatgattgatgcttcctatcatgctcattaccttttctctttttctcccaaaaagcagtccctcgaatcaatgaatgcggattattagctggcctctctgcctttaactattgtttgtatctatcaaaggcagtcattgtgttcaagatagaatagtattgattctgagattagaaacaccattacagattcgagaaaaagagcggcatttggtttgtttgtttgttagtttcagatcaagaatcaggcccagatggcgaggagagacatggaacctgcgcctaggacgagagagagataagcagccaagtgaagccagagattggattgcaatcttggattcataaaatcagtagcaagaagatcaacaagtgacatgtatatgagtatcccagcagatgcagcattcaacattccttccaccattattgcctctttgctctctttcctgtagcctaaaccacttgacatccccaaccctattcctatcccaagtggcgccgtcaccgagaaaaatgtcgccattagcactgtcgatttcgacttcatatccgcctattcatatacacacaacatgatcatcatgctatcatcaatcaattgaattttgaacaatgaagaaaaaatgattgttgtgacacgattcgtctaagctaagctacctatgaccataaacgatttggaagagactaaccagggagatgcatccaccgaggccaagaccttcaaagaactgatggaaagatagtgcagccatgagtggctttatggtgtctatgctctgtgaagctccaagtgatatccctataataaccgaatgcacaactatcccaatctcaagcacctgcgacactatacgtcttctgatcaactcggtcgaaccatgtgtgtgtccgtgactagcgtgcgtgtgaatgtgaacatgacccgcatgctcttcttcatctactactacgttcacttgcttgctcccatggttattgctaaaatgttgcctcttgtaataccctgtcgcgaatgtgtcgatcataagagtccccatcgccgacagcatcgctacaaaaccagcaaacgggaacttcccagctgtagtgtcctcaagacatggagagctcaatctctcgaacgcgtctggtaagatatgaacgaaacctgtgcagaggatcactcctgcagcaaaagctttcaccatgaagaagatatcattttccggttgtaacgccggaatccttttcccgatcaacggtagactcacgccgactcctccggctacaagaagtaaagctatcgaaccaagctttagcttcgtcgctttctctgcttcgtcttgagacacaggatcatcgtgacttgtacaatcactcgaggcacaacacatatgcaaacatattatcaatactacacaaattctcaacatagttgttgccgaaaaacatccacattcagacatgagtttaagatatttatgttcttgttctgtaagaaagtaaagtttgaagagttatggtgaagaaagaggagctttttatagagagaaagcgagagagaacctcacttttgaagcgagtggtccataaatgttagtagcagaatctctagttacgtagagttgaccactatacacatttctttgtttgtcgcacacaaaaaaataattaaattctgttattactcttattgtataccattaagtctttaacaatgactagataaaataggatggaacatttacggaaaaaggctgcgaaagaattcattggttagtataagaaattctgcaagcatcttagattgtagtctatggatggttcaagtaagacgccctttcgatctcttctaatcattacttatctatttatacatttttgagatatacaaacaataataaaacaaagacgacaattcaaagatagatgattagggaaagatcatagagactaaaagtgagtttggaacattattggtcttaaactttaggggcgtagaatagggtggaaaagagattagctgtgaatgctaatccttgtaattattaggttagtacatatcttttcactttaccaaaagcaaaatatatgtgtattatgaattgaaaatttgaagacttttttactagaaagtaaaatgtgaagacagaatgtcgtcatgttactatgtgagccgtgaggagagtggttttggtttgatttgttaaatctacttttggattcaagaaacgtaagatggtctcatcgtcctctcaaggtgggatgggtgggtaatgctggcccaatcaaaccacgtgtttcaaattcagatttcaccatcgccacttgagtgtgatggttacctgaacctaatgattttggccttttatatcttgttttcgaaaactctgaactataaataagatatagaggtttgagaaaacaatggttgaattttcataagcaaagaaattggaaagaatccaagtttgatcacacttgactatcatttcactttttttttgtttttaattcctaaaattgatctaatagattatatataaacatatatgtacctaattaatctctggtatatgtaagacattcactttttatttttggttggtaattttatatcgctgcagtatatgatttaacgatttaataattacgaatcataataactatatcaaagcgataccaaaaacgatatagttaaattttataccattattgtctactattttttttaccatttcaagataattttatatcgtttaccgttttttcttcccgcgaaaaaattcataccacattctagctccaattgaattaaaatgtatcaaattctctatcaaatcaggattttataaactataaggtacaatttatatcccagctgattaactctagtccaaagcttaaagacagaacagtataccggactaaatttccggtccattttgtatagggagacattttactaaacaaaccggtttggcgaaccggagtatttgcataactgaaacaacatttataagaaagaaaagtagaaatgaaaaaaacattttgcatagaagagagagaggcggagagagaggaaagtgaagaagcaatcgtgagagactctctcgagtcttccctgagtcactcctctcctctcacacctttttgcttcgcgattaagagtcagagagagagagatagtaaacatcgaacgtcttccatttcatcttccttcgattaccttgttagggttttgtattttggcttctggattcttcttcactatggtacgcgctttctccttctcctccttttgtttttttccctctgctttaggtttgcggatcctcttatggcgtctttgcttttctgattcttagagtttcattttaagtcgagtagaaaacgaacaaggctccttaattttgcgatttcagtgattgtcgacatctttgttaatcatatgattggttttgttttctgtagcataagttgagcagaagcaaccgtgacaaacttcagcagttcgtggctatcacaggagctaggtaactggatctatctccgtagagcaagccttatcactagatttgttgttattaggccaaaacagggactagaattggttttgtccatatttatctcaaattgtgtgtttggtttgatttgtttaaataatgtgggcagtgagaagaatgctcttcaggctctcaaagccagtgattggcaccttgaagcagcgtttgatgtgttttacagccagcctcaaccaagaagcaatgctgctgaagtaagacgcttggaggagctctacaatagatataaaggcaagcttcttgttgttactcttttgagttgatcatttgtgtgtaccttgtgctttagtattgacatgttacgtcttgcagacccgtattctgatatgattcttgcggagggtatctcggttctgtgtaatgatcttgaggtattttatatcattgcataatgctttaagaatgatgtggttttatcttccattaataacaactgtcttgaatttttcttcaggtggaaccgcaagacatagtcacggtatgttcaatatcaaacttttcctacaactttgtccatgtgttcttgctttcgtcttgggctaccaaactacatatgctgagttaaactcgttggttttcttgctcatcttctttcagttggttctttcgtggcatatgaatgctgcaacagcgtgtgagttttccaggcaagaatttatcagtggattacaggcattagggtgagtgaaatgatcaagggtctttccagttttcttttatgttgtgacctgatcaagggtcttttgatgtggagtactaagacccaattttctgatggcagtgtagattcaatcgggaagttgcaggaaaagctgccatttatgcgttctgagcttaaagatgaacgtaaggagaaaattgagtcgccattcttttatctggtttacgatttgattgatggattgtcccatgttagctgacatatgtgtaatgtttttcttgtgcatttatctttttcagaaaagttccatgagatatacaactttgcttttgggtgggcgaaagagaaggtgacaaaacttgatttgaagtagttgcttttagaagatagctgttttttcttggtcggtgacaaatagtgtaactgtaaaatgtttcaggggcagaaatctcttgccttagacacagcgattgggatgtggcagttgctctttgcagaaagagagtggcctttggtaactcactggtgtgatttcttgcaggtaaactctcgagtataataatatcatcaaggcatgttctatcatatttgttacttctgatacaattttgtttcccaaaatcaggatcgtcataacaaggccatatctaaggacacatgggcacagctactggaattttcaagggtaaaagaaaaactagatacagttgtgctattgagcttacattgattgcaactatgggcttagcgttgatatatggattgagacaatattttgtgatgcagatggtcgacccagtgctgtcgaattacgatgcagaaggagcatggccttacctgattgatgaattcgttgagtatttgtatgacaaaaatgtcgttgagaagtgaccagccaactgggagaagtaatcaactctatttgacaatgttcctttcttctcattattttaaatagacttgcttatctcacagatttttctattgtgtttgtcagaatctttaaattgatgattaaataagtaagcttttcaaccttaagactaatctagtttttagtataatgataccaacaattgctcttctctctgttaccaataatcaccacaggaacaaactccatccttaaaatggtggaacctatttgtatctctcacaacaatctctctgtccactagcttcgagataagctttgtagcagcatgacagtttacgcatgctctcagattctttgtgatccgcagtggtgtgccttggggtgtacttataagcccatacgcaatcgcgatcctctcgctgtggctgcacaaagtctcttcagcttcttcatcgttgagatcgtgcaatgaagcatccttgttagccacaaatccaccttccttcaatctactctctatccactctacttgtctctctatctcttcatatctcggatgtgacttatcacccactcggaaagcctccaaccttccccttacttcaacccagctacatccaacgtctttgttcaatcctttctccttcattctcactcgcacctctgcaacacggtcccacaaacgtgctgcagcatacagattagagagctgtacatagtggcctgtgttggatgggtctattgagaaaagctgttgagctgcatattctcccagttcaacgtggcgatgcttcttgcaagcgcttaggagtgctccccaaaccgttacaccgggctggaccggcatgcatttgatcacttcataagcttgatccagatgaccagcacgcccgagaagatcaatgacacatgcataatgttgctgttgtggatttattttgtgatccgccatccggttgaaaaaccaccagccttctcttaccatgcctgaatggttacaggccatgagaagccccagaaaagtgacgtcattgggatgtactccaccacgctccattgcacggtacagactgattgcttctcttgcccgcccgtgcaatccatacccaacaatcatagcactccacaccacaacatccctgtcaagtgttcggtcaaaaaccaaccttgcgccttctacacttccacatttagcaaacatatcgattaatgcgctgcttatgaaaacgtcatccctgtagtcacttctgcctacatattcatacatactgcgagcctgctcaagagaacctacttgagcgcaagccgaaatggcagatgttatagagatggtgtcgggtctaacatctttattgatcatctcatgaaacatatcaatagcttccctggcataaccgttcttcgcatagccagagatcatggcgttccacaaaatcaggttaggtgacttcatcttatcaaacagaatcttggcagttgcaacttggccacattttgcatacatggtgttgagagagatgagtaagtcaggctctatttcaagacccatcttcacaacagaagcatgaatagatctcccttgcttcaaatcctgcaagcaagtgaaagcattgagaacgctgacaagagctacccagtcaggcttcacatccatcttcctcatctgactaaaaatctcaagagcctccataggctcaccgttctgagcataagctgaaacgatagcagtccatgagactatcgtcctctctggcaatggcagtccttcaaacacagttctcgcagatcccaaacgcctacatttcgcatacaaggcaatgagaccgttctgaacaaacacatccgcatcaaatccaagcctgaacacctgagcatgaacgaatctacccatctgaagatgagacaaaccgctgcaagctttaagaagatgagggaaagtgaaagaatcaggagaaacacgagcgagttgcatattggaatacatgagaagagcatcttggaagtgattgttccttgaataacccctgattatagcattccaagggaatatttgaggacgaggtaaatcgtcgaacacttggcgtgcaaaagtaatgtcaccaaaggaagagctagcgtgaatgagcttggtgatcaagaaaccactgaactgcaaacctaaaacaagtaaacgtgcgtggatttgcttcagctgagctttatgagtggcactatcaataagcgaagcgtagaaagaatcagaatggattccagaattggctgcaccaaaaaaaaaaaaaacatttcactttggtggttttgggattgaattggacataagtaacaagagagttcttcttactgtagagcaaaggagaagcaagacaagatgcttccgacatggttattactctgtcttccttactattagttttgttatctccatcattttaaatagtagcacactattcacatatcaatgtttgaattacatgttttctcggaatatgtttgatttatttgaaaagcttgtaaatattttttgtgacttgggcccattctcctaattctctaccaacacaagccttttaaggcccggggagcgatttgatttttttttttagggcaaacaatgtattaataattctttagtcctattgaatgaaaaaataaattaagattgaaagattattatatttataactaataataacaaataagcagtatatttaggattagaaaaataatcatattaaggaaatgaatcataagaagtttgttaaaacagttaccaaataagaaaacacaattaatcaggctcataatcatatctcggtgagaatctatataacttatcctttaattcttagggtttaagcttttcctaatcctaaatgacattagcttaacaactcgcttaaagatccacaataaaatacttaggagaggcagaaacagagctcacgagaaaagcaaaatcatgagtaatgatagttctaatattactaatctcttcgaaggtagggataaaggtattggtgcaagcagcagcgactctgatgatgatcgagcaggtaaacctagagtattacttgcagacgaatttaggtcaaaatctgctaatcaatatatgagacgtgaggagaaagttttcgcaggttcttctactgagcaggaagaagatgaatcccaaaaccttgtaccggagtctaaaccgggatcggaaggtgaaaaagtgggtgacatcgttcgttttggtaaagacagttacttcgttattgatatcttcgagaaagagatcatggagttaggagacaaagtggatttaaactacaagagattcaaaaagttcgaagctgttgatggaggcgctccgcgagatcatcacttctacaactaccgttgctgttactcctcttatttatgcgtctgcgcgagtagtactgtggatagattgtgggggattctagagaggggtctagcctccagagagaaggaaggcgtcagcttcttcgtgagaacttacaaagagagaaaagagctgatgagagttgctgtcactgtaacagattgttatcagaatcataatttgtacttcttcgacctcaagttccccaaggagtatccatatcaagcaccgagtttctattaccatccgtatgaccttcgtttgagtactcctgaagaccaaaagtcactgagagataagcactgctacaacatcgtagatgtgtttctccacattcaagagattgtgttgatgaacactaacaagtcatgtaaccagatgctagatatcctggaacggccactcgcggggtttcaagatttcgtaatagggtattttaggaagaaggggcctttgattctgcggaacatgctgcaagagtttgatatggaggaagagagggacaagaaaatgttctggaagatgtactttgcgtttgaaggcaataaagtttattgtgagcagattctcaacagtgatctgaaagcagagctggagaaattgaaggagaaagagtatacattaagcgattactactatggctcatcatcttccaactacccaacctacactcaaagggatgatggtatcaagaagacttccaaaagcttttggaacaagtacttgtctgtgtcttttgattgattactagtgtctggtccatgtcttttcttatctcttgatattttttttcagaattttaatatgtgagttttcttttccggggaatgagactctgatacatagtaaagttttgcataggtagatttaaagcgaaagaaactcttttaagtatacagcgtttgccttatagatggtaagagtttctaaacagtgactgggattgcttcatcaagggcgatcacaccgggaagtacttttccttccaacagctccaagctggctccaccaccagtggagatgtgactcatgactcctgctactcctactttctccactgcagccactgagtctcctcctcctattatcgttgtcactcctttttcacttagctctgctagtttattcgctatcgcctgcaacaaccataatcccaaacttaatctaattttcatctaccatttgtttactctatgaggaatcattttcttacctctgttccagccgcaaacttttccatctcgaaaactcccataggtccattccaaatgactgtttgtgttgtgtccagagcttcgttgaaagttttgatagagtctggaccaatgtccagtcccatccatccgtcctcaatgcctgatgcaggcacaatctacaaacatccacatgacatactttactcagaacacaaagctctagcaagatcaatattaatcaattctattctctcatctatctcctttaggatgatcatcaacacagaacatcatgcttaaacaggaacataactaacaacacctacttctcatttttcttttataaggcacacatatagaattaaaactgccaagcattacgcaattgcaaaatgagagagacagaccttgctgttggcatcaggagcaaacttgtcagcaactacaacatctgttggcaacaaaagagagactcctttggccttagctttggcaaggagttctgtagccaattcaagcttgtcttcttcaacaagggacgaaccaactgaaagaccctgtgccttgtagaatgtgaagatcattccaccaccaagaagaagaatatcacacttctccagaagcgattcaataactccaatcttggatgagactttggaaccacccactatggctgcaaatggtctctttgggtttgaaacagcaccaactaggtagtccagttcctatagaggtagagagaagtaaacaaaaagttcatggtaccatttgtagcaacgatgcttcaatgctgaatagaataatctctatcaaaatattaccttttgcaaaaggaaaccagcaactgaaggcttcaagaacttagtgactccttcggtagaagcatgagctctgtgagcagttccgaaagcatcattgacataaaggtcagctagagaagcaagcttcttagcaaactcaggatcgttcttctcttcctccttgtaaaacctgacgttctcaagaagcaaaactccaccttcaggtagagaagccaccaagctttccacttctgggccaatacaatcatcagctttcgtgacctgcaaaattcaccatcaataagctgtctcaagtgattgattctcataggtagatgattgattactgagacaaatcacggactttacctcaataccaagaagctcggagagcctagggacaagaggagccaaactaaactttggggtgactccctttggccttccctgaaagatcaaagtgttcaactttagttcaggtgatggaggaatcaaacgtaaggagtgtgtgggaataatattaccagatgagtggagaggataactttagcaccattttcaatcaaatacttgatcgttggaatggcggcacggattctggtatcgtcagtgatagtctgattatcatcgagaggtacattgagatcagctctcacgaaaaccttcttccccttcaaatcagctgaggtcagatctccgacgctcttcttcgccatagaaaccactcctctgcttcccttcccacgcaccgattcaactttggaagcaacgtggagagagaaacgacgggaatctagagtggcggagaagcctagaggacgcgcggaaacagaggtagagggaattggcagaagggaggcacgtgcgcgagttccggcggaggaagcaacagcgccggtggacttaaggagtgaaaaggcggaacttgcggcagcggaagccatgtggatcaatcaaagaagataaaaagatgaggagatgagaaacagagagagtgactcacaatgttcttatttattagccatttgagattttatgagtttggaatatttctctcttatcactgatgagaggttcaaaagcgattatctttttgatcatatattcgttactgttttgcctcttttgcaaagaaagctactttattgtgcataagatagtttgatctacataatcttaataccattttctcagtctccaatgtaattcaataaaccaaaacattttttcaatgtgcacttatttgatatctgaaattcaaatgatctacagcttgctggttgggagaccaacaggcttggccctagacctcttctccaccgcacgagagagttgcttcaccgcttctttaggcaagtggcgaggtttgctaagccacagtcctccatctaccaccattgttagtccgctcacatatttccctgttaaacaaatcaagcaatgagttacatcatctaaccatgtatatatgttttatattaaagagtgtgctttatttaactcagcataccagaatcacagctgaggtagagtgcagccatagcgatatcccacttctctccaactttataaagaggcatgtactctctggttttgttttcaatctcctcaggtacaagtttactcattccaggtgtacctccaataggacctggagcaatcccgttcactctaatatcatagtcagttccccactccaatgccaagtttcttgtggtagcatcaactgcagcctgtttcaagtttcaaactcctaagatcacatttttgctacatcttttgttcctattacttagttcttgattctctaaccaaaactcaagacattgaatgactctatcagactaatcaaattaccttggctgcagagacatgtatttggtaccaagaagccgtgtagtgcaaagtcgcgctaatgttaataatcgaacctccaccgcttgatgagtctcttccaggcgctcctttcttaagatacttgagagctgcgtgacacatgttgaatgttcctaccgcatcaatgtctaagactgcacatgcacaacaaaaaaacgtttccttgagctaaattgacaaactttcaggcataattcttctcagatcatgatcaaattaatgagaaaacgaaaaaggaacctgttctgaagccattaggagacaaatcctcagcagcagccagaaaattgccagcagcggcgttaacaagaatatcaagtttaccaaaatgctgaaaagttgcttccacaactcttctcgcatcttcttgcttacgaacatcaccttccaatccaatagccttcaaacgaaacagaaatcagacagattcaaacacatatccaacaaacaaagtcctcaaaacaaaaatcgctgattacctggattccaagagatcgaagagcagagacggcgtcatcgaggacttgttttcgtcgtcccatgatagcgatagaagctccatgtttgccaaactgagaagagatctcaaaaccgataccggatccaccaccggtgatgagagccacttgacctctgacgacatcaggtttgaacggagagtccataaccacacactcacacacaagcaaactcgccaaaagctttaagacaaaataaaataaaataaaaggagccagtcgcgtgtctgtctcttcttcttattacttggacctcttcacctactaaccaaactttactttaaatatctccctatttttagtgccaaattacaaattcattatctttctactaattacaatatttgttaccatatgacttcgattgatagtcagcgttttcgttatttaccaaatattaataaccacaaaaactttttttttttttttttaattaattacgaaagcttctttttttgggtgaatattaatacgtaagttttatctaaatccgaatttggtatataatcctagatattttaaaggaatttaataaaaataatttatttttttacaaataaaaaaaaaagggtatcgagttggaattttctacatctgtttgcgccgcgagctcgggtttctttctctctgaagcagaggctcttctagattaaaaaaaaaaaaaatctcaaaaccaaagcttcttcctttttttaccaattcgtatctcccatttttagttttcttcgatctcaaatcacaccatcttagtaagaatgaagtgaagagatttgagaagaaaaaaaacactaatcttgttcccgttcgattcttgaggaaaacaaatttcagctagatttaagatttggaatcgaatattactgtaatgttttgggtgacgggaacctagtgatgaaatcgttgcttgggtttttttgcgctgaagtggaaaccctaatttcttgggctttgtgcagtcacacagtttgcactctgcagtcactaaccatcttcttcttggaagattttgcttaaaggcgttagtaatggcgtctaaaggtggtaaatctaaacctgatatagtaatggcgtccaagagtgggaaatctaaacctgataatgaatccagagctaagcgtcagaaggttagctccaagttttcatttttacgtctgagttcatcttcttacggtagattctagtttgagctgatcactatttgaaagtgttaacggtttctgtttttttttttcttttaagacgctcgaagctcctaaagaaccacgtcgtcctaaaactcactgggaccatgtattggaggagatggcttggctgtcaaaggtaattgaagggtggctatttggatcattctgcaagaattgttatgcatgcatgacgtttctatgctaattgttgatgtttttgtaggactttgagtctgagaggaaatggaagctggcgcaggcgaagaaggttgctttgagagccagcaaaggaatgctagatcaggcatctagggaagaaaggaagctaaaggttctctcttcttcctttcttttctctttcagagtacttacacattccagcattagtttttaagtgaccttattgtcgatcacaggaagaagaacagcgacttcggaaagtagccctcaatatctcgaaagacatgaaaaagttttggatgaaagttgagaagctggtagtttttttacttttcttcccgggccttgaaatttaaggtttggcataacttctttgtattgacacttgttcttatgtatggtctggcaactttgtaggtgctttacaagcatcagttggtacgcaatgagaagaagaagaaggctatggacaagcaacttgaatttctgttaggccaaactgagaggttactattgaatggttctttcatagttttgttattctagaacagattttaaagaatttgacctgtttgtttatgtcaggtactcaaccatgttggcagaaaatttagtggagccttataaacagggccaaaatactccttcaaaacctctactaactatcgaatcaaaaagtgatgaggagagggcagaacagatacctccagagataaattcttgtgagcaccttattacctaacacagcattagtgtttactgtaagcaagtgagctgaatcctaacaattctcttgatgcggtagctgcaggtcttgaatcaggaagtcctgaactcgatgaggattatgatctaaaatctgaggatgagaccgtgagtttcactttatcatcttttaatttttattttaccacttatcggcagttactgtgtatcactccttgaatctagctgcacatcaaaggtagatggagaatagcttgatttttttgttaaggaaatcgttttctttgtcatgacaccaccctgcaccccaatatacaggctatactctagttttgaatagtttttgtggagattgaattggttattgtttatttattagttatttacctctgatcttttggggagttatattttccatatctcattttaaacccacgattacacttaggaagatgatgaagatactattgaggaggatgaaaaacacttcaccaaacgtgaaagacaggaagagttggaagctttgcaaaatgaagtggatctaccagttgaggagctgctcagacgttatacctctggaagaggttggcataaatctacactcgctattgattgacctttttgctcacgttatcaatttttactttgaattatacaagctgtattcttaagaaatatcaactatttgaattgcatcctcttttgtgtaagagttttattttgatccctcagttagccgagaaaccagcccagtaaaagatgaaaatgaggacaatctgacctcagttagccgagtaaccagcccagtaaaagatgaaaatcaggacaatctggcctcagtaggtcaagatcatggagagggtgagtggtgtcaagttcctataatgtattgaaagcaatacaactgctctttgacttcctcgtcccattttacatttgtagcagacaagaacaatcttgcagcttctgaagaaactgaagggaacccaagtgttcgtcgttctgtaagttgtatgtctttttaaaatcccattgtctgatttgtcatcgaaattctggctcaaatgtaaaatatatatccttcatttgcagaatgatagctatggtcatttggcaatatccgagacccattcacatgaccttgagccaggcatgacgactgcatctgtgaagtccagaaaggaagatcatacctatgattttaacgatgaacaggtaactggatctgaccttaaccatgttcttctctgcaattagcgtaaagtctctgattctgactgcaattgatggacttactgtgtcacattgtaatatgtgcaggaagatgttgactttgttcttgccaatggtgaggaaaaggtcagtcatttcatcaaatgccagagatcgttatttaggacttttctcttttaacttgattctcttagccttggctcttttcgaagaaaatttttgaacacgcatttgtactaaaatttttatatctgctcttttggtgtaggatgatgaggcgacattggctgtcgaagaggaactggcgaaagcagataatgaagatcatgtcgaagaggtgacaaacctattaattattcggttttcttgagatatgataaaagttgttaccttcagagtttacaaacagaaatttccccttctaccgcagattgccctgctgcaaaaagagagtgaaatgcctattgaagtactacttgcaaggtataaggaggtatgccttttaagtctcctgtgtgcctgtgttctatagtatttttttccttttctgaaactcttaagtttcctgtaataggatttcggtggcaaggatatatctgaggatgaatctgaatcttcatttgctgtatctgaagactctatagtagactctgacgaaaataggcagcaagctgatttagatgatgacaacgttgatttaacagaatgtaagctagatccagagccttgctcagaaaatgttgaaggcacattccatgaagtagcagaagataatgataaagatagtagtgataaaattgctgatgcagcagcagcagcaagatctgcccagccaactggatttacatactccacaacaaaagttcgaacgaaactgccgtttctacttaagcattctctgcgtgagtaccaacacattggtttggactggcttgtcacgatgtatgagaaaaagttgaacggtattctggctgatgaaatgggtcttggaaagacaattatgaccattgctcttctagctcaccttgcatgtgataagggaatatggggtccccatctgattgtggttcctacaagtgtgatgcttaattgggagactgagtttcttaaatggtgtcctgcatttaaaattctcacctactttggtagtgcaaaggagcggaaactcaagagacaaggatggatgaagcttaactcatttcatgtatgcataacaacctataggctagttattcaggacagtaaaatgttcaagcgcaagaagtggaaatacttgattcttgacgaagcccatttaattaagaattggaagtctcagagatggcagacactattgaacttcaattctaaacgcagaattttgttgactggtacacccctgcagaatgatcttatggaactgtggtcacttatgcactttctgatgccacatgtctttcagtctcaccaggaattcaaagactggttctgtaacccaatagcagggatggtcgagggacaagaaaaaatcaacaaagaagttattgatcgcttacataatgtcctccgtcctttccttctacggcgcctaaaaagggatgtggagaagcaacttccttcgaaacatgagcatgttattttctgtagactgtctaagaggcagcgcaacttgtatgaggacttcatagcaagcacagaaacacaggctacgcttaccagtggaagcttttttgggatgataagtatcataatgcagttgcggaaagtttgtaatcatcctgatctctttgagggtcgtcctattgtaagttcttttgatatggctggcattgatgtgcagttgagttcaacaatctgttcgctactattggaaagtccgttttccaaggttgatcttgaggctttgggattcttattcacccatcttgatttttctatgacttcttgggaaggagatgagatcaaagctatttcaacaccctcagaattaatcaaacagcgtgtgaacttgaaggatgatctagaagcaatccctttgagtccaaaaaaccgcaaaaatctgcaagggacaaatatttttgaagaaattcgtaaggctgtctttgaggaaaggatacaagaatctaaggatcgggcagcagccattgcatggtggaattctttgagatgccagagaaagccgacttactctacatcactaagaactcttttaaccattaagggtcctcttgatgatcttaaagctaactgttcatcttacatgtattcatcaatcctcgctgacatagtcctttcaccaatcgagcgttttcagaagatgattgagctagttgaagctttcacatttgcgattccagctgcacgagtgccttcacctacttgctggtgcagtaaaagtgactctcctgtttttcttagtccatcgtacaaggaaaaagttacagatttattgtcacctcttttatctccaattagacctgcaatcgttaggagacaagtatattttccagataggcgactgatacagtttgattgtggtaagctgcaggagcttgctatgttattgaggaaattaaaatttgggggtcacagagcgttgatattcacgcaaatgaccaagatgcttgacgtcttggaggctttcattaatttatatggttatacctacatgcgtcttgatggctctacacctccagaagagaggcagacgttaatgcagcggtttaatacaaatcccaagatctttcttttcattttgtcaacccgaagtgggggcgttggcatcaaccttgtgggtgcggacacagttatattctatgacagtgactggaatcctgctatggatcaacaagctcaagatcgctgccacaggataggtcagacacgtgaagtgcatatataccggttgataagtgagagcaccattgaggagaatatcttaaagaaagcaaaccagaagcgtgtgcttgataacctagtaattcaaaacggtgagtataacaccgaatttttcaagaagctcgatcccatggaattgttctctgggcataaggctctgactacaaaggatgaaaaggaaacaagcaagcattgtggggcggatatacctctatcaaatgcagatgttgaggctgctctaaaacaggccgaagatgaggcagattatatggctctcaaaagagtagaacaagaagaagctgtggacaatcaagagttcacagaagaacctgtagagagaccagaagacgatgagctagtaaatgaagatgacataaaggctgatgagcctgctgatcaaggtttagttgcagcagggccggccaaagaagaaatgtcattgttacatagtgatatcagggatgagagagctgttatcactacttcaagccaagaagatgacactgatgtattagatgatgtcaagcaaatggctgcagcagcggctgatgctggacaagctatctcatcttttgagaatcagctacgtcctattgatagatatgcgattagatttttagagctttgggaccccatcattgttgaggctgcaatggaaaatgaagcaggatttgaagagaaagaatgggaacttgaccacattgagaagtacaaggaggaaatggaagctgagattgatgatggggaagagcctcttgtttacgagagtaagtgtaaccttttttgctcattcaattcaatagtttaactgacaataaaccttgacgataatgtagttttgtataatgttaatttatgggctggtttgtagctcacatgagattttaatactattttcagaatgggatgctgattttgcaactgaggcatacaggcagcaagtggaagtcttagctcagcaccaggtgagattaattagtgcatctaccatgtcctgcatttcagcttggtcacgtatttacttatgtttgtagttaatggaagatttggaaaatgaagctagagagagggaagcggcagaggtggctgaaatggttttgacacagtaagacgctttcaaacccacacagttcattgtcgatatgataatctaggacgctgctgttcagtcggagagacaagcagtgatttctacttattttaaaccattaaaacaagtagataatttgaaccattcttttcctcaggaacgaaagtgctcatgtactgaagcctaagaagaagaaaaaggcgaagaaagccaaatataaatccctgaagaaaggatcactggctgccgaatcaaaacatgtgaagtcagttgtgaaaattgaagattctactgatgatgataatgaagaattcggctatgtgagtagcagtgactcggatatggttacaccgctttcgcggatgcatatgaagggcaagaaaagagatttaattgttgacactgatgaagagaagacctcaaagaagaaagcaaagaagcacaagaagtctctcccgaattcagatatcaaatataagcaaacaagtgcactacttgatgaactggaaccatcaaagccgtctgacagtatggttgttgataatgagttgaaattgacgaacaggggtaaaactgtagggaaaaaattcatcacttccatgccaataaagcgtgttcttatgatcaagccagagaaattgaagaaaggaaatctgtggtctagagattgtgttccctcgcctgattcttggttgccgcaggaagatgctatattgtgtgccatggttcatgaatatgggcctaactggaattttgttagcggaactctttatggaatgacagctggtggggcttacagaggacggtatcggcatcctgcatattgttgtgagagatatagagagcttattcaacgacatattttgtctgcttccgacagtgcagtgaacgagaagaacctcaacacaggttctgggaaggctctccttaaagtcactgaggtaaggttgactatggcatagcgttaggttagctactcactagcgtccatttaagaagtgattagtgatatattagaatttgtcttgtaaatgtgtcgtgttaatcaactcaagaagattatagtggaaaggagatggttttcactaatatcacatatttggtgcaggaaaatattcggacactcctaaatgttgcagctgagcagccagatacggagatgctcctacaaaaacatttttcttgcttgctgtcatcaatttggaggacgtctacccgcactgggaatgatcaaatgctctccttaaacagtcctattttcaacagacagtttatgggttccgtgaatcacacccaagatttagctagaaagccttggcaggggatgaaggtcaccagcttaagtagaaagttgttagaatccgctctccaggattctggcccgagtcagccagacaatactatttcccgttctaggttgcaggagactcaacctatcaataaattgggattagagttaaccttggaattcccacgtggcaatgatgattccctgaatcagtttccaccgatgattagtctgtccattgatgggtcagattcattaaattatgtgaacgagcccccaggggaagatgttctaaaaggttctagggttgctgcagagaaccgttacaggtttggaactctgatatatttgacttttctttccatagtttttgagagcagtaatagtcactaatggattgatggtcttgtttgtaggaatgctgcaaatgcttgtattgaagattcatttggatgggcttcaaacacgttcccagccaatgatctgaagtcaagaacaggcacgaaagcacagtccctggggaaacacaagctatccgcctcagactcagccaagtctacaaaaagcaaacaccgcaaactcttagcagagcaattggaaggggcatgggttaggccaaatgatccgaatctcaagtttgatttcacacctggtgatagggaggaggaggaggagcaggaggtggatgagaaagcgaattcagcagagatagagatgataagctgttcacaatggtatgatccattctttacctcaggccttgatgattgctcattagcttcggatatctcagaaatagagtagtaaaaaagccttttgtaaaagtaaaaacctgcttgcagaagaaaatgctgatgattgtggatgatcattttcttaacctcccacttttgatgggcaaaatcttttgtaatgcagaaagtgacagcttcgtaggtttttgtgtttccaaagttcatcaaaatatctaatgtgaaatatggttttgtccccaaccgtttacattctagcttctgactcgtttacattttagtttccaatactagcttttacaaaaacagtgtgttctcaatttatctaaaacaaaggaaaaaagacaatgcaacaataagacatgatgggtcaactccttgtgtgttctagcaagtttggttatccaagaaaatgagccactcattgtaatcatcgaaccctggttcaatcagtcggctccaaaattcgtgatctgatgacttcccatgggtttgtagtgagtctggtttagatataggaggaggaacctggctatcgtcaaagagacattctagtgattgtggtgcatccacctcaaatccacatgccatttgctccaccaagatttccccaaactcctcttcctggttaggcctctcactcttaataataacgtcctgcaagactgacgagattgaggaagaggaagaagaggtagaagacactgaatgattggtaacatcggatgatgatgatgaaatgctcctcttcaccaaccgcttcttgagatgagtgttccatacattcttgatctcgttgtctgtccttcccgggaagttggatgcgatcttagaccacctgagatcaaataatgcactgatcattaaatgtttctagatgataagatgatgatttgagagattagggagagatgataacttgtttccataagcttggtgaaggtggataatggtatcttcctcctccttggtgaagttgcctcgtttgagacctggtctcagatagtttatccatcttagacgacaactctttccgcatctcatcaatcctattttgtttcaagttcaacatcattaatcttgaacaccaaaactacaagtttaacatataagactagtaaaaaggacaaaaacaaagacaacagaaaaagaaaaagaccgagtaatttttaattgagcaatttcagcatctaattcaagatttcattcaatcttccggaagattttgtatgagaaacttttagaaggaaaaaaataggtcataaacacgaaagttacaggttgtggtcaaacttctcctcagatattattccttaaaagaaaaagataccactttgtgaaaatcaaaatcccaacagtttaacctatagaagcagtgtttcacggataagaatcgatcagtaaagtattcagaattagaatgatagatggacaatagagagatagacaaaatgaaacttgaaacagattatgcaagaaaaaaaacatgaaaatgagaaaaagagagaagcatgcagtgtgattagaggactgaccagcgagtttgggaagagatcgccaattttgatgaccatttttgaggataaaagatctgagtctttcactttcttcatcactccatggccctctcttcacttggcttttgtcacagcatggtgctcttctattccccatcacaccccacttttaattttagagaatcttatggggacatgtaacttttgtcatcatcatcgtgttatatatataagggttaattatgagaccacgagggtcatgccactaattcatgtacaagtaaacctactttaatttattaatttatagaattgagtatctaattcgcatatatacattttcctcaaataatcgtgacttttttttcatttgacagccttaattcttatttttttgtaaaatatatttcctgtttccagcactcgtttttcttaatctaaatcaattttcttttcatattcaactattttctaaaaggttgaaatattaactaatttcaatattttcttctctgatttaaattgtttacgtgaaaagttggattttcaagttaaattttcagactaaaagtcttggctataaaccgaatttgtttcatctttgagagaaaaaataagggaaaacattattattttcataaaagtaaatgtagaatgttgactattacttataaccattgactataataagacctgcaacttgactatatgttatttatacaaagacgaaaaaaatattttttactaagtacgcattttaaagaacgcgttaaaatttgtaagattttcttctaaaagtagaacgagtaaataagtatggagtcatggagatgttatatatatgtttataatatatggtgtcgtcttgaacttaattagtccactcatggaatgacagcacaatattaacctgtaattctgtaaattaacttagattcaacggcaaaatatcatcaacactcgaatgtaaaacaaaggaaattataaggtaaaaaaaaaaaaaaaaaaaagttaattataacaaattgtggaacaaaataaaaatatacaaaatgtgaagcgagggaggacttataacataagcgtagaataatgcataatacattaccttccaacttcaacttgtaaatttaatttacttataaaacatcaagtgatgtgagctttgtgttgtgtcttttttgcacatagcacacgacgtcgttaaacctccacgtgcctgccccacaggccacagttgaattctttacgttcgttttggaaactggaaattaaagaatcgagttttcaaagagtagttttgggccgcattcggagctttatggcctttgaaactaaaatgggtcttaaattaatcttgttagggaggttctaaacacaggttaataacggaagcccatccatatttagtcccaattttttttctttaacacctattagtatttagtcccaatgttaatctcattctttaaaaatttatgtttaaacaaaatgagatttgtcgttttaacgcaaatacttggtggaaaacaaatacatgatcttttcatctgaaaacgttttaggcatacacttcaaatgttattcgtgtggatttatgtgatagaagagtcgctcactcatatgtggaatagtcgggattcctgcatttttctaccaaaaaacattaacgatgtttaaaatattatttcatttcttctattatgtgccacggagcaaaatagtataataccatatatattgaacaacaatgataagtataatcacaatgtgatcccaaagaaattgaatagagcttaaagaatgaatcaatcatgaggtattccgtgtcctccgaagcaacaatcgaattcatacttgaaatgagctgcctaagtactcatatatacttactactatatttccatgcaattccaatatacgaatgttccttaataaaataaaagtacatattataaagttgtcatttggacctcatttcaagagaatctttacaacaaatgactctttttttatgatagttcttgaccatacacatgtatgtttcctgttgagaggtgtacatgataatgaaaagaataaatgaaaggaggactatttttttttctagtcatgaagaaaaactcgatttcacacttggacagtcgtcataattaatgtacattaactaaagtaaacaaaataaaatacttgtttccatcaaaccaactatatataatcaaagttctttcactcatttttttttctaaggaaacttaagatatgtatttagatccatccatctacatggctctcgatgactttgactacattaattatatataagtatacgtactatagatctaatatctaaatgtgtatacaccgactttgaaaatttatggttgcattcggatcagtcgtcttattaattgacaacaaaacaaaagaaacaggaaaactaatgattaactgtgaattgctacaaatatataagtaggcatgtggtgctgcaggtgatgcaacatgggaaatcatataaatggacgaaaattcccaactctattattaactttcctcagattggtcacacaactaatgattaatttgtgattaaactatgaagactatacatatggaaacatattatcattgagaatccatagatgtgggacagttaaacctccacatgttgctcactcgggtcgcatatataaacatgtggtggtgtttctatataagtaaagctgattaaacataaaacgaaggttacctaaaaatatgtctaaaccattatgtgtaatgtgtgaattagataagtgccaacggtgcaaataaagtgagatcccatatataatgataaaagtgttagtatttgcccttttaaaaccaactcatttgtctactagctgaagattcaccatgttaaccgaattcatagctcattcaattatggttagatagacactggaacgccagaaacaaatgttagtttcaatatttgtggtctatataatactgtattgggcttggaatcaagcttgtgttttggatctgaaagaatgtaactacagatgcaaacccacatggtttcactagttttttttttatgaatttcaattatttttttctatattttattatgaatctttggcattacttaccaaaagatatactctcttctagagaagctaaaggtaacagataactacttgagtatcgggttaaaaatattatagtaacggccacagattacagtttatcatatccccttgatgtatcgcattgacggatttaccctgccgataatctcggtgaaacatcaaaatcctctttttgtttaacttgaacaaaaaaaactgtaatcatgtcaaataaacccagaaattaaagagatccaaactgatgcaaattttccatataaaaaaacttcacaagaatttcaaaccgatttttaaaaccggcgaaaaaattagaaaatttgcaaacaacaaagagaaagaaaatccctaaatgcgtctcctcttccacttttggatcctggaaaaattatatacctatttacatcgacacgacgacgaagtatgatgactcagtagtatctgaacaaaaacaaccagatctagaagaaaaaaaaacttctctaactaccaagattccttccaataaaagcttcttcttcaaatagtcccgtcaccgattagatcctgaacatcaatcggtaccggaagtccaagacgaagcgattccatgattcgttcgaagacaaggacatggcaagggatttgtagaactcctttttgctcgtaaccatactcttgagcagatcggtttagtaaaccgatgaaaaccggatggttaagtagctccgcgctaacgacgaacctctccatctcgtcacctacgtagaccggtacgtgtccttcgggaacagaggaggtttgcttctttgagcggcgagtcaccgaagaacggaggaaggattcggaacggcggctaggtcgctgtgaatcggaacggaggagactgtattgagcggaatcagcgacgcgagagagacgacggattagttgcttcatcgtcttcgtgttgtgactttgagagagagaagagagaaacttttggtgattggtactgaaaacggatgtttgagaattcgagagagaatcaatgagaattttgtgaaggagagagtgagggaaggttttggattttatattgagtcgagggtattttggggaatgtgtatttgataaagtaggtacggggaaggagtacttgccaggtacacacacttactcgtaattttccactgactttgaaaaatatataaaatcctaaaaatatataatatgataaaatatcatattcatttgatgtaaatctttgattatttttttaagatttttttattctcttagataactgtttggatttccattaacaatatatatccccgcattatcataatcttttttgagtataatgatattattgtattttctgatcataattggaattaaaatagcaattaatttaccttggttattctaccaatttattgaaagattagatatagtttttttcttgttagtaatagatacacgaggttcatgagcaacccaaaatatatcttaatgatgttgtaaaattaattacaagtagttatcaggaaaataataacattattcatggtaaactgattataatttacaagaggccaatataatgttcaaaatacaattttcattcaagcaaattaaaaaaaagggttatatatctttgtttagattaatccatatactttgtaatcctatatcatgtacatgtagttaatatcatttcatctaatcatctattatcctacttcaactaagactggatatccaattccactttggaaaatttttacatatccaatttttacatttctttctttaatcctactcaaaatataaggtgtagagaaagatagatcccctcgtttttttttatcaaaagatcccctcgttaataattatattttcaatatattaaataataagctagaaattaaatatggatgaagtgtggaaaagttagttaattttgtatatggaaatagttaattgcatacaaatttatattgtaagatagcgtatatagccatttaaatatatggtttcatactcgtaacaatgttcatggtttttattgaatatgtgatctatcatatggcctaagtcttaaatccccataggaataaatgatgccttcagaatctggttacaaagtctactatataggctggattttaaatttcataaatcaaatacaattatacaaactaaatattctggatggaaatattacaaaacaaaatgtggagcttcaacttctgttgaccccaagaaaatgacataaaaggcttctagaatttggaccaagtgattagatatgaaccatttgtgtaaatattatgaattctttttgaaccagtacgtatagattattcaaatagtccatactcaccctcaacgacttaaaagacttcaatattcatttagctttcttctggtcatattcatatcctcacgtaaccatcattgaaaactaaaataagatgtaagttacttgtaagtttccattatgtaatatatttttcaaagattaatcactgtactgtctattattttagatcataactaattaaaaaaatagccaaaaaaaacttattaaattttaacaaattttcgttttcattgtgtaaacataaaaatctatcaccatcatgacaatataaacacaagccattcaaggatataagtgatataattaattcatatactacaaaatatatagctgcatgctcgattgaatcaaacttcataagtgacgattcgctatacctattaatgttgataatagattacttgtctttgccacaaaacaaaaagattacttgtaagttgtgacctctagaagaagcatccgactatgcaaaatgcactcaagccatgaatcatgacaaattaatcataggtttatgatcaggtgactttataaattgatattgcccaaatctattaatacacattcagttttgtgacttgattatatacatcttttcccattttataatttctttgaaaaaaatggcgcgtgaaattgtaatatacagcgcgtagatatcatgaaggaccatcagcatgtgtgggttagatagagaaagaaaaagtaaagcagaactgttgaaggatcattcttcattctgtaaaggttaaactttaaagacaaagatatgatgatgtgacctaattttctctggttttcgaaagtgtctgccccctaacttatcttgggggttacaactttagtcccctttagcctcttaactttattaattatgtatacatacatatatatataactatattcatatatggattaatcaaaataaagtggtctcgtactaatagccatctatgttattatatactgccatgcatcttttgtaggtttcatccaatttagtaattttgaattcctacttggtctcaagttttaccataactagaatatcaactcgatgatatttattagatactagctaatccataaactagtgtgatttgttacataattgatttaaaaggaaacaatacaagcaacttaaagaagcaactagttaaggtggggatggagtgtttacaaaattgtaacgaactctcaagtggttaattcccttacgactcattttctcaaatttccgtggaactcctctcttatatgattcaaaacacatttatgattttattgatttcttgtggaattggaagtgttcaaccctcacgtagtcggcaattttcaatatcctcactcattatacaaatttggataaaaggaaccgtgtcactcaaatgatcataaacatatacacattccaatcggaaacgacttatgaagtatttagtaactatatattacccttatccatagtataaaatccacacctttatttatttgaaggcttgctagaatcaatatctaaaacacctaatttctgcgtgttgcaatacatataaaaatcatgcaaagaatcggttacaattctaatggtcgttagtcattgatatttgattataataatgaagtaatagaattcaaggaatatcaaataatgaaacataaacagcaatatatataaaaaaacatatgcaaatattaaactattatgcaaaaaaacacagatagagaagagaatattcctccaacggcaaaggttattaagagccattacacttcaatcattgagaaacacgtcaatagcttgaaacttcactctgattgggtttagctgtaacgcgttacgcgctattgcatcatttaataaatatgaagataaagtatgtcaccgcttccatatacattaacatttgctcttttcaaatgcaactacttagtgctctctctgttttagttttatataagttgtaatttaaagttttacacatatattaaaaaattacaaaaatctcatttaatttatcgcttttatataaaaatatcatttactataactgattcaattaataaaaaattatataattaaatgttattaattaaaaaagtattaaatatatttattatttgggatcaattatgggattaacactttaaagtgtatccttttgtgattttaggaacatttcaatgtactaccaaaaacaggtaattatacgtgatcgtattttacaatctcacccctttcagcttacactcaattatttgatttctcttttatttatttttctcctcaatagttgaagatgcttcaacaacttggccattatttgctaccgcagaagattttctcgccgtcgcaaccaccacctccgtggaacgccttctgctccgccgctgccattgacggagccaaccatctccctttcatgtttcatcttttaaaatctccttaccctgttatctctccctctgattgttgaattccacattttctcacttccccatcttacctccggtcctctcttctcctttcagatttgctctctgttccctaattgtttgggttccctaattacaatccttatggtatatatttttgttaatgcttacctcaatatatgagtgacctcgatctcacttttcccttgggttccctgttttcagatcttagggtttagattttacattttcatcctcacctaaaatcatcttctcgttaatgtttatttgcttttgatgttctctgttacgctgaaacacagcttcttctctcgagggcaaaatcgtctttcaagcttgtaggaagtgtccaatatcataagcccatttcgattgtaccttatctccaatttgtagcccaaattgtgcctaaaacagtaatagccccttattatttgcttaaaaaattaaaaacaatactaaaagtaactgcggctagttttagaatttgctaatcgtatagtcataattcatggaacattggattaaaaataaaaagtaagataataaaaagtggaatgtgtgtaatgtgtagtcacgtgaaagaagttttggggaaattaataaatataaaataaatggattgaattaaaaaagtccgtacggtgcagtcgtacagggtaacctacccactcccacctcttttttttctttctgggtgttctcttacgtgtcgtaccgtacaaaccaacttgacttttcttgacaaattttatttaacatttagacacatgtgggtccaattctccactattcagaattgcccgttacatgccgtttggcttctgtctcgttaattacttttttctatctttatatctgacgccacatatttaaaagttatttttgttatattaacgtcaatttcaatagttgggttaaaaattcattagtattattaacccgtcttgtactcatttggaaaataaactaaaatccatcggatactcctctctgtgtcctatgttgacgttgtccttaggataattttacgggcaaaaatgtttgattccaacttaaactatcaaagaaattcaaaatgtttgactccaacttaaagagaccacccgtacgcgaggacagccacacgacctactttgtactttcctgtgttttacttttacttttacatattaatgtgcttaattctctcaatgaaaatacagagaggcataactcataagtatatgtctctgcattatacaggaatagaaaatataaatgcaattgtttttttccaatgtggtccatttttagatggttcgatttcaaagtggagggggctcacagttgcacattggtcttagcttttatggtatacctcactctctagcctcttggctccacctttgtccttttgatttttcttttcaaacttttggtatagaaatgacgactaagctttgttccatgactcatcatcttcctttacatccatttcatgactaagctttgctaatttattatatcccactattacattgtatatgttattgtagattgataatgccatatgattctatcgttttatcctttttagtgacatgttatggtcggtcgtgtgctcgtgttttgattaaagttggattgtcatttgcttcattttttttctaacagagtttgccatttgcttttccatctgtatcacttttttttttatgttgtcaattgcacatttgcattgtcccttaattttagactaatctagtggattgcctactaggctactacattaattgaccataatttatggaagtgaagtatcgcaaaatggctttccccacataaagaggcccatccgccccatgtaagtgaatttatatttttgcgtaatatgaaaagacataggcccatgtaagtgaatttatttcttgggtagtatgaataagcaaaagataaatgggtcaggcccatataatgagtaacagcaaagtcatcgtctctctgaatgtcactttaccattaagagaaacaaaaaccaaagttcaaatcaaggtttaattgaaatgcgacaattcgtgcacatgcgatcaaagtcaatcagtatgttagtgttctcttgaaacgtgttggatgttgtaattgccatcgtctttaggttgcatgcattccgtaagatgtggaatgccgcttttttctctgttttttctcttcctttaaacccaatccactcaaaagcttccagactccgatacaaacttagaggaacaaaatccggttgcttccacttttctcttaaaaggttgcagcagcatcttttttgtttgaacctgagaactcgcagtttagagctacgcattagtataaaagaaaagcaatcgagagcgcatatagcacatagctctacacaatcgctctcaagattcacagctcgtttccaaataggacgccatcgtttcgacaaaatacttgttgccaccgcatcttttgtcggaacaaatgataaaactgtcgccagtaaatcgtcaggcaaatcattaattcttgccgcatctgaacagactctagttgcttttgcttttggatacatcgagatatttgttggaactcagagtcagagaagacagacctttgcttggaatagatgaacacgctaagatcaaccgtatatatacagcctatgggaggatctcctttttccatttatgatataaatctatgttataaaaatggaaacagaaattcaatatgttataaattaagtcacattaccaataagagtctgtcacgtggatgttatttatagtgataactaataagtgattagcaaaataaaaacaaaaagtcacgatatcaataaacacgactaccattaaagttaatgtttgataagttttactttttaaatagattttggatttggcaaatataataaaaaatagaaaaaataaataaaaaatctcgtcacattgacgcaaatttgttggaaaatcccatatattttggtttctgtgaacgaatagaaaaaaactttttcaatccctagtttttaggaaactacttttatcataattttaaaataccaaaaattactttagtatctgcgtctagtcatacccttttacaccctgtttttttggcaaatatcagaattttatttaattttaaaaatatattttatgcgaacattcaacataaaatgggctactgtgaagaactcgaacctccaacgtaaagcccaacaggcatgtctgttaaccgctagaccattttcactcattacctacaaattaataaaacataaatatatacaaacagtaaagcgttagaaaaggaaaaaaaaatgttaatatcttttctgttgaattattacgacactagtattaagcccgtactatgtacggacaaaactttagccaaatttatagataaaccaacaatatttagaaatttttagaaaaattctaatttcaagtcttttggttactgggtttaatcgcaggtcaagtcttacaaagagttttggttcaatgacaaaagatatgtaagtaaaacttacaggtttattgtcaccaacactgctatttaatttttcttaacttgtcaacctgaaaagaaaaagaatcataagaaaattctaatcaaaacttagaagaagaatgtggatgtgattttatttgcaaaaacaatataatcatgtaaacttataagagaatcgtgacagaaatttagacacaaagatgattattgatttacatcgcttaagaactaaaactcaggccaccaatttttgaactttgagacacgaagagtattgtattgttgcaggaaaaaggaatcagaaaaaatgatttgtaagctttttgtatgaaatcatgttgttgttctattgttgaagaagagaagcaaaatggagatattgagatcgtgggtgtaaagggaggtgaaggcgtgaagcagttgcaaggagaatgttgcagttattgtaaaagtgacagttgatttaagaggggttattggtttatagatttataaggaattggaaatccaaacaaaaatcatttgttattcaattattgattttaaaattttaactaaaatcatgtgttattgattcgatgatttataaatactagttaaaatcctttgttattcgtttagtcatttgtttttggatttgagaatccaaattatgttttaaatggaattgaatggatttgaaagaaaaaaatagaaggattcaaatctattgataaatacatgttatttcaaaatccatatatagatgacattgattataataacattcatacaaactcttaataagtatatacaaattatttggtgaagtgagagagtacacacgaacattctgtaaggaaatctcaatttcaaactagatttctacaagagttatccgtgatgtatgtttataaatttcaaactagatttctcagattgaatttaatttattcttctcagctcaggattgtaaaatagggagacatattttataatgatgtatttaaaaaacaaaaaaggaaattttactcttataagaaggaaacatattttatactagattagcccatttcgtaaatattagacagtactatatattaggtttttttttccattcatacattagtttgttttggttagttagtaaacaacttttttttccaaattttcaaccacttcaaaatatattacttgaaaaattttgacttaaaataatttgtatctgtttcaaccaatttctaaagtatattaaccaaacaaaaactaaagatctttcaatttaggatttttcttgtgtgctatcgtttggttgacatgaagacaactggcccatgtaagtatcttttgtatgttgcgtagtttggttgagcccgagagaaatagtgggccaggcccatatagttaatctaagagcacagtcatcgtcttcctttcatttaattttaaaaagataggggtatttagcttctctctacaacggcgatgtatcttctttacgaatcatcttcgggattcggtctgttcgaggcacacgttctagatgagatcggacagaacatggaggcggttcatgtgagtcatcgatctcactgcttttgactctaattcagcaaccaaactggttgatagatcctatatactatatattttcttaataactatagaatggaactggagttgtaacttgaaagctactgcatttgcgggcagaaaacttggccttcaatacgcccctgcaaagaaagaaaacacgaatattaatatgacacatcaaagttttagttatctctataacacctaaaagatgagcaccttgatttttccctcaagcatcaatctcttgacttgggattccgtgatcaccatgcccccagagtcaactctcagtcttccaccctgaaatcccagtgtaaaattatccaacgaaattgctgagaaactcttgagatagtccacgattattacatccctcatcattgatagtaagttatcaacgtgatctctaaggtagaaatctaggagaagtctcggtctttgtttctccagcagtgtcatgcaatcagtgaagtgcctgttcacgttaaataaaaatcaaaccaaagcacttatctgccaagtatatatacaaaaaaagtacttacccagcaagtaacttcttgatgacatcaattagatagtcacatggcccaaacggtttgataacgttttccaaatgactagcgacttgcccgatagggttaacgattgtatcaacggcattctacaaaaatacaatgagttttaagttaaatgtgggctacccataataaaattaagtggtcacaaaaatttattacgtacttgaagtgtggatttactaaatgtagccattgcacagactagtccaaagagaacaatatcttctgatgagatcacctccctataattataattgtctacttctttccaaagctgtacaaactacattatatagataaaatttagataacgaatcacaatttaatattaataaaaaaaactgtgttaaagttaaggagaatttttaccccttccgcagtaacttgatacttgctttctaaaagattagaaagagacttaaagcagtcaattttgaagccatatgccctttttacgttgcagtaagctatctgttcgacacttcggtggggaagctccccaaagttgcgggtctcgagggccaccaatagtgtagccatgtaagcatcgatagtttggacctgccggggatatggtcggaaaacgatcgccatttggccacagtggtaatggagccaatactgacgaagtgcaagacggtctttttcgagttcgtcctgcaaaagaatagaagattagatgtacaatatggaatcttgttgcgcaagcaaagttttatagtcacttttccttaccgtagcactttctaagtcgtttcttagaatgctgtcttgtttgacgaaattgttgttcttagtaagacgccatttttcatccaagagataaccttctcctaatctgccttgtattttttcagctataactgtgaacaaacgcatgtcacagacaattccgtcattccggataagatcataggcaagtcgaagggcttcaagttccaaatcgtcagtgaacatcgggccaacagaattctctgcgatatgaagtagcctcagcactaggtttcgtccttcgtagtttcgtgaataagcttccacatccaagtccaattgatcatcaccctaagtaaaggtcattaaacaagattttcaacttaacgataacaatatgttcttcttcttttttgttgacaacaataacccaatagattttacagtaaaacgcaacattgcacgaactaaactgaaaaaaaaaaaactatttaaaattacctcaatatccatcttgttaaccaatagttttttcaatacttagtctgcaagaaacacttaagaaagataaatgaagttaaatctgattaacaaattaactaagctaagtttctgctgcgaaaacaaatttgtgtgtgtcataaacaatatttttctaccaaactcaatgctctgttaatctagctagtcgatggattctccaaattaaaactgacaagattaactctaaacggagattacttcacatgcaagaaacattaaagaaagtaacacagattaactgttccgagagagaaatctcatttaattgcatgaaaaattaagtaagtctgctacaaaaacgaattatgtcacaaaaacaaaatcattcaccaaaatcaaaagattcaatcaaagaaactttgcacgatttggaaagaaaaatagttgaagttacctgtttatcttgctaagcgatagaatttctccaaattgaatctatgacgattaataaatttaaacgacgattgcttcctattcaagaaacacaaagaaagttagagaagtgtcccaacaacacaaattaacagttctgagagatagatctcatttactagcataaaagatgaagctaagtttctactgcaatatgattttacataacaaataaacccatgcatcaaagtcaaaagcttcaatcgaaacattacatttaccgcaactttgcacgatttgggaataaagaagagttaaactgacctcagttcctctttctaatcgagagatttcgcaaattgaatctgtacgagtataattgattcactagttgagctaatcgtcttgttctgttgcagattcttgagcgaaagaatcttaagaactcacacgtacggtcttcagcaatcccttcgatgatgtgactacaggaccttctatctctcttgtatctctctttctctctgttacagattaattttacaggagaaagaagaagaagatgatcaacaagaaagaagacgactctcaactctgtaacggatcaattagtttgtttatattactaactgatatgatctggtacgggcccttccacagtaactgaagcccacgcgcgtgtacttcacctgagaccacctaaacttttccctctttgtataacaaaagcttgtttttttttccttacatgaagaccattgacccatgctagtcattttggttgagtccgatagaattaatgggccaggcccatgtagttaatctaagagcaaagccgcatcatcttccgtgcgaaataaccttaaaccctaatttctcttattcttctccgaaacggaaactgcataaatactcgattttcaaatcaattttgaaaaagacggctagggtttttacagaattctctctacaatgaagatttatcttctttccgaatcaccctccggctacggattgttcgagggacacggttccgatgagattggacagaacacggaggcggttcggagctccgtctcggaccttagtcggttcgggcgggtcgtccagctcactgcttttcacccgttccagtctgcactcgatgctcttaaccaaatcaacgccgtctctgaaggtgaactcactactaaattacagctctttccctctttagtttcctgcaccatatactttattacttgcttctattatagtttatgctggaaagagcttaattcttagaaattgagctcttactactgttggaatcagcttattctgttctgttttagcttttgctggaggtcttgataataaagtattaatatttgtattgtttttacaccttaaaaatcgtaggatacatgagcgatgagctgagaagttttctggagctgaatctcccgaaagtgaaggaaggcaagaagcccaagtttagtttgggagtgtctgagcctaaaatcggttcttgcatttttgaagctaccaaaattccttgccagagcaatgagtttgtccatgagctccttagaggtgtgcgtcagcatttcgataggttcatcaaagacttgaaggtgtgttttttatttttgattacctaatacctacacatatttttgctattcgtgctcaatatcatcttctttataatgtagcctggtgatttggaaaaagctcaacttggactagctcatagctacagcagagcaaaggtgaagttcaatgttaaccgggtggataacatggttattcaagctattttcatgcttgacacacttgataaggatatcaattcctttgctatgagagtcaggtttgttttcttattgttttgcctttcagattatgtcttgtctgttaccgtaagagaaaatggtttctgagcagctcatattatgtttttgcagagaatggtactcatggcacttccctgagcttgtcaagatagttaatgacaactacctctacgccaaagtttcaaagattatcgtcgacaagtcaaagttgtctgaagagcacatccctatgcttactgaagccctgggtgatgaagataaggcaagagaggttattgaagctggaaaagcatctatgggtaataaactgatgtagcatgttcgataagaatcatgaatctttacaatatatctattgtttctcatgttctaagacattgttgttttctctatttgaaggccaggatttatcaccggttgatctgatcaatgtccagacctttgctcagagagttatggaccttgcagattacaggaagaagctctatgattatcttgttactaaaatgagtgacattgctccaaatttggcggccttgatcggagagatggttggggctaggttgatttcacatgcaggaagtctgacaaatcttgccaagtgcccatcttcaaccctccagattctcggtgctgagaaggcacttttcaggtgcatttcaagctttgttagtctttacaagtttaattacactgcagtaactaactttggtgttaatttcagggcactgaaaacacgtggaaacacacccaaatatggtctaatattccattcatcattcatcgggcgtgcatctgctaaaaacaagggccgtattgctcgtttccttgcaaacaagtgttccattgcttcccggattgattgtttctcaggtaataatctagagaatgtcctgaataagagagaggtgtttgggagatgatgcgttgttattaactacaaaatcatggtggttgtgttatgcagataacagcactacagctttcggtgagaaactaagggaacaagtagaggaaagacttgacttttatgacaaaggtgttgccccacgtaagaatgttgatgtaatgaaagaagtgttggaaaatcttgagaagaaaggtacatatgacccaacaaagctctctgatctgttgtggtaaacggttttgtttgatgggttgtttcttctttttttaagacgagggagaaaaaacagtggatgcttcggagaagaaaaagaagagaaagacagaggagaaggaggaggagaaggaagaggagaaatcaaagaaaaagaaaaagaaaagcaaagcagtagaaggagaggaattgacagcaacagataatggccatagcaagaagaagaagaaaactaagtcacaagatgatgaataaacaaacaagtctgtgtaatacactagtttttagttttctttcttctacatagggttttgactttaagaacaactttaaacatagcgcaaattagataaggttttctacttttgaattaagtctgtcttagccaaatgaaaacaagcttgagtctctgtcttgcgagtttatgacttaaaaacaactaaaaacatatataattatcagattttctacaattgagtctgtcttaaacaaaagaacaagcttttgattatttatcaggtctggtttttaacttttgaagatgatc

SEQ ID NO: 409 - DNA, 15401 bp, Arabidopsis thaliana
aaatttttgttgatgttgaaatggatcttcaagtatgtatggatatgtttttgctcaattctttgaaaatgtcgacaaaacaaattaacattacaaaaaaggattgaaggagatgaatcaaacatgttgtttttctttattatcactaaaattgcagaaaccagagaattctgctaaagcatagcaacaaaagagcaaaagaatcaatcgcagagaatgagtctaatcatggcaagaaccaaacacgaaacagagaagaagaagagcgtcacaaaatccctagcagaccatttcttcacaggcttcgactcaactcttaaactcttggctctacgaagcgcatccacttccttaagcaaatcaaattcgatacctttcttcttcaactcttcaacacatttacgcaacagcttcgcatcttctttctccctctccaacaacttctcaagatgcgattccacttcagatttgtaccgtaccgcccaaatgatccccaaggaagatagcagagcgcagagtgaagggatccatgatcttttacaagcactggaagaagcagaggaagatgaggatgaagaagcgtggaagagaagtagcagagaaatggagtggaagagaaagaagaagatgtagagctgagtgatttctcttcgaacagaatcgatctgagattctttgtgagagacacggcttagaattagctcttcttcttttaaccattgtttcaggagaagcttgtgtgttggtgtatctgcgatctggtgaagaggatgtcttgtctttgcctccatgatcggtggattcgtgctctgatctgacgccatggaagctttgtggttagagagagagagagaagtgtagatttgtgaatcgcagagaaaaaaagatgcggactttattgaggctctttggtaacggctcttttgggttttattttaaaatattatatgaatttacagatttgtcctgagagcgtaacggtcatcaatcaacaatatacggctcggcttggcgccgtcacacattcgtaaactgccccacggtattttaggcccatatctggcccattaaaaacaagaaaggtaattaaccttatcacctttgggaagaaaatagtgaggaagaccactcacgttatatttgtgcttaagtaattaacttatcgttaatgttgaaactaacgcttgaaccacatgtcaccaatatacatactgcaaccagtggatttatagaaaaatacattttctatttccgaacgttacaaattcgtaactcttcttaagtaggtaaaccatagacaatagtgattcacctttaccaaaaagtgaagagtgtaataactaataggcatgaacaaaaaaatggctttgcttgcaaaacttcttatcctcaccacacttgtaacaacaatatcagtaatatccagagccaatgaagagctaatgatgcaacaatgtcacaactctgacaatcccaccttgtgtcttcgctgtctaagctccgaccctggttctcatgaggccgacaaagtaggactggctcgtatcatcctcaaatgcatcaactcacacctccttgttctcaccaagaacgcttccactttgggctcgcagcactaccagaatccaaatactgcagcagcgttgaagcagtgcggtttgggtttctcaacggctaagcatggcgtgggagaggccgacactcaacttataaccggagattacgacaaggctgcgtatgacgtcagcgtgaaggtggtgaatcctccggtatcgtgccgcaacagtctcgaggcactcaacattcaagtcccttcaagtttccgttaccatatggatgtatacttggcgttgactcaagctctcctcaggatcgttgatcgcttctagataggtttttgtttctccaacagtgtttgtcttatccatatatcatgagtgactttaattccctcaaatataaatccaagtttgcttcttcttgttatccgttcaagattgaatgcaaaatagtgacacctaaagtaaagaagcttaattaatgccattagaaaaaagtagctgattcttttcatatgtttatgtcttttgcatgatataagtgggttataaccttcattaatcctagtcaatgtgtcacactcacacctatcgcaaaaaattgtatgaagacgtacaaagccaaaaattcccggactaatctattttctttctctgtttttcgaaacagagtttctaacaaaactaatttatcgtcttccatttgaacatgaaacttactcaggacttagctacggcctacgggtaaactcagtcgtggttttggaaaaacggtgacagctttgctgtgttcaaatccctctatgattttaattttttgtcaaatttcgttgtacttttgtgacttgttcatatcacatagtatggattgttgttaaaatagttcatttctgtgtttttgtttctaacaaacaacattttttataaaaaaagccaaaaaaataaacattttcagttccaaattccaagagccaaataagaaacatcttttacatattccctaattttcattaatatctctgtttctggtacaacttctcttagaactgtgagaagttaattaacagaaacttgttgtttatattttctaggaataaagaatagaatgtttgggcggcaactcgaacccggttgcatgaaccttgagaacaaaatcaggacatatctttaaacacaatatctagctaccagctttcttttttcccttatataattaaaattttggcagcaatatacaatagagaattttactctgtgggacaagaatactcttctaaagtggattactttttatgtaaaaaaaaagttgagaaaaaccaaaactttcttgcttcttttttggttcttcaagggaacagctacatgcctaagattcagttctcaggcaacatgcaccaataacaatagccaaacacaacttgcaacaattgcactttgaccttcttcttttttctctcttttcattttatccaattctttcatttttatctcccttttttaattcaacaacaaaaaaaaaaaatctaaaattttgtaatagttatagcatacattgtttaagagtaattaactgtgtagatcagtctttgtttgaggaaaaaatgaatgcttctttttagtgtaggataattaaaggtaggaatattttcagataacaaacaaagatcgaactaagatatcagtttcgctttagcttaacagaacacatgaaagcaagatttcccaagaacaactttttaagtttgaacaaaaagccactaagtaactcataattatatacataaaaaaggtatcagtactttgaaggcattcggacgcagagtttcagatattgatgatttactattcctggggaatgctgatgagattctattttttaagagcataattaaatccacaagtaggataagataagatcagctatggtagagtttaaaaatatcatatgacatgtaacactgacatcttatgatgtataatttgagatatttggaagatcttcttttttctcataaaatatttcattgtctagtccatgggacgagtttgaagttaagcagatcatggaaagagaatctaatattatgaagttgtacaatttcactgaaaacaagataaagggaagaaaaacatgtctccctttaatctttgaatgcatattcagtcatgtcatgactgacccatccatcatctttcttcgaatctcctatctcactgaacatgtttggaggcagccttccgtattttatatctacacttatgatctcctatctctccatcacccatatttgattatatttttcaacatattaatgtctcaatttcccattcttattagttaaaaaggaaaaacaaaccctaactcgtggtgattcagtggttgaaatttttttcatacggtttaaatggcaaaattcttcatagatcccggagattatacggaacttggtttataattcccggctcgaaagtttaagcattggcgaccagagtttagatatcaaatcttgtaaaatacgcatgcatggttgtcatgcaaacgtagtattatgatgtaaccagtgaatctaaattggactgaggaggtagggggtaaatagacacacaaatctaagttcatatacatttttgcttaaatatttattggtggattcaagtcatgggggctgttttgtacttggagtaatttataatgtaaacaatcgagaagaacatgtgttaagattctggagctaggcgtagggtttctctttacgtagttttcatagcgtgtgtatttgtgtacggccctttgaaataacgcgaaaacatttattctcggtttttaaaattctctttttttctgtttattgaaaaaatgacgagacacgaacattggcaactaaggacaattggtgtggcttaaattagatatctaattattcggctgtgctccattgtctaacgtatcacaattcgacagatgtatcttagtatctacaatatatcaattattaaattcgatgacttaagctgtttaaagtttcattttctcgtagttgaaaattttacaaaaagaaatgttcttaagggagataaaacaagcacaatggcaaatccgaaagaaggataggtggatgaatgtagaaagaaaagtgcaaaaattaaacgaaaatagaaacagttagaacataaaaggaaaaatgagctggtaataattaagatgtttaagttaagaaaatggctttgacagcatgaaaagagagtgtaaagaagttattaacagagcatagagtctcactaactgtaagtttggtgttttcggtcagcccaatttgtgttacggtcagcctgcccgaacccaacaacttgtaacatcctcacacaaaaactcctctctatgtttcctatatatatagacacttgcacacactctcatttcctcccaaacaaccccaaacttataacaaaatggcatcatctcttcctcagttctacgctgatttcacaacattttcctgcgagacttcttcgcagtttcacggctcttcttcatgtcctgacgtggactcttcgttatccagctacctcgacgactgttatggctccttcaacacctcttctaatccagaatccatctttgtaccccaagtctttgggatttctgacgtctctgtgcctgaatacaacaattattaccagaaaatgagtgtgaataatgccacacattactttcatggtggagatcatcaagaatactacggcttttcaccggagatcaagcccttgttccgtccggccacaggagagcaatcttgggtacgtatatattcacgtttgaaaatcttatagttaatatgagagacatttaatatatacgcatgcaagaaacgaaataaaataaatattttgtgtgaagcagggaaatagtgaaggagggatacaagctgagccaaatacaaaagtgggacgctattcggtggaggaacgtaaagacagaatcatgaggtacttgaagaagaagaaccaacgcaacttcaataagaccatcaaggtacgtatacatatacatactacactcattcttatttagtttagttaattacatattcatttttgaatgttttcaaatgattatgtgtgtatgcagtatgtgtgtcgtaaaaccctagccgacaggcgtgttcgtgttcgcggccgatttgctagaaacaatgacacatgtgaagaacaacctcacatgtctaagaatcacaacaaccattctgaaaaagaggaagatatgttttcaggatcagacgactatctaatccaggtatttatttaattattccaagacactagtatattattatatgccatcattacttgtaatttgtaaatctaattaaccaatgcatcccaatttaaagcagatggaacacgatgacggatggcttcacgaagcaatgtccaatctgattccttttccttgtgaatttgacgctcctggagatgctcatcatccaaccaattggagcttctgatgtcactacctatctcatttacttccgaatcaattaatgtctctagatattaagtttcatcagttagtttagttttactaagcagcttatttattttatggtagatttatcatattgtacttaattgttcttggggttattgaacatgaagattctgtctagtgaataaataaaagaactttacgtacttataatcatcatatctaattatgacgtgaggataatttcagccaatgcaggcaatctcaatacaagagcaagtttttatggtttttggatttttgtgttcttcaaaaaaaaaaagttacgttgatctactttacctttttcacagtaaatcaaagttcatatcatgtggaaaccaaaaagacgattctaagaggggtaaaaagtttgttgagattatttaaggcaaacaacatctttttacgatatgcgaataaattgggtgagtcgataagagattaattacttaactggtggattcatggaacaattgtgtattaaggaatatatgatgcaattttaatcataagacgaatgacttaacgtaacatagcttgtggcgccctttcttttctttctttcgtcgatgcttacatatgaatggatataaagaataatgccgattaattggtcgtaacaaaaacatagaaacatgataagttgtacacaaattcttgcaatgataggtaaggagctaaagaatgctgtctacaaattaaagaatccaattattcattatagggattattattattgatgcatgaaaacatagagagagtggagatgaaagacatgatacggaaccaagttccaatcactttttaagacatataattcttataacaaacataataaggcttcaaaatctgcaaattatattctctgaagttgtcccctttattttctgctttgacgaatatatgtgaagttgaaggctgaagccctctcatctgcttttttacttttccactttttccttctcagcacacctctagtggtaaatacatgaaaattaggtacctaacaacaaaaattgttatatgtgaatatttttgcaaacttctttttcgatgatagtgaaatccgcaacaagagaaaatagttgtaacttttatattcaagataaaatcatcactataaatcatgtgctttatgatcattttaactgcttgctttgatcatttttgaaaaccggatttaaatttaaatcctaacaattaacaatttaacatgacatgtaggtctagatagtttatgtggaagtgggcaacaacaaacaatctctttagttcattgttagcccgacaaaattactactagtttatagcacgtatgggtctcaaccggatccatataatgtctcacggattgaatataatgtatcatagaaacatatttacatatctatgtcattgaagtgtgttgaccctgcttcttgactttgggcacatatacgacacaatctatcgcatacgcttaagtcaaaacaagatataaagattgcatcaagtaatcattaattgttatcttcccgtttgtcagttttcttaatatcaagaaagatattagtgtttacccatattttcaataattccggtgaattcccactatctaaacttttttttttgtcttctatataactggtcaacttgaacaggcaaaaggcaataggaattaattcattttttctatataaaaaaaaaaactgatacaagtattctcatactgtttaccaagtatattcacgctggttaagcacttagttagggtgatataatataatggtgcaatattgaacttaaaaggcacattaattaatgaaattacgaattgcatataaatagtacaatatagtttggaggaattgagatcttcacatgttgtgatgcgttgaaaataagtaatacaaaatgcttttgtccacttcactaaaattgttacaaagattcggtgttggattttccaaatttctataaagcctgtgttaccgttagagcagtgaaggtcgctctctatgcatgttgaaaacgaaagctacaatcaacatcttaccccttcaatgggagggagagctaatctgtctatattatttgggttttctataaacttctaatattcccatatatatgtttggaaaatgatagcagattgggacaatttatttatttataagtttccttcaaatctaataagatttataagtcaataataatattcttttcaagcagttctaaggattttttttttatttaatacatttttagattgcagaaccgaaattagtaccggagtctttctaagacgagagaaagtgcagctacgtactttcttatctgtgcattttggtataagaagattggttatttaattttataatgagacgaggtagtttaattaggggaatcatcaaacataggattaagcatctaataaaagtgatgttgcagccaataaaagaagtctacgttaagagatcaacagagccacgtgttttctaatcatgtagcaattgaatttaacatggtcgaaatcataaagatattgtcacatatctaagtaaacatactgtacatgtggttcgtggggattttggaaactaaatataatgcaacgatggctacaagacaggtccgacagaatctttatagaaatattataaattactagactaaatggggttgacctttcccactgaactgggaaattcttaccctttttcgtttttgatataatttaaaagcactacaaaatccaatcatgaaaacgattaacaaagttaaagtaggaaaatcagtaatcttcttttgggaagctaatcaaaatagggacgtagttaggcttgttattgcatgcaactgtgtaacaatagcgatcttgttacccaaatgtgagatttcacttccgtcgtctctttcacaagtttttcttccagacaagacatcccctctcccatcttcttaaaaaatattttccattttcttttacatatactttttcattttagatatacctcaaaacaaaggtgatactgtaaaatttagttcaaaacatacaattgcctagctttatagataacttggtagtgttttattacctagtataaactactaaattttacaattcattaatttttagttcttttttatcttaaaatataataataaataaaaatctttgattcatcatcaacgcatacattaaaataacacaaatttggtaatccaagaaaacaatgtaacactaacttatagggtctggggacatgcattcgcttttaaacgagcaaattcaaaatttacattttatttttggatcaaaattcaaaatttacattattccgagaattgagaagacaggcatctcagctttggtgggctcctaatagtactctagctcacgacgtatcgtgcttttaatattaggcccataataactacacaaagcccaagccccaccaaggcgttgactttgaaatacggagactataatttattggagaggggcatggctcacggtagccaagcgttaagtactagttttaagcgtggattttgagtagtattaaacaaaatgagtttatttaagaagccaaaaactgaaagtctactagaatgttaaatggctttcatgtataacttttttggtaaagagctacaaatataagctgcttacgtataacgtatataacccacttcaagatatatttgtataccaacttaaatattttttaatcgttataattgggaatggctttgtgttaatggcgagacgcatgcaccacaaaatgttcacttgtaagacactagctagaaaaaaccctaatgtaagagttgtttataatatatcagtgattggttcaagttttttatacccagataatgaatttattcaacgtttactttgatatttttgaattcaacgtttactcttatttttattaccacacatcaaacttttatatagaggggggttggtaaatgagaagatatgtaggtagttgagatatattaaaattaaactcctctttcgatacataacgtacaacagaaaattaaactgaaatcttggcattatgcacgcttgtgattagacaaatcgacgactagtttaccaagtgattataatcaaatatataattacattcaaaacattatctcaggtacgtaaacttctctattttcgttactatttatatccgcttcaaattgttacttttcaacattcacttttcaatattcaaccaaaaaacaaaaacaaaaaacattcagttttcaagcagaagtgtggagacaatgggtatcaatttcgaggaccaaaccacattgttcaatttcgtggtcagagaaggtaacggcgtgaaaggaatgatagactcgggcctctctagtgttccacggcccttcgtccagcctctctctgagcgaatcccgacccaaaaagcccttacgtgtgaggctacccagccaatcgatctttccaacctagacggcccacaacacaaggaggtggccaagcagattgtcgaagctgccgagacacttggcttcttccaggtaattaatagtcgacacatagtattttggttggtgtataaaccagctatacatgagcgtgaacatgtaaatttgacgcggatattacttacaaaatgacgttatatatcttggaaaaaaagagtaaactgggcttataagattgagaatattttaccaatctctaacaaatgcatgtttaatgagagaagactatatgatttgaggacgaaatgaaaatgacaggtggtgaaccatggtgtttcggtggagctgctggagttgctaaaatcgtcggctcatgagttttttgcacaagctcctgaggaaaaatcgatgtacctgaaggaagtgagtccaagcaagctggttaagtacggaacgagctttgtgccagataaggagaaggcgattgagtggaaggattatgtgagcatgctttacaccaatgacagtgaggctcttcaacactggcctcaaccatgcaggtatatatatatatatatatatggactaaatttcttattgatataaatacatcatatttaaaaaaataaaataaaaatacatcatattttgtttcaatatatatactcataaaacgtaacatataatatgtgtgacagggaggtggcacttgagttcctaaattcatcgatggaaatggtgaaaaatgtagttaacattctgatggagaatgttggagtgacactagaagaagagaaaatgaatggtttgatgggaaccaagatggtcaacatgaactactaccctacttgtccgagccccgagctgaccgtcggcgtcggccgtcactcagacatgggaatgttgaccgttttattacaagacggcattggtggtctctacgttaaactagacaacggtgaatgggccgagatccctcctgtccatggagctttggtcatcaacatcggcgacactttgcaggtaatttgtttaaacgaattaacaatgaatggcctgatatagatgttgtatccatgtttatttctgaaattctaataaaaatatgtaaaaatttcaacagattttgagcaatgggaagtacaaaagtgcggagcatagggttcgaaccacaaacatcggatcaagagtctctgtgcccattttcacggcaccaaatccctcccagaaggtcggtcccttgccggaagttgtgaaacgcgacggagtggctcgttacaaggagtttttgtttcaagactacatgaataacttcttcggccaaccacacgacggcaaaaaatctctcgacttcgcacgtgccgagtgatactatcagcagttgccacgtactaatcaaccacaactacgcgacacagtttcctttttatccttgttctttttctatcccagttcccacgttacaaggagttgtattgttttccatttttgttttcttttctttttgatgtaactttttatccttcttcgatccatgtttttatttttgtacaatttacaaattaataaaagttgccttcttcgtgtgcattcttaaactgatggatctttatgaaattttatgcatatgaggttgaatggttgagttcttttaccaaaatttcaaagtcccagagtttgactcacttaatggttttttactgcaatggtttatctttttgccaatttctccacggaatttcaatttatatatggggacttttccccacattttgaaagttaatttgagttacattattcatctcgatcgttttcatggcatactatatttacgatttagacttattggattcatggcatactatatttctaggtcgtacataattttccgttgactataagaagcaagaaacaaaaattattttgaaacggcaccggttaactaaacatatggttcaactttgaagaaagtccatgtcacataagcggacataagcggtagggactttattacaattgacatgaatcgtgtacttcaaacagtatgacgtagtgggaaaaaaaaaaaagtgtgacgtaagatttatacggattttcaaaactcgtgccattgcatccttctttagttttcctgttttaatttttataaagtctaaagttttccactcacgcccaattaaaactcgttaactcaccacaaattcgaataattctatataaataacgtgtttaaatatggaatcgttacatgaatttttctctctcttgcgtttggagcatacatgagagtataccaaaatcttaaagtgtggttaaatatgtttctatacatgcataaaataaatataggtgttatggtttacttttccccgataatattttcacctccatgcaaattaataagagtttttttagtgccgaaaaaagtttataatagattgagaggaagatgtccaacaagaacaacttggggtcaaccattgatgactctggttgaattatcctttgacttgaccagccgctacgaattgaccaacaaattgaaacaattaataaataggggaagttatatgagttatattcatttttgttttttttatgtctacctttcaagcaattcccttttatataccgaattcatgtattaaattactctcgtttccatggcttccctatgtttgttacttctattttacatcagaactagattagttaatattttctctgtacgtccaattttataaatattttggctacaaacacacatattaagaactttgttttacttacaaaaataatttaatattttagttaaaaaaataataataaagataaaaaaatgatcacaaaatattaaaagcgtttaaatttatatagaaaatgtaagatataaagtatatctaatagaatgaaacaatattaagatagtattagttctttttaacattccaatgaaatttgataatgtttgtaccggagaatgattccttctctaatttttttttttaaaataaaaataaattttctagttctagacatgtacatctttatcatattgaggattaaaatattatgtatgattttcttctaaataccattcgaaatcagtgacttttagattttatttaaaatattttactcgttgtgctatttgtaccgggtacttttaccaaaagcttatctaaaaaagtggtaaagatttggacaaaaaagtcagaaccaacattacttgaataacgttttttcgtagagtgagttttgacaatgagcagtgtattaatgggagagactctttcagtgcagtggaaattgtggtttctgaatataataggtaattatggtgacaataattataagtattagtatttccactacttttaaatagacagcatatttccacagctttaagcacgctcctctgatcgaaatttcgcctcgtggattttgcaaatagtgttacaacaattaccaccggattaaatatgatttttctcatatttaaaaaagaaaaaaatgtggtatagtaagtcatgttgcattcttcagaaaaaagtaaggcattacaaaaatgtaaggtcgtccagtgagatggtggaagataagcttcattgtccagagagaagtagtttggaaataattttaatttatgatatataatggatatatatgtacgtaaaataattaattgttgagatatcaatccgaatgaagatgtaagatcaacataaacgaagaaatccgatatgccgatctttgaaagtatggtttgttaatgagtttcagtattattaattggatctagatataatttggaattaataagcttctggggattggttggctactaacgacggtttatgaaccatcccgtagctgtagttatcagttgcaacgatattaaaataaagggacaagagacgagtttaaattaagaccaattactttcaagttcaaaaaccaagcttaactaataactacaataaccagtaaaatattttggagaagtgagaaaggaactgacaggtaatattcggtttttatttggtggatctgtcattgtcaatttcggagaaattaccaaatagaaaaataaaaaatgtaacaatattcatattttttctttttagtttgttgatctctccaagactccaagttaaaatctccaaacgaagcaatacaaatcttacctttacgagcacaaagtcggatttatgcgtttaacgtcatgatgattagtagatgttttgtggtggtcaagaatataatatgcaaacaattaatgatgggtctagaagaagttaatgttgtaacaatgaatactcgtcagacattttggaagagaacacacaaaaattaaatttttgtgtgtcaaaaagtcagtcctctccttagcgttttccttgcgtcctaataatgcgaaaggtaaaagcgtcatatttattgggtccacgtatagatgcgaaaagactcgttctaaaaactcaagcccaaaagacttttaccgggtcggatatatcattgattacaaaggatcactaagtcaacagaaatgacttgaccaaatcgatcttatgatagatagacacacgacacaaactctctttatataaatctcaagaagattcttatatgtgagtccaaagagcaaaaaggaagaaatagaaaccaaagccatggagaagatgatagaaccacgggacaacacaagagaatcagaagatgaggatgcgttaaagcttccagggtttaggtttcatccgacggatgaggagcttgtagggtattatctctctaaaaaagtgcttctcaaaaaaacgagcaagattgatgagatcgtcagccaaattgatatctataaatttgatccgtgg

SEQ ID NO: 410 - DNA, 81020 bp, Arabidopsis thaliana
gatcttccaagtaagtttgttttactcactcttgcttttttctgttttttgcactccaaaccatgcaaacacaaatagaaaaaaaattaggtctaacttttatgagaaaaacaaaagtaaagtcgtgtatgcatgtttgtgaagtaaaattaacacataaattattgttataaactgatgatcaaacataatttttgtttgaagggtcgaggaatacagagaaggagagctacttcttttgtaagagaggaaggaaatacagaaacagcataagaccgaaccgagtgactggttccggtttctggaaagccacagggatagacaagcctgtctattccgatggatccaacaaagccgtgatcggtctaaagaagacactcgtttattacctaggaagcgccgggaaaggaaacaagacggattggatgatgcacgagtttcgtctccctacagccaatgacacaatccccggtggccctacacactctaaccctactccaacttccttgctacacgcggtaagtttgctatctcttgatcatgatcatgcatggttggccactataaacgcttcacatggcaaaaatacatagggtttgagaaagaatgctcatggatggttcttattaactatataattgcaggaagtatggacgttatgccggatatttaagagaactgtgtctagtcgaaaatacactccggactggagagaattagcaaatggcaaacgtgtgaagcagcaacaatctaattaccaagaagcttatataaattttggggacaatgaaagtagtagtagtaccaacgtgatgaacgttagggaaggcaaagggaactacgagagaagcgttttccagcttcagcaaacgccttatcaacatcaaaaccagccaattctcatggacaccacacacgttgattcgtttcaacatttctccaacgataacattcaccatgaaacctacgagacttggccggacgagcttcgatcggttgtggaatttgctttcccaccttcttttcttagttagatctctagaataattaacaactaatatgtatacatattacatattactagcttggacgtgttgtatcatcagatctctactgtatacatggatcgtgtgtatatgaatatgcacctgtttgaattctcaggttgatccacacgtatatagtatgtattaatgtcaatttaatctcgggaactatttgcatattttgttttattagccctcttattttatgtttttcggttagacgaatagtggacttgtggtcttgttatctttaataaagtaacaaaagcgtttaaaaaaacattaagaagcccacaaaggaaacaaagcccattaggtggaggagatgaaacgatggaacttcttgtcttgtcacggatgagagaaatattggagagaaccattggagagaaagcagagttacttgccaatttcgaattctgagagcgaagagccgagattctgtttgtagtttggatgatgaatacgattgttcatgttccttttatctccagatttcgtaaattcgtcaatttaagagacgattagctcagtttacaatcgagtcagtatatatcgaattaaactgcagaggttttgggtgttcccgagacatgactaggatatggttcaataaacagttggaattggcgtgaaaattgtagataggttaagctttatacttcaaatcatgcaatcgagtagtctgatatcattttactgactgattccactggttatccagtagccaactatgtacgtgtgattgattgtgtagtaatttccgtcttgtactttgtaagttgggttcttattctgctgcatttggctattccgtgtctgatgacctttgttttttccttttgcagctttgttagagtctcatttagatccatgtctctttgctttaattggtcacaatgcttcttctggttttattgcagcggaaacggtttattgaacaaacgaagactctttatggtatgaatttcctggcatctgtttcaagtttactttctaaaacctggaagttcggcacatgagcagttccttttagaacagtttgtttacttaaacctttgacgcccttttgtgtactggtataaacctcctgcctcttctctcatctgtttcaggcttcgattccacccttcatattacagtcgcaattacaaactagtgtcaatgagagaacccaattcgatcagaggtatgctttctcttcttgacaacaagtaaagtaaacagggtttctgtttctccacttccttttatggttttggttttgaaaagtgaaatctttatgtgaaagttccatttttttgttttaataggatttgagattaatgagtaatttaaaataagtgagcctatttaggccctaaagacaaaaaaaatcctaactttttgtctttttttattaaactaaaatatcagggtcatgatttacaatctttattttttcttgatacttttcatgattttagtttgtaaaaaaaaatgtataaaatcataaaccaataacaccataattaaaatcattaagaatcatagattcatttgttttagtttaataacatcaatttttaatgactttattaaattatgaatctaataactcaaaatttatgaagactttagattattttgtataaatcaaaatctaataacactaactgttaacagaatcttataaaatcttaatttaattacacaagattttttataacattaaatcgctaaaaatttatataaatcgtaaaccaataataccccctaatttttttaaaaaaaataggatttcagattaatgagtaatttaaaataagtgagcccatttaggcccttaagacaaaataaaacccgacagagattctctgtgtgaaaccctaaatattaaaatcagaaggcaaaggcactttcttataatatacagagagtaacgcttctgctcatcttttcacgtccaaggctgcacccgtactcgctccaggttggttaagattttagtttaccttcgctccctcttcttcttcttcttttcccatttattaattttttacagattgttgattctctcttcttctctctactgctgatctatgaattctagtattattttccgataattttcttactgtctcttctttctctgcagagaattttgtaggcgtgaggaaaaaagcaagtcaagatggtaagctttttttcttttctttcagagtactattcatttattttttgtgtagtgatctgccttgtgttttgtttaacacgtttttgttaaaaaatcttgcaggtgaagtttacagttgaagagcaacggaaaattacggatcgtaaacacaacatccgtaacatgtctgtcatcgcccatgtcgatcatggtatttatctctttaaaaattgttcgttgtatatgaatctcatatcactctgtttttatggcttattgatgttaaagtataacataacataaaaaaacgattttattttatatatcttttatttatatagttctgtttcttttttgttgatgaaatatttgctcttttatacatatgtttgctaagcatgtgttttttctatcaaacttgatactaaataaaagttttgtgatcttttaatgatagggaaatctacacttacggattcacttgttgctgctgctggtatcattgctcaagaaactgcgggtgatgtgcgtatgactgatactcgtgctgatgaggcagaacgtggtatcaccatcaagtccactggtatctctctctactatgagatgactgatgcgtctctgaagagtttcaccggagctagagatggcaatgagtacctgatcaacctcattgactctcctggacacgttgacttttcttcagaggtcacagctgctctccgtatcactgatggtgctcttgtggttgttgactgcattgaaggtgtttgtgtgcagactgagactgtgctcaggcaatctcttggtgaaaggattaggcctgttttgactgtcaacaagatggacaggtgtttccttgagcttaaggttgatggtgaggaggcgtatcagaatttccagagggtcattgagaatgctaatgtcatcatggccacgcatgaggatcctctcctcggtgatgttcaggtttaccctgaaaaggggacagtagctttctctgctggtctccacggatgggctttcactctcaccaattttgctaagatgtatgcttccaagtttggtgtctctgaatctaaaatgatggagaggctgtggggtgagaacttctttgattctgcaaccagaaaatggacgaccaaaaactggctccccgacctgcaagcgtgggtttgttcagttctgttatgaacccattaagataatgatcaacacttgtatgaatgatcagaaggataagctgtggccgatgttagagaagcttggtattcagatgaagcccgatgagaaagagttgatgggtaaacctttgatgaagcgtgtcatgcaggcatggcttcctgcgagtaccgctcttcttgaaatgatgatctttcacttaccatcaccctacactgcgcagaggtaccgtgttgagaacttgtatgaaggtccccttgatgataagtatgctgcagctatcagaaactgtgatccagacggtcctttgatgctctacgtctctaagatgattcccgcatctgacaagggcaggttctttgccttcggtcgtgtcttttctggtacggtttctactggtatgaaagtcaggatcatgggtcctaactatgtccctggtgaaaagaaagatctgtatgtcaaaagtgtgcagaggactgtcatttggatgggtaagaaacaagagacagtggaggatgttccttgtggtaatactgttgctatggttgggctggatcagttcatcaccaagaatggtaccttgacgaattagaaggaagtggacgcacacccgcttcgtgccatgaagttttctgtctctcccgttgttcgtgttgctgtgaaatgcaagctagcgtctgaccttcccaagcttgtagaaggtcttaagaggctggccaagtctgaccctatggttctatgcacaatggaagagtctggtgagcacattgttgcaggtgctggagaactccacattgaaatttgtgtcaaggatcttcaagattttatgggtggtgcggatatcatagtgtcagatcctgttgtttcgttacgagagacagtctttgagaggtcttgccggactgtgatgagtaagtccccaaacaaacacaaccgtctttacatggaagccagaccaatggaggatggtctagcagaggccattgatgaaggccgcatcggtccatctgatgaccccaagatccgatccaagattcttgcagaagagtttgggtgggacaaggatcttgccaagaaaatctgggcgtttggacctgacaccacagggcccaacatggtggttgacatgtgtaagggagtgcagtacttgaatgaaatcaaggactcagtggttgctgggttccaatgggcttcaaaggaaggtcctttagcagaggaaaacatgagaggggtctgttatgaggtgtgtgatgttgtgctccatgctgatgcaatccacagaggatgtggtcagatgatctcaacagcaagaagagccatctatgcatcacaactcacggccaagcctagacttcttgagccggtttacatggtcgagatacaagcacctgagggagctttaggaggaatctacagtgtgttgaatcagaagcgtggacatgtgtttgaagaaatgcaaaggccaggaacgcctctctacaacatcaaagcctaccttcctgtggtcgagtcatttggtttctcaggtcagctaagggctgcaacctcaggacaagcctttcctcagtgtgtgtttgaccattgggacatgatgtcttctgatccgcttgagactggctcacaggctgcgacattggtagctgatatcaggaagagaaaaggtttgaagctacaaatgactccactctctgattatgaagacaaattgtaagcggaacatagctcctctaactctttctcaaagactcttatctccctcttaggcttgtttattgttcacatttttgattcagacttacaccctgttttttgttcactctttttacttcatagacctatcaattcagtagtattgtttatactagttgagttattttctgtttcataacttgttttttttgttctcttcgatgacgaacgtcctaagcgtcgataataaacctctcaagtctgaagctgtattgttttaatatagagtgagaacaaaatatcaggtcacatttttgctcttgttgagttgtttctcttgttatgactctcacagttgggttcttataatagcagcatttttcagccagtgaatttagttaaaccaaccgggttcaagaagcatttctaggtagtcctgagcttgtttcggctttcccatcttgtattagccatagattcagccttctaggtagtcctgagcttgtttttcagaactctctttccatgttagcgaaccataaattgggcttagttactagtattgtgttccgcaactcattttctcttccttctttattggcacatttacaatgttgtctttttattttctttgatttcaagatgtgctcattcatgtcttagatatgtatctttaaaccaaacttttcagctcaactagaacatgtcatcgcctcaacatagtggagatcaagaaaagtggcatgtgactgtttgagttttaagaaataggcaaaaatacatgttataaagtttgcaagtttatcactgccttacgaagttagatcagcactaatttcccactcacttgccaaaatgctaatataaaatatgggaacaaagatactattgattggattctgcagatgaaaaaaaggtgtcgcaatcatccaacttaggcatcttgattttgtagggactcaatcttaatggtccatttttgtggtggatggggtcccttatttgctttcttgattcaattaagtaatcgtgttgcgttgttgtcttggcctgctggacactaaggacaccattcatccatcacttcacatcattcatcttccttactatgtatgcaccactataatcatcatcactattattactttgaaaaaaaaactcttattggaatcttagattgtataaatcatcataatctgtagtgatcttcgttgttttgttttaataaacaaatgaaaagaatattccaagtgtataagataacaataagttcaattgccatcttttaattagtgtcatcttcgacctcaaatctctctttttactattttttctcctttgacaaagtagccgacgcacatctttttttttttttccatcacttttttatagctttgccatattctctatcttgtgcatttattcttcttcataccatcattgcattgctttactcttgttttcaaattatttggttataaaaaagggttatgttatgataattgtttgaaatgaagactccatatttctaaatctatcgacattgaaattacatattgtattatactttcacacttgcccccactaaagaactatacacgatattaatagttagatttttattttttagtggttggttcctaatgtggacaataaccaaactatttcctcacctttttttcatccatacgaaaagtacagtctttacttgtaattgtttcatgtcttgtttctatccaatatatcaatgtcatgtctcaaccatatattgttttttgtctcggatggaaacataagcttctaattatatccctcatctaaaccacatggtgttttgatattttgtaccatttagtgggtgagaggatgatatttgcataggtacaaattaaaataaatttcccaaaattaaatcagaaaaaaggattaggtcaagtgggcaacaatggtataggctattccttttgctttaaagcctttgatatcctctcacctctctattccaaattcatctttgtgtcgtccaaactaaagcacatttatatctgtcactataatgtttaaattgttacttgttagtatatgatggctccaagatctgaccaacaagaagatattaagacattatataatgtggctttagcaaattgatacaaattaaactatcatgaacaaatagacttctgcatatgtcccacaccacaattaaaacaggaaatgatcaagattctagagtgcggaagtgagaattatgtgcctaatactttgatataaggtctgatggtacccactcgtaatctgatccttcattccaatttttgtttacatttttctggttaggaatttgattacatttttgtttgggattagagaaaaaaagacgcataattcatatttttagtgtttttgcgggttgtaaaagcaaatgccaatgaacacgttacatttattctagtctatatatgtttgcgttttgactttcaattccaacatgataatactatatgcatacatacacaatcacaaacatggcaaatgcaacaattttcaacttaaataaacaatcaatatcttaatctgtcgactgtgtcaaagactatggacgactttgataaaaaaccgaaagttgcgttccactttggtttgaaaggtagaatatttagtaaagagttgtgagaaagaagaaaagataaagaaaggaggccatcaatatatatcatagttgttccatggttgacatggtacaccattcattatgaatatgaggtctcatccaagttttttgaaaagtatatttgatttctttaatacatattcccttcgtttcataatataagttgttttagataaaagcacgtagattaagaacatttatttttaaaaagtttaaccaattagaaaagagactacataatataattaatcataaattattaaaatattatataatttgcataaaaacttgaaaacaacttatattgtaaaacaaaaattttggtcaaaaacaaaaacggatggattatttgatacatagtggagacgttgattgttagaggttaggctacagaacaaatgaaaaccgacccacaaatcaatcaatttcgaaatcatgatgacattaattcgtataacttttctagtgccgtctttcccttggaaatttcttctcttttttttgtgtggaatatattattactctttatataaaagaggaatcatattcattcatcttaatacatggaaaagcaaaagatgactttgatgatttccattcaaaaataaactataagaatgataaaatcccgaaaatgaattaaaactttacaacgtgaccccactcggaaatctaacaaattttcttcttttagtactattggtgtttactatattgtttggagtgtataatgtgccactgtatttgacttttgtgataagaggaaatacttttggaaaaactgttcgatgactctatcagatggtgaaggtgactcagacaacatagaagaaggttacttagctctttcatgacgatgcagcccactttcataattatcatatttgaatactaataattaaaatgtgaaaagtcggtttcaaaacacatccaatagtcattttaaagagccaaataaccaaagaaaagaaagtaatatgctctttataatataacaacaactatgtgatctacataaactatgcgtagaattttatcagcatgtcacctggaaacatacgttcttcttttgaactgtattttataaaattaagatgaagtttaaatacgataacgtgtaagatgggctagttttgttttgatattctaatgggaagttgaggaaagttccaagtgtgtggaatcaaattcacgtgttggagaaggggaaaataaaggagaaacggtcccctctgtgggcccattacggcccaaatattgtttattttttctgaagaaaataggaaagcaaattgtggacccggcggtgcgatgtggatgtgcttgtgtaatgttttaatgttttaaatgccaatttttgtcttctttttaaaaaaaaaaaaattgtggactccacttttaagatttgttccctaaataaaatagcttctttctctaccgacaatgttctttttaccatttctttttgcttgctttgattaccaattcgtatgttcacttaattagctacgaaatcgtactactgtattagtaagtgtattatattctatgatctatcatatgtggtggtgcatagttgcgtattgtgttgcgtaggtgtcgcatttacatgaactaatcaaaagatagtggagaatggagattatctttggcatctaacatgtgttagaggaaaagctaagttattaattattgtatatcattttctttgtgttgtcaatatataaaaagagtcgaaagtctaggctttataccagtagtactgctgagatttttaaaataatagtaaaagagatcgaggagtaatagtttgacgtgacttgatgatcacaattgcaacgtccgtatagatagatatctttcttttattgataacaaatgagttaatggcacaaaactacaaaagtagcgtgaagggacggcaataataatgtgaatgttgatgaatccatcccccgggaccattccacgataagttcagagtcgtgcccaaattattatgtactatatatacgacatcatcaatgataaagtgttatattttagcggtgaattttatacgatactctttccatcgatataaatgttttcagtatttatttctatatatcaagaacaactctgcattcaaaaagatgtaaacaaaaaggacaaataaataaatcatgattcaatattactactaaaaaagtggcgtgaaagagaacgtgaaccaactgcatttcacatgcttcgaaccctcatcaccctaacgcataattatccctaaattagtgaattactccattattctattcagtcaaagttccttcaaattcataatctataataaccgattacttaatgatgacgtggttgattgcatgatagcatatagatacagagcattgaatgatttaaaaaccaaaatattaacattgcaatatgttagaacttagaaccaaagaaagaatattttaatttagttatatactatagtattattatgtttaatacacgaaaggaaggtggtgattgtgttgggtggaatggaggcagtcaaatacttaaatatttctttgatatgaaagggacaacacaggcgtgttcttgacgcgccttgattctcttaaatcttaattccattcttcctaatctaaagctatatcttgaaacctatcagttcatgggccatttaaatcagtacgtttccaaaacttttttttaacccttatcttatcaattttaagccttttttttaaccaacgtacgaatcttactttattttttatttttggttttaatgctaagacgactagggcgaatctactacatcttggtttttcgaatattttggtccaaaaggaagatatgcttctattgttacttgaaatatgacaaagcaacactaataaaactgttttaacatttatttggtaaacagagccgttttgggaagtaaaaacgccggaagaagtggaacagacagaacacaagacgagattttggtggacttaacgagttttactttaggatactaatactataagggtatgagacccactctttttacccagcgagatttgcgcgcgctctccacgtcagcttttgccactccaccgttatttctccacgcgccaattctaacggctagtcaaaccttggtgtctctattaagctaacttgtgctttaaccctgctacacagtgtttaacacactaacttgcaccaacccactcctgaagtcttttagcatcagttctctctcgggtatagaggaaaagttgatatggctttttatttttgcttttggtttaatggcctgtcacgcataacccacgatttcgaccacttactttagtctttgtatcgaatatatcattttctagaaaaacacaacaaaaaaaaaaaacgattgggcaaaagtatatgttaaagaaaaattcaagcttgtgaaaagtgacgttatacccctactactactatgttaaaagactagtagttgaaccacacacaaaacttttccactttttttggtgaaaattcatacaaagatgggaaatgacattgaaagtgggtataaacctaacccacgatttttagcaacagaggtccctcgtgaaccccttacgaaatttaaagatctgacacatatgtcaaagattcgtgttccatcatcatcatcaccatccaaacaaaaaaagaatgaacagtttttaaccaagaaacttttgtctactatttactttttttgggggcatttacattttactggtattggttaggtctaagaggaaagattaacatgtagactagcggtctttggagatttacatataggacaagtgttgagtgaagagccacacacagaacatagacacatgtgtctgcacggtaacagtaacacacttgcttctcctttcccacagcttctacacatactcatccctaccctacacatctttttcgtatcctgcgcctctcccgctaacttccaccgttcttcctcgctatcaccttcgtcgttgctaccgcaacaagactgtgcgtcgtcagccaccgtgggcggctcctcccaccggttacgctccacggctgcgagaacttgttgcaagttagaacgtagggcgtttacggtggcttcattagactgtgccacgtcacgccatatctgattctctacgcacaaagacttaaccttctcttcgagaaagaggtttagtttcccgatgtgatttatctcatcgtctttggctcttagtgtcttcatcaaaccttgttcgacggcttccactatccttctcccttgtgtttttctcttctcttcaatctccattctcattctctcaacctaataatggaattgttgaagaacccatcaatttatgtaaaccagaaaaattaacaaaaaatatactcaaaacatattagataagaacttacgtgattagagatcaaacgatcgatatcgaaatgatgttgttgaacgttagaagacaagtcttggccaaggaacataagaggatcggtgggatttttctgaatttgcatataagcggaagggtttagaacaacggattcttctctagaacgttttctcgacgacacaggacgaagaaaatcgacgttgttgtcgctgttgaatgtgagagaactatcaacggactgtatcgttggtttcatggattgatgaaccaaacgatcgactggtgagatgttgtagattgggttaaacagagaagtttgacattccacggtggggttaaacgtcggaacggtgccgtatctcatctgggtgttatagactacaccgcttgcttcaacgggatgaatcatttctctgtaaggaaaaaataaaaacacctttgacgttaagatactgaaaagaagagaggacaaaggaaacagaggagattataacaagaaattttctgtacctgttggaagagaacagaggatttagatggtgagcttcaacggccattgtttttgttgactattgagaaaacttgttcaaagctatttttaatggagtgattcagagaacctttaaaaacgtgaatgcaacgaaagatggaagaagaagacgttatgttgaagaagttgtggggggtttttaattacggtttctgcagagagaaggagaaactaaaaaacaaatatcaaagcagaacccaacacactcttgtctgccaatttatagagaacagagaggaagatgtgatgttttattttatttatttttctgtaattggcattttgttgttttctactatcaatttttttaataattttaattaagcatgaggattcttcggttatatccggctgaccagtgaccattaaagtagttgccttttccagcgtttcttcatgagagaattaaacaaaaaaaaactttgacaaggacagctgtaaaatctttggttcagaggttacggtcaaaatcataatttctatatctgctcttttactttctctggtttttttactttaaacttcctatttctctcttttttcgcctaactcttctcttttctgcttcgtctttaattttatggatggtcaaacctgacaattaatagatcttattggtaacaaaaatgtttggtgtaagttacttacttgcaccgttgtaagattcattgtacacatacgtaaatgcgaatttataaacggccaaaacataatggtactatacaatagaggtggctcatgtgacaagacttgcaagtcttgtgactatcttaaattattaattgctttatccttttaaaaaccaaaatcaaatcacaaatatatattcaaaacatgccattatctaattatatatcatcctctgtagttgaattggaaataactctctataataaattgctttgcatgcatgaatttgaatttctgaatcaataaatgattttattcgtacataaatattgcttgcttatccgttggaggacaaaggccgtaagattccaacggggcgaatccgtaaaaagagccgagagacggtcactgacaacgccacgtgacaatacagacaaaatcttaaggttctgggaccttatggtccacgtgtgatggagttgccgggatacgagggtcgcatgggcacgtgtggactgccagcttggcactattcccctctttattttttttttatttttttaattggaagccgttgagaaaggtacggtgtacccaccgctgcttctttacctcttttctaattttcctattttattttataatcttttatttatgtcagttactttttcacggttctcgttgccacgtctgttgaactaacatcttgccacgtgtcttacaaacttctctttgttattacgactagtgtcattgccacattaataggaaaactaaattagtctcttgttaatttggcgtatacttacaatctctaataaaaaaatttggttcacgacgttttcaaattttgttttcaaatatttttttgactttctttaatatttgtaggaggatgcagcttggctttgttaatgcatgtgtacacctagttcctttgacgatcaaaaataatcaaactattatatgtcaaattattacactttgaagttaaataatattagtcgggcattatcgtatttataaataaaagccaccgcaagataaactaagttatcttggaaatgctagagcacgaagagagggcatagaatcacgaggttagcatagcaaacgcatcaagatgagcatgccttttgcatcatctgcttttcagacattatctttagtctttttattaacatttagtcgtattatgcattttcttattgtttgggtcgatctgacatcgtacaattatcatttctttatcttcgctgacaactcaagtataaaaataaaaacaaaagacaagttgctaatagcaaaagtcgaggctcattctaaattctattattaaagaatcacaattatagtcgagatatcccgtggaattaaactaaaaatttgcataaaccaacggaatataaaagattatttgaatgagtctcacgtctgaactacttgagcttaggggcaacaaaagtggtctaatgctgtacacatgctcatcatctcattttgttatagctaagattaaggtttaagtttctttcttctgtttaacactcattattttcatttttgagctgtaagtacttttcttttcgtcaattaggcttaaactttttatctatgatttttttctaagtattgcaaaggcatcatcaaacttaagaaaaaataaatccatatacttccgtgtatatttcaacgtatgattcgattacttaactttaacagaaggtgtgcagtgaggaaatcatgaaagaaatatcaaatagtactagaattgatttttggtttgcaagaaaaataaaatgaagaagtaagaatataaatgtaggtgatggttttggcgtgcctgcttttgagggcaaaggcatgactccattgagttgataaaagtagtttattttctttctttttctttagttgaacttaaaaaagtcgttgatctattattttcccacatcatctcaaccgctcaccataatgagagaatctcaatgtcacacaaacacataatcgaacctctaacttttgtatacataacaaactttattattcttttatcgagggaatctcgttttcatcatccctatgttcataatatatctcctctaccatatacatatgcttgatagacgtcatatatgccatacatgttaaagtagttgtgtatatattaaagtagagaatatggacattgcatatatgtatggcaatgtatagataatcgatatacgtaaaatacgtgaaagcaatgcatcagaaaagttggttgagcaaagaattggatacggctcgagatggcatcacatgtattggaaaaagtggagcaatgtgtcattataatccaaaaccctcaataatgtgtgtccaattctttactacttccataagcttacttaatatccaatttgtttttatattcttacattaggaataatggattcctctctcgagtttagatttcagaatgcagctctttaaacaaacaattttgcggatttgaagtattatcaaatgtcttagaaaaaacattaatttaaacctcttctaacaaaccaatgtaacttgacaacaaccaattagtataaaggagcaaaatatattattacaagaattagaagcaacggtggtattcaacgatggaatttatacgcgtattaatataaataaatgaaagattttggtgggggaagggaagttgatatatagatcaatggagctcattgtcaacattcaaacatctcattacttctatcggaaacacacttaacaaagactttaatttccactccttctcgcacctcattgttacaaaacttctcatttttatttattttgtctactccatattccacgatatttttgaccgttgcacttgaattcatgcaccagcatgtggacccacctaatctatctgataaagttataattgagtagagcagcaaaaactcatacgaattttcaagtctttacacgttacgtggatccaaggcaatttgtagatcgagacggagccgtaattatcgaggactcatataaacaatattattaacgtataacgtagtataaaataaaagaaacatctccattatatgggttactcactcatgtaccttcacctaatccttctgacctatccccacgttaacgtttcattttggaatcagatgccacccacaactaatctctctttccatgtttgatatgaatcgtatttatcctctgtcgatagctccaatttgactaagttgtcatatttaaattaattaactagtgtgttaattagctgccaagattgattaacatataaaatctttgggtgaagataaggaatcaacctcaccctcccacccactacacatatgaacagaaaacaagtgaaatcgataggtctttctcttttctcaatataaatatggatattaattatacaataaccataatggaaattaaaaaaaaaaggaaatgtgagaccatgagaagacgtgaattcactgtcaacttttaagagaatgcatgaaaatgtgtagagagaaaaaaggggtcggcaaaagaaaatgaatggctcttcctctccaattccattacaccacatttctccgtggatttatgtcaatatctttgaaaattttgtgtgttttgagtatagatgtgatataacaaaagaaaatgtcagaattgtaatgaacagaaaaataaatggtacccgaaaaaccaagaaaaaaaattaataagaaaaatgttgacaggaaggtagatgtgcggttgtattatttgcaatgtccctctcttgctctataattacacaaacttgtccaattcatcacacttccccaaccaaacttgtttgcttcatataaattattttataaaaagtatataatgtatgcaggcagagacatgtgtgtgtctgtgtaggctactagctacctctctttttcataaattatatcgattgattccgtgggattatgacctatgtgagactgtgacatttgaggtttttttggccctctgtgttatgtactcatcatagaatgcgacatttttttatttatatatatatgattaatgatcaatgccaatttgggaactctagtaagtatgcttttagtggtccacccccatttctagtcttatcttttcgataatttcgtttctcatttattccattctcaacaatcttgcctgataataccaaccaatcaagtcagctccattttttaaaaatcttagaataaaatctaaacaacaacacacagtgatagagaacattcggctatggaattagaagttgcctgcatgtttattatctgtctatctgatatggatccttgaaacaggcccatttcgagatattagaggcccaaaacgaaaataagaaataagcccatgatacgatgtgtgtaattaattaacacaaaattgaatatcattaagttaatacttttatcagaacaaaggcgaagggttttagatatcttatccgcttgacgagtagagttttcgaaaccagcgagattaatggcatcttccaccggtctcaccgtcgccggagctctgcttgccggagattttcgattaccagctgtatcgtctctaatacccagaaagacttcttcttcattgtcatgccttagcaacagagatttatcgtctccttataattgctgttggcgactatccagaggcaaaattttgacttctctcagtaactcacggaaatttgctgtgggaaaggaagcagaagatgggtttctatcggtacgatcaaactcttaccgtttcgattttgccttgcaatttctacagtaattgtatttgttctaggaagtaatttggtgcgaattacctgattaagtaatgcttaagaaagattagaactttagaagtgctgagtatagttggtttgacaatgcgttgtgcagaatgtgagcgaagatactgatgagatgttcgacgacttgttcaacaaatatgggaaggttgtttttagaagcactgatgttaagtctccaacagctgaggttgacgatgatgcagagagtttagcatgtaagccaaagccttatattcatttgcagtatatatttcttgacctatttggctttagcaatggtattgatgttgttattcacatttgttgcagttgctgttgaattggctaaagttgcgagtgatgtgaaagctggagatattaaggtcctctttgtcaagcctcttgtttactggactcggtttttcatcattgccactgcgttttcccgccctcaaattgatgcaatagggtacagatttatttagacttgctcatatattccactttggaaaacatcaaatttactttctcttcatgaactgcgaatgcagatccaggatgagagacctggctgagaagaagtacggaaaagttgctaatggagatgtaaagccaaattcgtggacgttgttagattttggtgagtttcttcttgcgttgttggcatgcctctagttcaatgtgtcatgtgagggtaaaataatgacagttttatgttgattgatatacttttaggtgatgtggtgatccatttattcttacctccgcaaaggacattctataacttggaagacttttacgggaatgctatgcaaattgaacttccctttgaggatcagtcacaaccacggaactgatatgatgagacagtttgttccaaaaaaacaaaaagtaacagtttggaagaagaaagtctgttgattctcttcactggctagagtcatgccacatgaaggctgtagatttttttgtttgtttgtccaggcaatgcctgattggttacactacacagctcttggcgtgaggggttgatgggccaacaatatcaggagatctcagacatgtttctagattgtttgttgggtagagttagacccaaactgtgttccggctttatgtaatgtatgctttaggatgattcttcatgttatggaacacacactgaccaagactctaatctaatttgctttcaacagcaacaaaattcatgcaccaaaagaactcaaatcttattcatcaaaatcactgactggccatatgagatggtttttgtgcatagatgagaatcctggaacatgctatacttgtatattatacaaaggcacaatgtacaatgagtcagataataagagtcactcatacagctctatcttgtctccctgttccatagatcatacacagcatgtgcaaccactgacactgaaacctgactaagagtcaaggcaaccaagagaccaaaactggaagactcattttcgcatctcctgcaatcaaagaaatgaactggtaacctcgggatcaagtctcagcgaaaggaaaaggagtgttattgggtgaagaatggttacagttagtcacatgttggtttccctgagcggtttcagacagactgaactccatgtcatgtgtttcagaccatccaggctcatatgtctcaaggaaaccgattttcgctttattgggtaggtcgtgaggatgaacaaatggaactccgtgcggccacccgatctcccttcttatattagcacaagggctgttcattacattgtggttattctcgcactccttgagattgcagaatcttagtttgattccttttttatctgcaatctcctgaactcgttccttgagaactctctgtgcttctaacctcagccgttttgaaggtggtagtggtttgcatctagaatcactcttcctccgttttttcagctgtttcattgatcctgcaccaaaggaaggatctactgttaatcaaaacttctgagtaagttaacaccacttgaactatgaactccgatattcttcaatctgaatcctttctaaatgctatgaaagaacaaagatggaaattaggcgttaagactgataaaagtaaacttctataccatcctgggattgagggacgatgaagctttgcaaagtctgtctgttaaaaagttcatcatttgagtgagatctctgcatgaagtcatcaacagaaacggggagctgaaactgagcttcaacaccatgacctgctgctctcatctccgagcaactcagattggtcattgattttggcatgagtttgaaggccaaggagaacctcccttctatacttccttgcagactgttcaaatcggttctgtgcactgcgggactcacataccccgctgtagcctggtaaagagctagccccgggtacacaacagcctcttgaggaccaagatccacatcaactaaaatccattgcccatgcatgtccctgatgtgcaaccccgccttatctgatttcacaaatgagatcagactcttgtcaagttggtgatcatggtctgaatacaggataagctgctcgtcttctgttaagctatggtgctgtgctccatgaaaggatggcctagcataacagcaaacagataacacagaagacgatacctcacaatttctcaaagggacattatcaagaatctcagtaaatggacagcttctcaagttcaaatagaaaccaatggcatcaagaactacacgagcagcttttcctagtaaagcaaagatatcaggcaaaccagcaggagggaactccatagaattgcttggctcggtcggagtcaaaccaggtctatactcgtaactctcttgccacgactgaggatctgcatagtagccagaagtcttgcaccattcttgtgaatcatttgtgtggatcatattattagtggctggatatgaatctctctggtgaaaataaagccgagcagaatcaagaccggatctaaggagggctccatcgctagcaggaaactgaatgatggctgcagagtactgtgccagagattgagacaatgtagtcaccgctaacttgtaagaatcagaaggtagaccttcactgggaactaaatcacaaaccttgacacgacccaatgtaggcattccatttcctgccatcatcaaactatacaccaaaatccgaaaaaacacctaaaacaataagcaattggaacacaagcttaaaggttgaacatttttgaagatggaagcgtatctaagcagaagaactcatgtgactcttctgcaaagtctgattgtccaatagacaaattggtaatctctgagggagcgatgtagcatcaacaaggagattcactcaggaaggaaatcttgtaacgcctaactcatatcaatcattttcacagcaaacagagaaattgaagaatttgcatcagacttgcagacaccagaatcagaaccctctttgctgcaagatacccggaaaaaaagacagaaactttcgagcacgagacgataagtaagacagaaaccctagaggcgaatcagcaagaaatgaaagaggaatcaaaattgaccgtcgcctaatagaccaaagaaaggtgtctcctttcggacaagtatgcttcaccagatttaagcgcaggagaatgacaaaagtaaaagcaaaagattaaccaatctctctctgtgggatttgatttgtcaggagagtttaaaaaaaaaaaaatcaaagctttcatgaatctgcgactctgttcttcaatttcaaaaactatatgaagccagtcaagcattattttatttcttacataacaatttttatctcaactttgataacttgtacatttttggacatcaatgatacaatgatgctgagatatgggattggacaaacagaataaacgagaatggtaaccgcatccaactgaggctaaatttggctatgttcaagttcgattgccatgagacaaatccaaaccaaagctctcaatggaagtgttggcaaagagcaagacaaactttcaagttctttagcatttttatctattcggcgggtctcattctttcgttggtcacctgagtgcgtctgcgtttagctccatcgtctcctaaacgtagtccaacacataaatccccatcgcagctaccatttgtaaagccggcaacaagatcctctctagcagtctcaggccaagcagaagcggaacattgaccgctgaaggtgggcatgaactggtgttcgacacttggagcacctccttttgtttctattctctcttcaagatcaatatgttggacctgaagaggtcctaatgatgcctctaacttttcttctgggcttctcttctctttcttgagattcacatacggaggtgatgagtctgcaaccattgagctcatccccgttgttgaggccgctctttgttcttgcactgccgctaaacaagtacaacaacaacaacaacatgtataagtcttgttcttttatatgctcaagtgtctgaacacctaaaggaaaaactgagtgaattattaccttttaacccttcatcggtggtgatgagatcaagctggagatgtgtaagaagccttcccagatctacaccagtggtccagctctctggacactcccctaccttcagtttcagcctcccgcggcttccagtgcctccccatatgatcccaatgggtcttgccttctcctctcctttcatcactatgaggcttccgctgtctccctcaagatcaaacggactgcgatggttctccccgacaacaagaaaatcagtgaggaagcagactcctctctcgtcattgtactccagtgcataagccagcacagttcctgtagtcaagccagagcttctcccgactttcaccacctgtttacccactaaactaccaactggagactgcagctctatggctttgacctctccaatctctcctactccacctttgacagacgttgtgactcgtgacaggtcatagtcgtctgcaaaggggatgaatgcaccgtctgctctcacaaacgtctctgcagaatacgttaaagttattgcggagttccttcctctctaatggtaaaactaaaaaacctatgatgtttccaaacctggattggtgccagcaaaaatgccaaaccagagatcgtctgtgatgaaggaagtggctctctcaactgctccaaggtagacaccaggaccaagggcaggagggagaggatgaaacatcttctggctagggtaatctaagttaacagcaacatggcggttagtcacaaacccaacttgtctacctccagtctgactcctaactattgcccccaaagtcccacaagtctcttggcttgccacctgattgaagttagcagcaagacaacacaagattatcgactttgcgactatttccataacaccagattacaatgagtgattatacctgagagcctgatccaatgaaaggatctgacccttggagatgatcaacaatatcagtagtgaatgtttgtttaggtgtgggctgatgatcaggttctccaaaatacgaaaactccaccacatccacatcacaccaaatccctcctgctccctgattcaaccaccaaatcaacacattcaccaattacacacaacttcgattccaatcccatcaaacttttaagttcaatatacctcaagagcagtaggaagacactgaagaggacttagccattgcttatgcactttccgagacacaaacacaataatcgctgggatatcagtaagaacccctctccgaatcctgaaccctatagctgttccaagactataacaccgcaacatcttgctgtggaaggctcttatggtcatgagctcaagtaaagtagtggctcgttgccctttaggctctgtggagactggttcaggagaaacctcatcatcatcatcctcctctttctgcaagtttgagaaatagttagctctttcctccgcggcgttgcttagcctgcttgaagtcggccacgagaagtaagacgccgccgtgaactcgcagtgttgacccgttgacccatactgaggcattattacgccagagtaatcacaaaatcacgccttttgttttcagcttattgggtaatcacatctacacaagtaatcagagaaactaagcaagagtaattcgaaaatttgatccgagagacgaacactaacttagagtgccacatactgaccgaagaaaagatgttccttgaattctcacgatcaatacccaaaacttgaattcgaaggatgtaatatctctgcaactgtggaaatcgtagttggagcagtaaaggagctgcagccattagccctgttagttcaatggcgcatgtaagagtaaagtttagacctttttcatttttttaagcttggataatcaaattttatattttatggataaagtttgcaactttttgtaggaactaaagcgcttttggttgcaatttaattatgggtcagtggttttatgtcagaaacctattttctggttctgattgagatcttgttgatggcaactttgtgttttagttgatttctccaggctttggacttcatttaggcccaatatatagtagccttgtttattgatcgtttgatttctttgcgcttctataacatttgagtacccgccacaagatagataacaaatcatttcaatatgtcataatttggaagaaaaacgtgtaaacaaccattgaaattgaataaacacactttggtgagatgtcttgttattcaccaacagaactcactaacctgtcgcctgtcggtagactgagtattatacattttaggggaatagacaagtttaatacgaaaaacgattagcaagtaaaacttgtaatcgagaaagaaagaaaaaaaagaagtgaaacctaatcaaggggagagatagagatgagcaaagtcatctagagactctaatatgtgaacttcgtcaccgtattcgagcatccacagaagatggtcaaacaaaacaacctcacatttcaccgtaattatacaacttccatcttcattatcgtcttcttcgtatctctgttgcttctctacaagagcgttaagcagagggtgcttcaagtgtttcttactgatcaagtaaggtttcttcgtacgtccaaccaacactgtctggtacatagacggtgtaggactctggtcaacgtcttggagatggtcttgtggatctctcctggccgatttggatctgagacttgtgtaagaatatgaacgacctaattgtgtggacacgctcttgcatctcctgagcatcatcatcaacctcatcttctttatcattgaagctctctctctctctctctctctctctatctctctcttttattttgctgtctcaagaagatacttgaaacacactcagaaagatagaaagggagttatataaagagcgagaaggtaggtgctacgtctctcaattcttaaccatttaatttataattaggttttcaagtaatgtactcacttgattcataaacttccacattacttttcctttaggcagatccccaaatatatcaattattatctcagaacttttcatcttatccaccaaagtatatttacttgcatacaaagaaaattaaatgcttgtgttggcattgcaacttaagagagaacgtgtcaagaaaagagaaacgaagaagcagagagaagccagcacgaaagtcccggaaagggacacgtcgaacctgtctctccttatatacgacgtctaatgtcaactcgtgatctcttaaacccttaaaatggcgaagaacaaggacgacataaagtatgcaacggctcaagcgaagctatcggaagacgaagcaattcgtgtaagctacaaacacgggacaccattagagggaggcaagatcgcagagtcggagcctgtagagctgttctcgagtgctcaacgtatcgagaagggaaaagagcagtcagcagcatccggcgatcaaacacagatacaacgtgacatcaaagatatcaagggaacacgtacagacgatagtccccgctgatagaatcagttacttgggtatagcgtttgcttagttcaataaatgtagacaactgttgctgtctaaataaaacgaactggagcatgatgttctaagagctaacgctaacttctaacttcaatctctaaccttgaataaatacagcatatagatagattaactgttaaaagattcaaaaaccaaatctctgttttgccagaactgcatctagtggatataggagtgaaccaaattcaaaatatagactgagatgattgttcaagactaaaatgcaaaaaacacaaaaggttcaaaactgattcaagaagctgcttaaaaatcaagaaactagaaaggtattacataagatagaaattttgagacacgtcctatggaatggactacttggatcgctgtctcatctttcggcgcttcctctttagtctcctcatacgcttcttcttccactgtcaataaaaatgtttcaatcaaaatccatgacattatcaggaattggaatttaagatctcctaccaacttctatgaatagtatacaatgaagtgaaatttaccaatcattttacacctaattttgaatctaacaagcaatactcagtaatcatttcaataacgtttcaaggtagatttgttccctatatgtaaaagaatcaatcaattcaacaaagagtaaaattgacaaggaaaactatagagccgcgtaaactaagaacaatctgtgacgaatccaagtatctaaacaatatatcatagagaaacaaaagcagattacagaggaaatgaacaaaccttggctctcatggtgcaatcgccgcttcgttcgccgttctctccacttacggacgagagagtctccagaatatatagctagggttttcagttttcctctctaaaatctgataaggccctgatattttaacgggcctaaaaatttaaggcccatataatgatttaaggattacgtaataaagattaagagaagtaacccataaaagaggaataaatgctagagattagagaaggagaagaaagaaagtacatagatgtggtacacagcgagattgtgagaagaagacaagaaaaacaagtgctgcttcgtcttcttacccatcatcaacacatacttccagttttgactttaacagtgaatattactcatttacatcctcattattgcccattgcaaatcacatatacatatactgatatactacttgtcttctttttgttttcttttgtaattttgctgctctctgtgctctttttattgtaaagtaatagtactattaaatatgtcgcatttggttcactgtaacaaacacctaagaacccagctcaagctgccctctctttttctgcagccaatatatgtatgtccccttgttccattcacattcacattcactaaatgccaatgcaagagagaagagagagatgatgttccatgctcatgacaaaacttatcatatagtataatatcggtcaaaagagaggggctaccaccaacctgatttaatgcatgccatggaattattactatctttctgcattagatattacatagcatcctagctgtggatctttatcatcactctcacacttgtatataacaattgttgcccaattaggataaggacctgcattgtttcaattcatatagagtgggtggtgttgtcacgagcattattaatgtataacgtaatttcccccaatctcataaaacgactaaaagaacaagaattgaaaccacatattattattagtgtttcatattcaacgcgaaaatgatgtccacttcccatcatagttcttacgtacttttctctcgctttcatgctctctccaataacgagaaacatcaaagtctaaatatatatagagaacgaatcctaaaacaaacatatatatatgccttattaagtgccaaaatattgattagcatattgttcgattgtacactttaatctcacaacaatcctatagtttaggtttcatgcatgattgaacatgtaacatgttaataagtctagctagcagaaacaaaaagacgtttcttacctaggtttatagtttttctaaataattagattatctatggattatggtatttgtctttgtcctaactctaacatgttaatgtccattttgacgtactaaactcggtatctattaggcatagtatctatttctaactaatttctcctttcttgtcggccttttctacttaggccatttgtcgtggctcgttactccgatataaacaataaatatataaatgcgcaaatatgtaataaaaagagcaaagagacatatgaatgaaagcatcaaataagagattgcgaatctatcagagggcacaagactgggatgtatcacgttctctccttcatcttccccaccttactcttacttttctgtccttattattacttttgtttcgtaaaaaaaaaaacaaattatttattgttcaaaaagttttctagcatttgttttccacatttgtcttaggattcaaatgaatccgcgagtatgtttgtctagctatctgatttaaaatcgatatgtactgctagaatgtcttattcgagtaagccgaaattttaccaccggactggatgctacattgaccaatgaccaatatgaattaggtttagttacaccacatatagaaaaaacatttccatacttctgtcgaattttgaggcttacatacataaatgttttaattatatacataattcatagaattagccaattcaattattttacaccattggaattgaaggagactcgtgagaacatcccttgaaattgtggtaatatgtggttgaaaaacaaaaatgtagtaatcagtgtttaactgtactgtttttatatgttgtagtgttgtacgttccaaatccaaataattggcaagaggacgatgggtccccataaattcaagaccggtcaaaaagaccattgcagatttttgttttcggactctgttttgttatatggcatattgaaattaaatccaaacactttagtaaataatacatcaaatacatgcatacactaatatactttgtgtaatacttctttaggttcattatcttaccgtagtgtactttgtgtaaatgaatatatttctgtgaaatgaatatactatattatcttcttaggagtatcattaatccaaaacttctcttagtccaagacgattcctaagaacctgtattaaaactatatattatttttctatgtttacaatattggttaaaactttgaaacaaaatctttcaaaagacatttctacatgttgagtatttcacactactagactttttatatgctagtttagtttgtcacctactaataacaaaatttgacataaatttatattaaccttctgatacttcaaacaatagttttatatggttgcatcgaaatcatttttttcctgctataaactaattacgaactgttggaaaaaatggtataaattattatccgcccccaaaacaaaagggtctaattcacaaggaagttaatccgttccttctatacgtgcaaccattcaaaacgattgataaacaagaacttctagcgtcacattaaaacccaaaaataaaaaatcgtgaacttgtagccttgttcttttctgtgatgtgtgtatgtacttatattattgtggtcactaaattgaggtgaggacgaaggaaacatccaacggatgggattgaaaatacagtgttcgagaacgaccagcaacttttatttgtgatgtgtactatatatatttgaaaaaagataaaattattggagccaaaacttcatttactcgaaaaaattgcagctcatatgactgacatctttcttcacgctttgaccatcccccattttacctttcagtttcttgtttttcgtttcgttaatcttatgtccctcagtttcaaagctgcttgaagttacatatccacgagtatataaatatcttttcaccggagatcaacatgtagtagttaatcttaatctaggccaacatggtaaagctgtctcttcatcatcaaataattacactaagttgacactgattaaaataaagaaccacagtgcagtagatgaactaagccgatacggagaggatttgcattttggatttgtctctaacatgcaaaatcataccttaatatttttatttgtgtagaaaactatataataaaagaggaacaaaagctgtcgctccctaaagtcactgtgctaatgagtcaaaacttgtttatattatcaaagcatgtggtttaatatctctggaatcgatctctgaacatgggaagcacttctcactctcgctacagttattattaatgactgacttgttatcgaacaacccgctctacgaagaaataacctcaacgaaaatcaaaattatttacattctggacccaaatctaatcttatctaacgaaacaaccccaataaaactaaaagtgaaacatttaccacctaataaagtcggtacaattagaatccggttcggtacttagagttcgcttgtcggttcaagtctgcttcgattggtacggttcttgatgttattgctctgcaactgtgctctgtttccagacgacgaagacgatgaagctgaagaagaagaagcgaaaagctggccaaaaaagaggcctgatttgggcccgctacggagagaagagacaggaacattgagaacaggagtgattctgacattagctgagtgagatctcggcattccatggtgaagcttcattcttggtcctccagtgaagttaccgggactgcttgagcttctctcgagtccatgaaacacgatcttccccgaagcattgagtctcggactatccgccgtcaccgtcattactctcgactcaatactactctctgttgattcatcaacctgtgtgtgacgtcgtggctttcttggttggttttggttacgcaagtggtggtggtggtgggcacgtgaccgagcgaacgggtttggtgttccgggtttgttgtcgagatctaaagatagtcttggaaggtcgtctagctcgtgaccggaggaagaagacgacgaaagagagagacgtgaagaggagatagacgttgacgatgactccaagatatctgagtcttttcccggcggcggatgagacggttgttgagcggtagatttagaactccggttgagaaaatgtctaaacgatgccgttttggggtttggagaagaagaagacaaacgcgacgaggacgacgctgacgcttcttgttgcgttttggcgagtctcttaagacctaaaagctcacgccatctcacggtgcaacgaggagctctcggagagaagagataaggatcgacgacgccggagatctccatttccaatcttcggcatggtttcaccgccgtatgaaccaccgacgttataggcttctcttccggataagttacgccagaaaacttaagcgggacaagctttccgtcggagaaaagctcgtcggcggatagcattgtgacgggatcttcgagtagaaactcaaagtcgtcaacaggatcttcgttttctaacgctggggccaacggttgagattcacgggtcaatgacattttggagctcgtccatgagtgactcggcgaggtaccaacatttttaacgcaacccgacgccatttccgtcgatatcgagagatagagacagagagagaagagagagtgttttttttttggcggtctctttagggtttggagagaagtggcaatgagagagacaagcaatttatacagctcagctttgattctctcatctaaagcagacacgtgttttttacttgatccactcgcttcgggtcgggttctattcaaaataactaaatcgatttgataatttcatccctaacacagaaataagaattgaatgtttgatattcgtaaaattgttgaccatttttatatgaaatatattagattgcattcctcatatgaaaatatattttactaaatcgagtctgtttgtttttatggtcaccaaacaaataagactcgaatcagatcattcacaagtggtacacggctgttgaaatctgttacatctggtaagtaatttttgtatttaagaaaatataaacggaaattatcttaactttaaaacccatttcacacattcgttgattatttgtatcatttgacgtaacattacgaggactaaatgtccaatctaatatactttggaatttccaatgtaaaaggttttaatatctgtatatataatattgcaacattttgtatggcttgtacctcacactcacattctccaaagatttatgttacatcaaatcgaatacaaatagacaaattcatctcaaagtacattaaacaaaatgaaagattttttgttttttgtcttcctcaaaaataaaaaggtagcatttaggcaagtcaaaaataagtttttgtctcccataattaagttggtacgatcatggcttctatagatttaccgattcacctcaacttaatacagacgacagcaccaggggtaactctatgtcataaattatggcccataacgaaacgtaacttgagtcttaaaactataaatggtccgacttgttattacttctctgtacttttgcttgttcagacaaatactatttactgttttgtggcaacacaaataattttcgtgtagcttctaaatacttaatgttcagattacttacactgcttctcctttattttcaaacagacaaaaaaaaaacaagaagtctcagccgaatcaagacctataaatttattttggcatttaaaagaaatagtggttcgaaaataaaaatgttataattacatggaggattacatatattgaagttgactttatggtttgctgattatttataccaccgttcttctgtcctctcgttcacaaaactcccgatattcttctccatccctctctcccctctttacatagtacttacatcaacgtatcatcaacaacaagtaaacgaatcttcagatattaatagaaatggaggagacagaaaagaataagggcagcataagtatggttgaggctaatctacctcctggttttagattccatcctagagacgacgagctcgtctgtgactacttaatgagaagaaccgttcgcagcctctatcaaccagttgtcttgatcgacgtcgatcttaacaaatgcgagccttgggacattcctcgtaagtaattctgtgtttacacaacatctcgcaactctatatcatatagtttaaaccattccatcggtagctattaaatccataattcttgtttccaacatgatctggttattgtttcttctacaattcgagtatatgtggtgtttagaaaaaaaaaaaaaaaaaagttcaacttgcaagccacctgcaaattagtattttgttccttactaatttctcgtgaaaagaccatttagctgcacaattataaatgcttagttcacattcattagacgcatatagtttattaatttagaatgaaaacgataccgtccgtttacataataaaagaacaaatcatcctaatcttgcagacgtgttggatgcctattcgatgactggttggttaagatatgaatatatgatacggatagaaaccatttggatattattgaatatgtcattaagatgaagactatttctgaaaagagaattctgtttatatatcttaatcttatcataaagtttctaaaatatgttggagaaaataccccctcccttaatagaaaactaaaatccattaatgtatgttagtatgtactatgtaatatacaaagaaaaacattcaacgcccaacttcttatcaatagttaagtttgatagtatataaaaaggtcattttcagaaacggcgagagtgggagggaaagaatggtacttttacagccaaaaagaccgtaaatacgcaacaggctacagaacaaaccgggctacggccaccggttattggaaagccaccgggaaagatagagcaatccaaagaaacggtggtcttgtgggtatgagaaagacacttgtgttttaccgaggtcgatcccctaaaggtcgtaaaactgattgggtcatgcatgagtttcgtctccaaggaaaacttcttcaccactcccctaattctctcgaggtattactcgtaaaaccgattgggtcatgcattaattagtccctctctttagtccattttttcctgcaaaataaatgtctctttgaaatgtaaatatagtcgaaattcaaaagtcaacttttctaaaatactccacaatagaacaactgatttatttttatgtcgcataaaaaaactaaagcaacatttagtattacattatatatcggctcattagttctactctttcgtaaatagctactatgtgcttttgaatgtaaatactaaatatcaaatgacgcatgaatgaagcaaacagccagagatgtcgcaatcatattatcccatgacttaaggcaaaagttttgactttatctttctttcacattcaacctaaatgttaaatgtctttaagggattttgctgacgattttgcaaagatttatttgtggctgatttaagatgatctatgacttggcgcacatatctactcttaaccataattttgacaaaattagttttgctgggacaaattaatgaaaacaggaagagtgggtattgtgtagagttttccacaagaacagcaacggagctgatatagacgacatcacaaggagctgctctgatgcaacagcttctgcattcatggactcttacatcaacttcgaccatcatcacatcatcaatcagcatgtaccctgcttctccaataatttgtcacataaccaaaccaaccaatccggtttaatctccaagaactccagcccattgtttaatgcttcccctgatcaaatgattctcagaactttgctaagtcaactcacaaaaaaagtcgaagaatcacagagtcgtggagacggaagctcagagagccaattgaccgacattggcatcccaagccatgcatggaattactgattatgaataaggcttaccagatatatcactatgtataagtatcatattcatgattcgaaacaatttattcaaccctcttatgtaaactgttataccattatattagcaatccaatcatatatagttgctaaaaaagcaaaaaatcattaaatttctgttatataatattttatttacgttatataatatgaaacggtaggtcgtctcgtcccataaacaaataatccaaagttacttaatcattatgaaaatagaagaggaaaaaatcttgaaaatttcccttcaatgggaaagtaacgcattaccataataagtaatttccacttggcttttcgacttttcatgtgattgactttgtggaagagagagaaaacaaaaaaagtaaaagcttcttcggtctggatatttatttgattgggtaaaaccgtaaaagtgccactggtgttgtgttctgtccgttggattttaatatttccgtttttcttttcttactggaatctattagtaatatatattttgccataattcataggtcggtaaaaaaaataaagatcggcgtatcgtaccaaaaaaggatattttgtttaacccggtcattatcctacgcgcaccgacctttctcattctccgtcgtcgtccttcttttgtctttcgccgtttctttccttattcggcatcgatttttccggctttgatctccttctccgtcgtgttattgcgaattgcccttttcggattgaaatcgttgttttcccccaaatttcaggtttagttttttttttttttcaattgtattggtctattcattctgagctagggtttgtgttgaaatcacaatttttccccaatttgatttaattggatggtttcgcgaatccgggcaatgtaatttaatttataacttggtgtaattcacgagttgtgtgtattttgttccgtatttctgtttattactgcgaactcaaatctctttttgtttttttttgttttaattgtagactccagcttattgtggtggtgatgatcgttctttggcaagtgtttgaatcatattgagaatggctcaggggcagaataggactgttcttcagtcaggacagatgcataattctgttgtagcttctgcttctagtgtttcttctcagcctaatatggtcaatggcatatctcaggacactctcttattacgccaggagatgctcaacagaacgtaagactgtttttctgttttcattctacttgcttatgctgtgtctgtcttgagtcttacttgttgtatattccattgtgtatgtggttgttttattactagtttacatgtaccactcacattagtagtgtactttctcttttactggctcgaataattattgacccatctcatattctagttgtttaatttctcctctcattgacaatctcttggattcctgatttcctggggtttcgtttgtagacaagtcttatggtctttacttttaagggaatttctgatgcaactgcttgtacagtactcttatttatttcattgtttttgttttgtaaagtttatgtaaatggaaaacactcttatttacttgattgttatgcattattcctcattctctccagctacgcttggttacagcagaggcagccttcaaagacagatgatgcctctaaggcaaagttatctgaggttgcaaaacggttagagagtgcaatgtggagaacggctacgtcaaaggttcctcccgttttgatcttctcattgctactgtttgttatatatatattcctagctaagtactacttgggaagctttagtgttgcacaggttgtcattgttcttgatggtaatttcttttggcaggaggattacttagatttccgaagttttgacgttcgcgtagaatctactctcaaacaacttttgagtcagcgccgtgctaatccttcaagctcggtcagtacgatggtccagacacctggggtttcgcatggatggggtcaaagttatacggccacccctatggtggatacgagcaaattcaatagtagtaataacttatcagatgcaacaaccgaaactggaaggctattgccaactaatcgcatgtacagaggtaactatcagtcagatctgatgttagattctattgtataagagtaaaaattctgtcccgattcttttattcatagactatatttcgacaggtacaataaataatggtcgccaggaattatctgcggttggccagatgattcctactcctggatttgacaatagtgctaatgctgatgtttatcagtctcatcgaaatgaagaatattctggagatggtggcaagcttctggctaccgggtctgactttggaaatccatctcagctgcagaagcaacgtcctactggttcaaatgaccttatgggttacaaccttgatcaccagttgggaggtggtttcaggtcaaatattcaccagaatacatctgggatgaccagtattccgctaaatgctggtgtagggatgagcgggaacaatgtacaccttgctaatgtgcccaggagttctgaaggggtcctcagttctacgcatttttcaactttttcccaaccttcgcagcagcctgtcgagcagttgcaggtgtcacatgtgaacagtaaatctctctaatttttccttttatctaatgctatttaaatatcaatgctctcttgatcgtctctcttcgcgttatccttctgacgaatatgtaagtcatagtggtatgctgattggaaatttttttcatcatttgaaggatactcaatgagtaactctggtacttttgtgtctgggaatctctatggagttcaaacatcatctggctcaatagaaactgctgtggatatgaattctatgagcctgaattctatgcggagagttgatacttcattcggtagtcagtcaggcctgcaaaacaatccattgctaaaacctcatctacgtcatcagttcgagaatgggaatttccaatcttcttccaattccaaagaaaacttggctcaggtgagtcatcgaccattagaacgtcaattcaaccaacaagctcattatggtcaataccaccagcaagagctcttaatgaacaatgatgcctatcgtcaatctcagccagcttcaaatttagttagtcaagttaagaatgaacctcgcgttgaatactacaatgaagcttttcagatgcaggctataaataaagtagaaccatccaaaccgcaaaaccaatacaagcagaacactgtgaaagacgagtatgttggtgctcagagtgcaccggtttctagtagccagctaaagatgtctccatcttttccaccacaaactcatcagacacagcaggtgtcacaatggaaagattcgagcagcctctcagctggagtgcagccagtatcaggtctgggtcagtggcattcatcttcgcagaacttgacaccaatatcaaaaaattctaatgaagagagagaacattttggggtaagatttcataagcagcatgaaggtactaataatagttcgtctgtaagagagtctacaaactgccttactgttgctcctagtggcaccttggatgttcctcatctcccagtaggaatcaacgtcttgagtaaacagctgaatggagattgtggtctaagttacaaaaatcagaggcggtggcttttgttcctgctacatgtacgaaaatgcaatgctgcagaagataactgcgaaagtaagtattgttttactgccaaaacgctattgaaacatatcaattgctgcaaggctcctgcttgcgcatatcaatattgtcatcaaacccgacaattgattcatcattacaagcactgcggcgatgaagcatgcccagtctgtgtttttgtcaaaaacttcaaggagaaacaaaaagaaaaatttaccttcctccaaagagctgagcctagctcagctagtttaaaccatggacccaaggaatcctttgagtctatgcgtacttctagtgaaagagactctgaagctccatttgttgttgatgatttgcaaccttctccaaagcgccagaaagtagagaaaccctcccaatttgcttatcctgacacacagggaaacccagcgacaatatctgctggtgtcagccaagctcatttttctatgggtttgcaagagaaagataggctaccaagtgatgtttgcaaacctgtcagatcaaatgtgccgatgaatgcagatagttctgattcttcaaggaggcttgttccagtttcccgtgagctggagaagcctgtttgcaaagatactcacatggggagacatggtgtaaaatctgcattagatggtgaaagtcttcgtttatcaaagcaagaaaaaccaaagcgtatgaatgaaataagcgcacccaaagaagagaatgcggaacaatctttgggcgttgtatctgcgtctaattgcggaaagtcaaagatcaaaggcgtctcactgattgagctgttcactccagagcaagtagaggagcatatccgcggtcttcgtcagtgggtaggccaggtaagctaacgaagttttagatgcaaatcttgtttaagatgaaagtttgggcttaacctagaacgattttcagtttatcctggcagtttctttttactttatgtaggtctatttggtgttgtttgaatctttctatctctttctgcatatcttttcgttaatgaaaattcttgagttgcacatgtccgttaacagttgataatggttgttattctttctttgtaattttatttcagagtaaaaccaaggcagaaaaaaataaagcaatgggactctccatgtctgagaactcttgccagttatgtgctgttgagaggcttgcatttgagccaacacctatttactgcacaccttgtggggcacgtgtcaagagaaacgctatgcactatacggtagtggctggggagtcacggcattatgtctgcattccttgttacaacgaagcgcgtgcaaacactgtttctgttgatggaactcctgtaccgaagtcaaggtttgagaaaaagaaaaatgatgaagaggttgaagaatcggtatgcctcttcagttactgagttctgcaattgttttatagggattattttatattagctgctttactctttttctgaaccattaattctgtgcagtgggtgcaatgtgataaatgtcaagcatggcagcatcaaatttgtgctttgttcaacggccgtaggaatcatgggcaagccgagtacacttgccctaattgctatatacaagaagtggaacaaggagaaaggaagccggtatcacaaaatgttattttgggggcaaaaagtttgccagccagtactcttagcaaccatttagaacagcggttgttcaagaaactgaagcaggaaagacaagagagggctagacttcaaggaaaaagctatgaggaggtgattattaacttttccgataaatcttgggcttatttcccactgtatatctttgtcttgaccgctggctgtgtttttttttccacatttaaccatattttgttgatttattggtgagagttatgaagtttacacactggagatggtataaagaaggatacaaaactagtttatggctgctaatgttagaaaattcacttacatgcttgatacctagtttcttataatgctctttccattaataaagttagggctaagaagatacgatcaaatttcttctttgttgatatatcaggtcccgggagccgactcgcttgtaatcagagttgtagcatctgtcgacaaaatattagaagtaaagccacgtttccttgacattttccgtgaagataattattcatcagaattcccttataagtctaaggtacagattgtgtatgcttggttcttatttcttttccttctttttgttttctaattatgaccttctgctacatgatgcctgttgactatcaacttccatactcattttttttcaggccattctgttgtttcagaagattgaaggtgttgaagtatgcttatttggcatgtatgtccaggaatttggaacagattctgcgtctcccaatcagcgccgggtttacctttcctatctggactcagttaagtacttcagacctgacgttagaacagtatctggagaggccctccgtacgttcgtataccatgaaattctggtaagccgcatttcttctgatcctagttgctttcaggcacctgtgttgcttcacaagtcttatcaacaatgggcttttcggattgcagattggttaccttgactactgtaagaaacgtggattttcaagctgctatatatgggcatgcccccctcttaagggtgaagattatattttatattgccatcctgaaattcagaaaacgccaaagactgataaactaagggaatggtatggaatatatactttcctgtaatacttgtttttcacgtgtaagagagaatattgcatataatgatgcataatactccttccttttcaggtatctagcaatgctaaagaaagcttccaaggaaaaggtggtcgttgagtgtacaaacttctatgatcactttttcgtccagtctggtgaatgtagagctaaggtaacagcagcaaggttaccatattttgatggcgactactggccaggtgctgctgaggatttaatagatcaaatgagccaagaggaggatggcaaaaagtcaaatagaaaactaatgcccaaaaaggtcatatcgaaaagggctctaaaagcagtaggtcagttggacctttctgttaatgcctcgaaggatctcctgctaatgcataaagtaacttctttacctttaagttttccctttattcgttaactttgtttcactgatactcttacctaatcttcatgcctttgttgaagaaagtgatattatcaaccccctaacttttgattgttactctgtagctgggtgagatcatcctcccaatgaaggaagatttcatcatggttcatttgcaacattgttgtaagcattgttgtactctcatggtatctggaaatcgttgggtgtgtaaccagtgtaagaattttcagatttgtgacaagtaagttttacttatcggctcgctttgtttatttgatacttgtatagtttaattaaatcaactatattgggatgcgatataaattcagaatttcccatagactgttaaaatatccagcaaacagatttttcttcacttaactaaatagcagtattctagtacgtttgcgggagggactgtctagttttcaaatgggagctagacaatgttagcttttaagcacttggtgtattctgattttttttttaggttagattgacaggtgtgcctgtgaagtatatatacattttttggctgtatctctcaagcttttcgtttaccacaggtgtcatgaagtggaagagaaccgtgtggaaaaggaaaagcatcccgtcaatcagaaggagaagcatgtattatatcctgtaagtttctaccgcgatagggctctaaagttttttgttttccctccttgttgggttggaaaatgacaaggttttggtctctgcaggttgccattgacaacattcctactgaaattaaggacaatgatgacatcctcgagagcgagttctttgatactaggcaagctttcctgagtctttgccaaggtaatcactatcagtacgacacactaagacgggcaaaacattcttccatgatgattctctatcatcttcacaacccaaccgtccctgcatttgcaatggcatgcgccatctgccagcaagaacttgaaactgctcaaggttggcgttgcgaagtttgccctgactatgatgtttgcaatgcttgctactcaaaaggcatcaaccatccacatagcatcattagccgtccatctgcgacagattctgttgtacagaacacacaaactaatcaaattcagaatgcccaggtattccttttctttcaattttttagctttgatcatagaattgatgtccatatgcatacataattattcacttgtcaaagctggaaagatagataggctcaactccttttaggatttttaccaaaattcctttcaaatattgtgtagctagataagtgtcggttagaaaattgagtttgcatctcttggcttctcttttccttattgctaactacggtttggcttgttggtactgcagttaagagaggtgctgctacacgtaatgacatgctgcactgcacagtgccagtatccaaggtgtcgcgtgattaagggtctcattaggcatggtcttgtctgcaagaccagaggttgcatcgcttgtaagaaaatgtggtccctcttccgattgcactcccgaaactgcagagatccccaatgcaaagtccccaaatgcaggtatgtaatctaactacttataaagcaaattttcaattatcagaatagatttgttcaagaaggtgatgtgtttaataatgatctgacaagtttattttttgcagagagttgagagctcattttagtagaaagcagcaacaggcagattcaagacgcagagcagcggtgatggagatggtgcggcagagagccgctgatacaacggcctccactcctgaatgattaacagacatgttatattctctgtctatggggtcaagggttcgtgcctgaagtaacgatccaaatggcaggcgaatcaagaaagaatgagatatttttggctgattaatttggagattcaagaagctagtttaggagagctcatgggaaaatgagcagatgggtctcttccacaactgctaatttaggttcacaacgaggtacatagatattttttcttacatgtattctaaagtatagacatgtgtataagggaattgtgattttgattcaatttttggtgattctgttcattgaatcctattgaattcgactactgaatttgatcttaatttacttactctttgattccttcgtattgtatatgtggtatttttggcaaagctataagctaataaattcttgattttcaatcattacatatactagactggaaatgcaagtttttactttatattcaactagaatactagagtttatccagttgaacgaaaccaagaccccgaagcattttggagtcattaggcaacgaacccattataatgtatatagaaatgatcttagtacggcgaaagccaatgaaattaacaaaaaatacactgccaaactaaagtagtagaattcacctactagacattccatggtgaaatggatcagacagtttgatgaaactctgggaagcttcataagagcattggtgatcgtcaggaaccttttcttaacatccttgccttcactcaattcgacattaacattgacagtttcaagacgttttaaatttgccaagaaatgcctcattcgtttcagctcttcctcttatccctcttaggggtgcaaacgcaggcgtcaccacgtttgtctgtaacttcatgcacaagaccgtgaaagcaaaaagaacaaggcataagcaaattcatgggaataataactttagcaaagaaacagaagtgcgtggtgatcgaacgaaatagatgataccttgatgacttaagtttctagatttggagagtagttaaggagaagtggctccacttaccagcctctttctttgttacactcaaaagataaagtaacgaggttgggaaacaccgggattgatttacagcacgagtaaaatacctgggatctattgtcacaaccaaaacaaacatatacacaaaatgagactttgctagctagcatgcacttcaaatagaatcaaccaatagaagaagaagacgtagcagagactgacctcaagagaaacagcggacaagtgaagggttttaacattgcttatccctgcaaccagattcgtaacataaccaacaatatcctctgtatcaccatccacataataattaatagtcatctggaagacgctcccatgagtgtagcttctacaagggaacccaaatcaacctcataatcttctgcgggataaccagaatagtcaagatagacaagactgggtgtatcaaacagacgaaaacccttgtgaccgttagggtaacggggccaatgataagagctggtcagtcgtttgataagagaaggactagacacggtccctccatcaaacaaatattattaaaaggaaaaaaaaagagataaatgaaaattggtccataagacaaatactgaaaagacgaggggttaaattgaaataaatccctcctcttctctgttcacaaaatcctcgcgccacaaaaccctagctgaacggaagaaggttagtggtttaatctccctctggggaaagctgcttatgttgattctctaggcttttttatattctgaaagttttgattttttgtatcttgttttgtttctcaatcatcaatttgtggtagtagctcactagcaaacaatggaggggaggttgaataatatgtggaggttgactgtgaatgagagcaaattcgttgaatctgcgttgcaatctgagctcagagtcgatggtcgtggcctttatgattaccgcaagcttactattaagtttggcaagtgagtttttctcctattcattgattatgtttacctttaaagcttcaatttttgttgatgcttttgatctctggttttgcaatgttgttactgatgattaatttaatctgtgtgagttttcgatagggaatatggcagctcacaagttcaactgggtcagactcatgtaatggcttttgtgactgctcagctagtacaaccttacaaagacagacctagtgaaggctccttctctatcttcaccgagttttctccaatggctgatccatcgtttgagccagggcatcctggtgaatctgctgttgagcttggccgtattatagaccgtgctctacggtaaacctctctttttgatttgatgctacaaacaaagttttttgtattgatggtctttgtgttgttggttgcagagaaagccgtgcagtagatacagagtcgctttgtgttctagccggaaagctggtttggtctgttcgcattgatcttcacattttggacaatggagggtaggtcttcttcatgtttatccaaggttcttgttgtgagaatgatcttttatgtgtatattgttactcactctcttacaggaacttggttgatgctgctaatgttgctgccttagccgcactcatgactttcaggagacctgattgcactgtaggaggggacaacagtcaagacgtgatcatacatccacccgaagttagtaattcatattttttttttttcagtttagttgatgaacttaataactagagagaaggaagttctcaacttcaactgttttgtactatatttggtttcttttacaggaaagggaaccacttcctttgataatacatcatctcccaatagccttcacgtttggattttttaataaaggcagtatcttggtaaaaaaattgtgttttgtttattgataatcttgtttactacgtttttgtttgcatctgagattacaagtgtgttgtgttcttatgcaggtgatggacccaacttacgttgaagaagctgttatgtgtgggagaatgactgtgacagtcaatgccaatggcgatatatgcgcaatccaaaaaccaggagaagaaggcgtgaaccagagtgtaatccttcattgcctgcgtcttgcttcttcaagagcttctgcaacaacaaagataattagagatgcagtagggtttcgtaatccggagcgttttcctttttagattgatttctattgatttaaggatttgattttgttgtgctttgttttcatggtgtaggttgaagcatacaaccgtgagaggagctcacagaaggtgaagcggcatcatactttggctaagtctgaagttttgggacctattgtagttgtgtaggaagagacataaataaaacatttgctgtggtcgtcgattgtaaataaagattttagttgtagaaatcttatcagcaacactaagctataaaaacgtcgatatgatcaagacatgttgagacttctcgcacttaaatagatgactagtctcaactcttccatttatgtctttctgaaagaaagttgaaacacaacatattgagacttctcagaattaatatgcatatcctgaataacatgtacactataagccaaaagctatgttggaataatagtagtaaccatgatcatgaaacagcctcctctcactgttcgttcttatgaggtcggttaaagctttttttacaacagaagagagtctttgaactgttattacaacgaggtgttgtcgtcggggagaaacaggtatctgaaacgagaatcgaaggggagtattccgcagttccgtgaagcgagaaggctttgtcttctctgagagatgcattgctccacaaaagcagcttgatgtggaggaaggtaccttgatatccagacccccaagttcgaatcctccaccaaactcttggcataacaatggagcattttgggtagtaagagcttccctttgctgctcagccctaccgatgcttgtatgaagtccctttgtgcttctagcatctcttccttcactcctttcgcagagtagatcctcacctgcaagacctcttcgtgttaagaaaatgactgtttatgacttttggaaacgcagattgttacttagttaagttaccgcaggtgaagagtacattccacagcttagagcaaagccgagaagaggttcatgtgtatcaatgcttgccctgcgctgttcttctgatactttcatcttgtggatggcaagaagcaaagcctgcatcagcaaacagagcaaattgtttaactgactctgaaagaggagaaaagaagagcctcacagaagaagctgggttcaaagctcatacaatttgtggcctgtgcataggcggtttcatcttcagtatcacatattccattgtcgccgcagtatatgagtgccctccaactgtataggctgcctgtggatccagtacaaaaggaatcaaataaggcaacaaagaaatgagaagaacaaaacacaaccttctgtcaagtgatataaccttttgcatcaacgagaaaagcttcaggtcgctttttgggacgccataagccaaataagcctttgttcacataaacaaccataactctcataagctttcgtttcattcagaatagttcttgataagtataggggaaaaaggaacttacatgcattatcaacgcgttataaaggttaatccagaaagcaagcttctcgttgcagcttaaatgaataggatttactctagccaattgctcaaccagtgtcctgttcacagaatcaaccatggttatgtaaactgagtcttactgttcaatcggattgaaacacacaaaaaaggaaactctattacctgaacttcttcaatgccccggaagcatactccagctgtttcttccctacagacatccaagaaacctcggatgccaaactgtagttcccaatctccgcccagcttaacttcccacgaactctataaggatcaaagacatctcctgtggccaaaacattggcgttattttggatatctatttgtgggctttgcacccatgaggagatcattgaccgttctgttgaaggccaccaggatgctgagcttgatagatgcccgcgaggtgatactggtgagaggtggctttcgtttgaggaagcttttgaagttgctgttggatcagcaagagacatgaagatattcttcatacatctcaccatttcttcagataatagattaggttgatcccacaggtacttaggtggcattcctcgaggtagcttcctcgcatttgtctttctcattagcctcttttcaagaaagtcattacttgggtccagtgtttgctggtttggtatacaaaaatgtcagatacatttcttctttcatgtaaactgtatctcttcgtttaaacaaaccatcctaaggcctcagggtacaaaataaagaagaatatcagttaatacctcaacagttgactctgctggagatgattcagatgaagattcttggtaatggactatttggtcttgagatggactgtcttctgctgattgatgtaattcagaatctgactgattcaaatatcttagggaagaagaagaattctgcataactaagacatagttataaactgacacagattacaaaacaaaaatcagtgatgaattaaggagttacatactagtggagaactgacacagattacaaaacaaaaatcagtgatgaattaaggagttacatactagtggagaagccgaatgtgtcaactggtattccgcgagtctcctctcgtttctctcttggctaagttggaaattcagtgacatcatttcttgctcgagcttagtgactgcagtctctagcgtcactatattggagagaagttcctgagcctgcacaattttcagaatcatcagtgaaaacaaaaggcaagttttaaagtgttatcacaattgaatgagttgaggtaacatacaggatgtggaacactagaagaataagatagctcccaaggatctttctccatgacactctctagaaatgtatgcaaatctatttcttgttggagttgcagttgcaatctttttacctgtaacataaaaacttctttcagaactatacagtatacacattccacgttatcattactagtcttattgagttcagaaactcacatcctcttcaagttgaaatctatatggaaaagattcaccactcgtagattcttcgcaagtttctctgccctgtacaaattaagcaagcaagctcttaatgttttttctaggacttcaacagttagtttctgaaatgaaaataaatacaatgtatcttcacacctctgacatggtaactgtgccctgaaatttctttccagaatgcgaacgtctgagaaatgggttgtatctgatcaaaattcagtcaactagtaaggagttgctgaatcaaaatccagaagttgaaaagagaggaagaaatggtaagccttacttagatttcaaaacttgagagtcatacatcttaaagctctggagtttggcagttattaatactataaaaccaaatgatgaacaaatgtacttcagcttcttctctcaagtacaaaaagagttagattacatagtccctgcataaatcatattcacataataaatgagataagataacatttagaggaaaagaccaatgttgttgtctactaagcacaagacactaaacaaatttttgaggttgacaaaggcttttctcagcacatggagtccaagtacaagatgaagaggcaagacaagacactgttacacctgtgaacatctaataaggacaaatctaattataatttacacaaaataagtgcagcaacatgtccttttcaaaaacgaccagacggcaaaaccagtcacatggtcaacatttcacactgaaaggttttgacaggttaatcagttattcgttcgagattaacacaaggaccagcagcttaaacaaatatgcagtctgttaacatgcaattcaagatttgttgaggagtttaaaaaaaattgtgtaatccgaaggtcgaatttctttattttcttgtggtaatttgattgaaagataagatattgagcttgaaatatacataatgataacttccattgaaaagacaagacattaaagaaggaagaagctaaagaccctatccctaaaagacgaacaaatatatctaattggcttcaacaaaagaatataccaaaatcaatggtcaaaaaaagattgacactttcaaaaagattgaccaaaatcaattttctgcaaccaaaattcgaagagaaaagagaagtggggacaaaagcgaacctttttttccaatgactgaaagtgaacattgaagaatccaagagagacagatagagaagaagatctatgtgactcaagaaaccaaaccctagtaggcttcttctgctagattctcccccagaaaaaatatctatctctctgccttactagatagtactactagataagagtacaagagaagaaaacctcttatttattttccaaacttagaaaaagtttctcaatttgaaattcaaaaacttctcaaatatgtgtcagcatttaatgcttaactacaaaaagaagactctattttttcttgttattatgggctatgaaataaaataatgagttagagaattgggcagagtacaagacaaagatactgtggaacagaacagtggagaatctgtaacactagtttcaatttacacgggcacttggattttgacgtctttttctctcaaaaaatgacaaagtaaaaagtgatttaaaaaggagagaagcaaataaaaccaaactcactttaaaaccaaaccttgaagcatcccattatcacatgtttatacaactactaagacatttttttgtcgctttctggtcagagcttagtggactggtgcctgattcctttttctgagttttgttttctttgttgacattttgatattcaatatttccttcaaattttatattcgaaatttgaaaaccaacgagtaaagaatcactttcccagaaaatcatggtgctatatacttttgtgttgaaataattgtgttgcgtcttaaatcttttcactttggaacttatacttcgattctagtagaaactaaatatttatatagttgatcattgttttacctgaacgataccaataatgcattgaaatatcaaaaaatgtgataaataaagatgagacttggatatataaatcacaaaacttgactaaaaaaactgaaatcatttgcaacacaatctcttgggtgttctttgttctaaacgaactcatgtttttgcaaatccttgcaagaatacagaaatatggaacttatttgggtaaaaagtactctgatccaagaattgtctaaagcttgtgatcaatggagtcacatatgcaaaacaaatcttcactgctcttcacttccttaggctttgcagctttgtagttggagattgtaatgtacaacagccaactcttccagatgctttcgttcacagtggctcattccttcagtgagcaacagcttctctgctacgcttctcttcagcttgtaccttgaagcaccttcacttgtttggctcagaatcttaacagcgagattctgcagttcaggatactggttcgccttttgagtccaccaattaactgcaaagagattcaaaaacttaaatgtctgcaaataaaacaatattactatatatatataaaaaatcaagaaagttcactcacctggagagactccattgagctgaccagcttgactggctttcataaagcaacctctaccgtatctatacacatcaagctgtgtaccaatcttcacttgaaggtgaggttcttttaccaagtgaaccagagagaaggcaagaccggtgtatacatgttgataagtatggaaatcatcggagtagtaagccatcggattcagaaaataaccagcagcatgaagaggattgtggttgttgtgccacacgtcatctatcacattccatgtcggctcgtaaaactgtctctcgtacttgaaagtccacgcgacgttcttcttgatgctctctataaaatgataggcatatgcaacatgcttgctgcctcttgaaaaccataaccatccatgaaccagagaagatgtacttcccacaattttgtcaagagattcccaaaatgtggaatcattcacaaaactggatattgctatgccttgttctttcttccattcaggactagcaaacaaccctgccctcctcacccaataaatgtgctctagagttagatacggcataacaaactcacactctgaggatacgtcgactttatgactattctctctgaagacatatagaaaggaggggttgttattgatcagatctagaaggagcttgaccttttcaaatatgtcttcaaaggaatacattttcccaatctccaccagcataagctttaagcaataggaaagactcacagaccagaaaacttgaccagcaagttgcttgcctaaatcaccaacccaaccagaggtggaacatgcaataatctgagtcacgttacgcactccaacttcctcaacgatcccatttaccagcgaagttaaggcagtgacatcggtttttatatcagaaacatcagcggatttcagatacactgccccagctggacagtctgcaacgaaagtaaccagatcacgtcctttcgggccaatccaagcatcaaagaggatgctgcacccagtgatctcccacgaagctttaatctccttcacacgatcttgcaccttcttcaaagcttcttgaaacatccagccgtttaaatcacgagagtcagggatcatctgaccaccaccttctcctcctactgtcttgatcatcatcatctttttgaaacttgtcgaatccacagcagagaagtcgacaccgtgttcataaaagaactgagcaacgtccatttgggctagtttttcagcttccgcagctgtctcagaagcagtaaaacctttgttggatcttccacgtttacgatcaggatatctctgctccataaccatcttaaaaaatgcctctctaataggtaatggaacttgtgagcatggggttacgtccttacagacatttcccaaatgatacttgagacgattaaagtcattcattcgcttgtcgcaaaatgtgcactgaacccgagctccatcctccacccaagttccatagtcatgaacattcaccacgatgctagccattgaaaagattcacttaaatgaacctacagcaaaagagtcaaacgaaatggtagacagacccatatcttaagaattatcgaaattttggtttttaagagaattatcagaaaacaaaaaaaatctaccctaacttcaaacatggctcatattgactatgatgacacagaagatcaaagcaaacaattttcttctagaagaactcacgaaagcaagacaaaaaacaagaacaaactggaacatatgcatgatgagagaataaaaacctgagagtggttgtgtcagagggagtgaaaacgtcgcgtcggattacaggaagagagatcaaattgtcacaaactcttgttgagagataaatattgttttgactatgtaaataatatttgtgtgtacatgagagcattagtagatttgttggatatctataaatcaacattagtggctctctcattagtcaaatgaagataagaagatgcaattttttaagcttcttatggaaagtaatctttcacttttaaatttactttctttttttttttggttaaaaatttaaaatattttaaactaggtaacttctctcgcagtatgcgtgtattttacggtaagttatttctacttttgaagtgatgttgaacattagtctctcgctcattagtccaatgaagataaaaaatgcattaattaagcttctaatggaaattagtcttttacttttgaattttatactaggtaatttccctcgccctatgcgtgtattttacggcaagtcatttctacattttgaaacaatgttgaatgccatcatattgtttgttttgtttttaagaaatttaaagccatgtgactataacttttggggttaggagataattaaccaatttatagatcaaaatggattatatgaagaaaaagtgatttaacaaaatttcgtgtttctcgacctagtggtgaatcatttacttcaaaccccaaagaaccgagtaagaaattaagcaagcaagctcttattcaacagttggttttgaaatgaaaacaattcagtgtttgttcatatctctaacatggtttatatgccctggatttttttttgtctagaatgggaacgtcctactgagaacattcaattacctagtaaggagatgctgaaaaaatatccagtagctttttaaaaaaagaaaggaaatagtaagccttacttagtataagctttcatatatagttaccgttggatcagcaagcgacatgaagatattcttaaaacatatatctcaccatatctcagacgatagattagggtgatcccacaggtacttaggtggcattcctcgaggtagcttccttgcatttgtcttttctcattagcctcctttcaagaaagtgattacttgggtccaatgctttctggtttagtatgcagatacattttttctttcatgtaaactgtttcttttaaaaagaccatcctaaaggtacaaaagaaggaagaatatcagttaatacctcaacagtttgactctgctggagatgattcagatgaagattcttggtgttggactgtttggtcttgatatggactgtcttctgctgattgatgcaagtcggattctgaatgattcatatatcttaaggaagaagaataattctgccctgtacaaattaagcaaccaaactcagattatttttccaagaactgcatatattcattcaacaggtaaaatctggagttagtttctgaaatggaaacaaattcagtcaactagtaaggagatgcaaaaaatggtaatcctaactttagatttcaaaacgtgagagtcatacattctcacaagttaaacttctccaacaaatgtacttcagcttcttttcttaagtacaaaagatttaaattacataatccctgcataaatcacataatacatgtgataatataacacttagagaaaaagaccaatttggttgtctactaagcacaagaatttggagatttgacagtggtttttctcagcacatggagtctaagtaaaagataaaaaggtaagagaagacattcctacacctgcgaacatctaattacaaggacaaatctcattataattaaccaaaataagtgcattaacattttcatgtatatattcaccagcattgatggaaattgtaatgaacaaaagaaaatacaaactccaaaactaaatctgcacaatgactaaaagctgaacgggtcagtccacatttgcatcacaatctcttcactgctcttagcttagttaggctttgcagctttgtagatgaagattgtaatgaacgaacgccaactcttccagatgctttcgttcacagtggctcattccttcagttagcaacaacttctctgctaagcttctcttcagcttgtaccttgaagcaccttcacatgtctggctcagaatcttaatggcgaaactctgcagctctgggtgctggctcgccttttcagtccaccaatcaactgcaaataaattttaagacaacataatgttttgctcactgattcaacaacacaagtatctctacaaacaaaacaactatatcgaaagtcaacaagttcactcacttggagatattcccgagatctgatcaggttgactggcctcgttaaaacaatctttaccgagtctgtacctatcaagctgtgaggcaattttaatttgaccttcttttgccacatgaaccagagagtgggtgagaccgctggaaacttctggatcaagatggaaatcagttgagtagaaagaagttggattcagatagtaaccagcagcatgaagaggattgtggaggtgcttgttccagacatcatctatcacatcccataatgtaaggtaatgttttttctcgtcattgaattccttcttgatactcagctttatgccgtccaaagtgtcatagatatatccgacatgctgattgttgtcggcatttgaaaacaagcgcagaccgtcagtcagaggagatgtacatttcagaatttcttcaacagcctcccaaaacgaggaatcatttaccaaatttgatactgatttgccttcttcttttttccaaacagatgaagcaaacatggctgccaagtttttcttcgccttgaaaacactctttagaattagatacggcttaacaaactcaaactcggaggaggagactgttatgtcttttccatgactttgatctctgtaaattttcaaagctgagggattgttgttgatgaactcccaaatggtattgaccttatcaagtatgtctccaaaggaacgcattttcccaatcttcaccagcataagctcgaaacaatgggataaactcacagaccagaaaacttccctgtcatgacccgaaaagagtttgcctaactcaccaacccaaccagaggtcgaacatgcaataatttgagtcacgttatgcacaccaacttcctcaacgagcccatttactagcgatagtaaggcagtgacatcgttttttacaaccgaaacatctatggatttaagatacactggacccgctggacagtcagcaacaaaggaaacaagatcgtggcctttcgggtcaatccaagcatccaacaagatgctgcaaccggtgatcttccaggaatctttaatattcttcacataatcctgcacttccttcattgcttcttgaagcaaccggccgtttaaatcatgagaatcagggatcttctgaccaacacctagtgccatcatcatttctttgaaacatggggaatccacagctgaaaggtcgacgcaatgttcataaaagaaccgaccaatgcacttttgggctttgcttgacaacaaatcctgattgtcaacttccacagctacattcccctgctccggagaaacacttttgcttgatgaatcttcggtcttccgacgcttacgcgaatcagccatttggaatttcccaactctcttagtcttaggagtagtataaccagatttatcctccataagcatcgttcgaaacgtctctctaagagtaagtgaaacttggtcacagtgagtaacatcagtaccaacagcacccaagtggtgtttaagacgatgaaaggaattcatttctttcccacagtaattgcatttaacccgagatttcttcttgtccacacaaattccatgctcacgaacatcaacgacagtaccagccattttaagagtttcgtttaattcacaaaacacagataatgaatcagacttggaagcatttttcgattctcacaactcagattacctgtaactgcaacccaatatcactattagagaaacaaacaggaatatgcatcaaaatcaaaatattgaatggcgtatatttcgaaacagaattgaccaacttgatatctcagagtaattgaaatcattccaagttcatggagagaagaaaaaaacgaaactttaaacccaacaattgacccaaactcgaccatataaattaaccaaaattaatcatcatctttaagagaaatcgcctccataaagaacaaagcaaacaacttttttacagaagaacaaaactcaaactaaaaacaaaacctattattctttgctgctaaccccttgtttctcctgaataaaggaaatacctgaataaacaaagtcggtcggaaaacaggacacagctaaccccttgtttctccttcttccacccaaaagagagggaatgtggaagaacttgttttgactccctctttctcattattctaatatttgggctattgggccatcatctcgttttggcccaaaataaaagatgaccaataaaacaaaaataggctgctaatggagagttctggcccaaaataaaagatcacaaaataacaaggaataaataatgatgtgcatagctgcttgtttcaccagcattgattctaaaggtgtgagctttgatgaatatacaaactaaaatgggtcagtccttataaacatcaatctcttcacttaatttggctttgtagctttgtagatgaagattgtattgaacgaataccaactcatccagatgctgtctttcacgattgctcattccttcactgagcaacaacttctctgctaagcttctcttcagcttgtactttgaagcaccttcacatgtctggctcagaattttaatggccaagctctgcagttctgggtactggctcgccttatgagcccaccattcagctgcaaatagatttaaaaccacagaaccttttgatcactggttcaacttcaaccacacaagtgtctgcaaacgaaacagctatatcgaaattcaagaagttcactcacctggagagattccagtgatctgatcagcttgactcgcctcgttaaagcaatctttaccgagtctgtacatatcaatctgtgtggaaattttgaattgaacgtgacaatcttctaccatatgaatcagagaggagataagaccagtgacaacttctatatcaagatggaaatttgttgagtagaaagcagtcgggttcagaaagtaaccagcagcatgaagaggattgtgaagatgcttgttccaaacatcatctatcacatcccataacggcttgtaaaattgtggcttgtgattgaattctctcgcgatactctcctttatgctgtccatagtgtcataaacatatccaagatgctgattgttggcagttgaaaacaagagcagaccgtgaatcagaggagatgtacatttcagaacactttcaactgtttcccaaaaagaggagtcactcaccaaatttgatattgctatgcactgttcgttattccaattagatgaggcaaacatggctgtcaagtttttcttcgccttgaaaatactctctagaattagatatggcgtcacaaactcaaactcagaggaggagactgttatgtctattccatgacactgatctctgaaaatgttcagaactgagggattgttgttgatgaacaaccagatgttattgactttgtcaaatatgtctccaaatgaacgtattttgctaatcttcaccagcataagctcgaaacaatgggatacactcacagaccagaaaacttccctgtcatgacccgcaaatagctcacccaattcaccaacccaaccagaggttgaacatgcaataatttgagtcacattacgcactccaacttcctcaacaagcccatttactagcgatagtaaggcagtgacatcgtctttaaaatctgaaacatcaaatgatatcagatacactaaacccgctggacaatctgcaacaaaagtaacaagatcacggcctttctggtcaacccaagcatccaacaagatgctgcatcctgtgatcgcccacgattctttaatcttctccacacgatcttgtacttcctctaatgcatcttgaagcctccatccgtttaaatcatgacaatcagagctctcaagccccatctgaccaccatctacagtcatcatttctttgaaacatggggcatccacagctgaaagattgacacattttccaaagacccacttcttttgggctttgtttgacaacatatcctgtttatcagtctccacacctatactaacattgttgctggatgaatcttcgcttcttccacgcttatgaccattacccatttggacatccccaactctgttagcagtatgacaagatctttcttccatcaccatcttaggaaacgtctctctaacagtaagtggaacttgaatcacagggaattatgtacaacatgattactacttgagttataatacaccgcatgattgatgagtgaatgtctagagatagagagagagagtgataggctcaccttcatcttctttagatcattgtttcttgctcctttgttcacgcatacttgcaaattcctgattcaagcatttttcgcttctcaatcagctgttacaaaaatcaggaacaagcatcaaaatcgaattttgaatggcctttaatgtgacagagaattcactaacttgatctcagagattgaaatcattaatgccgatggagaaagagaggaaaaaacgaaactttaatctctactatgacgaaaaaccagctatatagtaatgctcaaacaactagcaaacgaaatggtagacccatataaattattatcgaaactattcatcatcattcagagaaattttctccattgtaacacagaagatcaaagcaaacaacttttttacagaaaaccccaccaagcgagtccaagccagtcaaagcgacgacgaaacccttgattttgacttttccaagagagagagagagtgatgactgatgagagtgaagaattttgctcaagttgttttgcttcccgtaagtaattgtatgcatgaaggtctatttacttatcgtactctctctctcagacgcataaaggcttcttatggaaagtgacttccacgtttgatattagcaaacttgtatataaacattggaaagtgaactcttcagttttctcactaaccagtgacctatacacacacaaacacagaattaaagattcttttctcacagtgaaggcagtgacatcctcaatatccgtaataagtttacacgtttctgacaaagatctacattacaaacatatattttgagtgacactctctctctcactaaattacacaaaacggaccatatttacatacttgaagaatcttactacctcttaggatcttcagattcagctatgttctcaagcctgcgacgtttctgagggctttcacatttatcgtcttcggtttccgacgctttgttctctgcaggtaatggcggctgaggcgaagatgctttggttttggacatgttttgagaatctggtatagagtcatcactaggtgataacactgtctgcgaagaagaagaaatccaccttcctgttttgcgttgttcttccaacatcttttccaagtatttagcatgctcttcaattcgtagctgaagcacccgttgcacctgcacattgatcaattatgggactggttatagtagcaaatcttcaatatttcttttccccaagttaagtgtaatcggttttacctccagctgttcatgcaattgcttctgaacttccatctgcatacgcagtgcttcagttaattgtatggccctgtccatggaaaaagagagtcattttagggataatgttgaaaaatgtctgcggattgaacatggaattagagaaacacaatgctttaccctttcttcttctcgtcagcttcactcttactcaaagccagtttcttttcttctgagttatcagtccttttctctggggaataaacgaaaaataataaaggaactgtcagatagatcaaaatcatggctgatgatcatgcagaaacagagaatctgtgaaatcacaataacaagttggaggctttaccttcttttttctctggcatatacttggctagtctatacttctgcacattcgtgaatttcagagatattcagctaatttggtatcatgtacttataaatttatcacactcaaactgatttagtacctgcaagtggctttttacatgatagatcgtcaagccctcaacattcatgagcttcttaacagcctttggagtggcctctacatgtttaatgcaaaaaccgggttaagcgttatcagcagaaagatgagaagaaacaaaggatatctaaccaatggcaaacacaagagtagctctagagttctactttataagtgcctactcgtatctcaaaaagctaaaactcactttcaggcccttcaagtttgatcaccgcctttacaaaagactcgtggagctcaggagtccatctcattctcgacttttgattggctgctgatcccggagaagggtgagatgaaactacgtctacagacattgctccaggaacacagctttggcttggactcaatctcgtcactggatttgacgccaatggcgtttcatagatctcctgaatcaaacagaaactaagtgttaaaggagcaaatgacgtttcacactctatgtatcaacagcaaagaccgaaagtcataagcagtgaaagtataagtcaatgtttgtcatagccatgcaaagtaactgatgcaaactcataagagctgtacaagactgagattaacttacatcaagcctgggagtttcagcgcggtctgtgatagccagctcaagttcatcagacaggaactgtaattccatttgatctgataagcaatagctgtcattcgaacagccaaaatcatgaaaatcgccatcggaacaagcatctccagaaagattaaggaagtctttgagaagcgacccggagttgcctccatcacattgattgcccaaatcctcagtgaaaatagatggagatcttgcagactccacaccagaagctgagtgggtgtaagaggagggatcagggaggaaaggaagactgtttcctagatgtttctgagtctcagaggttgaagatgatgacaagtagaggtttgtgcaaaaggtggaagaccgagagaaggtgctctgagaactattctttggccatagctgaccaggtgaatctggagattgtgaccttatgaaaggagttttccggtgttctggctggacattcagaaagttatggactggagataaagaagaagagcaagcttgaccaagttttttattgcattcatctgttgccgctgagagaagcctgtgtctgttcatgattgctttgatgtacatcaacaatcaaaactgtctcttgacaagatcccccattagtttgcagttagcatccaagccgctgagaaccaaacattttgatgattaggataagaatggtggggtcaataaacatgttagtgacaagaattgagtcagtttgtttagttaactttcagaacaaggcatacagaatcatccagtgatccatcttggctggatcttgacaagttaataagttccttgagaactaaaaagctaagtaattggagcaacaagagtacatccgagattgagatttaccatatatacagacacagagagatgcaacgattaaatatggtgttccaaaaaatgcaaaacgagttgccgacacatggaaactttaaaactcgaacagaggaatcaaatcaggttacgcaaagacacgattacaggaggacagaaacgcaaagagaaatgaggtattaaattctaaattcagaatgttgagactgacaagtagtagtacgaatcattcacagagaaaatcaaaagcaatttatttgattttatatttgattttatcaaagggcatgatagaatagaaacggacctgagaggatgataaagtcttcacctttttaatacttgctgcataacaaatgaagaaaaaactaacatttgagaaaacaagctgaatcccatcaaagagatgaagttaattcgaatgagaaagcaaaagaagaagaagaagagatggggttaaaggaaggagacggagatttcgctacgaaatcgccgtcgaagtgtgtactgttggctttgcttgattggtctccgtcttgctggacctctttcttgttccacccgctctttcctcgactgtaactcacggaccaattcaatccgttagttcatttgccacgtaggattcaagtgctcgtgcgttttgccacataaattttattttattttatcgacatcacgcttagctctctctcgtattctcttcctaatcacatttcatacctggtcaaccaaattattggttttaaaaaaactatactacttctttgggttatgagatttgaggatttttttaaaatcatttatcattgttgattcgaattatttatgtgatcgatactagtagtacttcgtaagctttgttttttcttttccaatggagtacatactattgtgaactattctctgcttttctttttcagttagtattgatatctttatgttgtaagaaaaatcgtgacacaattacgaattattgatataaaaacgaatgataatgattaatgaatatgaatgagaaaatggttgcccaaaaatgatagtgactgatctgtaatgcagtttagtagaattagtttcttttaatagcaaaactaatgatcattaatcttccaaaaggaaagacaaagtagcatcatccattaacttgtgggtcatatctaaagccttagccacacaaatccatccaattttttttgttttttttttgtctttagtcttttttaccacataagtaagataatgctaatttaatgctcatcatagagaatgagctcagcaaatgctttctacctgattatttattatcttcaaaatagtcaagtttgaggcatcaagtggtagaatgtctaaatccttacataatttatatttatttttggcaacatacataacataattcaacactgttctaagtaatacatggctagtgggttatataagattatatacttcactaaaggttgataaatcaattctcagtttgcattttgccaatatacctcaatttatcatctttagtcccacaaatgatggccacttttgtcgtactgtatgtttgttttcgacttgtttaagtgttgggtcccctcattgatcaattattgaaaaataaaatgggccttactaaaaacatatatttgggttaactagagagaaagcccaaatacaaaaagagaatcatcagcgattcaacagaggcttgaacgcgcgtcaaaaagcttagctcaaagattgaattttgattttcacatgtttttcttcataggccaaccattaatggcgttgactttgtcaattctctgacaattgtaatttcgttctcctgaaaccgtgggagaaaagaatctgcatttccttcaagttcaacgtcttccaggtttgattttgatttccttttcccaattccatgacttttttgatccgtatccagtaattgaccaccgtgattcgcgaatcatgattagggtttcgttgttaatgaatggcctttggatgatcaatggtggtgtttgagatttaattgggatttagttatgccctcttggaatttggtatcagcatgagtgtggagcatttagtatctgaatccgattgatgaaaggttgacacttttctcttttgttttttccagattttgaaatggcagatgggaacacaagattcacggtggatgaagctcttgtggcgatgggatttggcaagttccaaatttacgtccttgcttacgctggaatgggttgggttgcagaggccatggagatgatgcttctctctttcgttggacctgctgttcaatctctctggaatctctctgcacgccaggaaagcttaataactagcgtcgtttttgctggcatgctcattggtgcttactcttggggcattgtttctgataaacatggccgcaggtagcttttatcatacttgttgtctttgatataagtttcttggtacctcaagtagaaaggggacggctgaattgttccgtaaatgttcatattcttatgagctcttgaattgaatgatctctgaccttgtctaatgctgaatttcagactgtttagcttatgaccatcctttgttcatccgatttctgtgtgtcttgtgtcaatggtcatcaatcaatgctaaaatggactttgttttgggtcatattcttctgtttatgatgcattgtggcttcatttgattttgatgtttgtgccttgaattcctcaggaaagggtttatcataactgcggtggtgacttttgtagctggtttcttgagcgcattttcacctaactacatgtggttgatcattcttcgctgtttggttggtcttgggttgggaggaggtcctgttcttgcttcttggtatcttgaattcatacctgcaccaagccgagggacttggatggttgttttctcagctttctggaccgttggaaccatatttgaggcttcccttgcttgggtataactcatgcctttctttgtttattttccagtataatttggacgctagcttttcacatcaccatgcaatgcaatcttttgcagttagtcatgccaagattgggttggaggtggttacttgcattctcttcggtaccttcttcgttacttcttctgttctataggtggacatctgagtctcctcggtacttaattctacaaggccggaaagccgaagctcttgccatattagagaagattgcgaggatgaacaaaacccaactacctccgggtgttctcagttcagagttggagaccgagctggaagagaataaaaacattccaacagaaaatactcatcttctcaaggctggagaaagtggagaagcggttgctgtgtctaagattgtactaaaagctgataaggaaccaggtttctcattactagctcttctatctccaacgctaatgaagcggactttgctactatgggttgtgttctttggaaatgcgtttgcttactatggcgttgtccttctcaccaccgagctgaacaattcccataaccgctgctatccaaccgagaaacagttgcgaaattcaaacgatgttaactacagagacgttttcattgccagtttcgcaggtacatcaatatatttctgttatcacaagaaatccaaagcagttgttacttgttacaaataagaaaaagtctaaatcttattttttgatctgtggcgtcctcagagtttccaggtctactgatatcagcagcaatggtggatagacttggacgaaaagcttcaatggcatcaatgttgttcacatgttgcattttccttctccctctgttatcccatcagtctccattcataaccaccgttcttctcttcggcggccgtatctgcatctcggcagctttcacagtggtttacatatatgctccggagatatatccaacggcagtgagaacaaccggagtaggagtagggagctcggtaggaagaattggaggaatcttatgtccactcgtagccgttggattagttcacggatgccatcagacgatcgctgttcttctgtttgaggttgtgattcttgtgtcaggaatttgcgtttgtctcttccctttcgagacaagtggtcgtgacctgacagatagtatctctgcgtccaaagaaccaccttcagcctccgtatagcaaaattcttctgaccatcgtagttgtttagttgttgaaggaaagaaaagaaagaaaacagagtgattacaaatagagatattcacagattagtgatatgatatgatcctgtgtaagacattatacaaacttgtaattttgtaaaacaaagtctcctatacggtacatttaaatatgataactttttgttgatcaccataaaattcagtcacattaccgttgacactcttgagaatcaaagaagttgcaagaaacaactaaagtaatgaaaatagaactgattaataatcatcgatttctttcctgaggttggttgatttgcaggtgcactaagcttggaacataagaagagcacacaagtgggagacaatatttaggaactatttgtccaaaaaacccaacttttccgatattcagagatttgaagtatccatcttgtccaataatattgggtgtttggttgacatgggtcttaacctcgtaagatttggcgtctacgtcgaaaaccacagcaactttcttctcctcgtcaatgaagaaactcccacctagagaggatgaacttgacaacaagagatggatctcaaaaactcccacagcagcttttcacaaatgctatacaattattaaattttattattgtgttctaaacttaccaaaatttttatttttaaaaaatcaatctttaacaaaaataaaaataaaatcaaattattaaattttaccatttaatgtgaataaaaattaaagatactaatctattaattttggttcattcggtttttttggttagtcacactacttacataagattggacttcggtttggattatacaaggtataaactttttatctaccgttcaagttatttgaaatttggttccccacctctattttatattatctaagtgttatattaataatttttgatagtgaaaatatatagcttcttttttttttggttacaagatatctaaattttataaataaatatcaattgcgctatttccggatttagacccatttatttttagaattcagtccactggcatcaaaccgaactagcccatctaatacaaaaccaatagatctgtataaaaaagttattggtgggcataaatgtaaattggtggtccataaactgattaaaatattctttgatcagtcgatccattatagtatttagcttagggatcacatattttgttaacaataaaaaaaattaggatttgatctatgattatgattaagtaatagataaaactataatgaatagaaaaagaagaaaaaagattctcggagtctccaagggaacaatctcaattctcaatgaaacagagaaaaaggccaaaaaaaaagaagagatcatcgtaattgccattttcccacaaagagtcactaaaaagaaggctcataacttttttttttttctcttgtagtaaaaaactttgcgctttaaagacaacaacaacaccaaacattaaataaggtaataaccttttctcactttggttgcatcattcattaatggcaaccaagttcttcttcgttcgtaaaaaaaaaacaaaataaaaacacaaacttgtaaatcttttttactgtaataatctctctacgtattgctacgtaatttatacaatacatatatggaaagatcctctgtccttccctacatataaagattctgtttttccagttttttttgtttgttttgtttttgaatcagatccttattcttgacctttcgatcagattcatggcaacgactcaatcacacacctcagatcttacttcaggtaacgtcacttactgacccatctctcaattatccttaattgtttcagattctggtctaaatttgattcctttacgtttgatctctgcctttcctttttctcaattcttagtgggtttcctgtcgaatcccgtggttcatgtttctgatgtgttagggttcgttgatctcgatttggatttagatttgcgagttttgcttttgaaatttttggtagtgatccactagtataattgaactggaagtgtaagcttaagagaattcgatttccttatgctaagatctgggatctaggctctttgatttttgagtgttcgtttagttcaaattttggattttgcattaggatctgcttttgttttgctgatcttgttcttgttcatgaatgattcccaccgacttatttgagtttaccggttgtgcatgaatacagaggagcaacctgctagtttggacatcatgaaggagcaggtagttgatctgagtctggttatatctccattgaaatgaagattcatagagagaaattttaactctttgagcctttttttctagcagactgtcccggcaaacaacgagacatcagcctcttttaagtcctcccaggaagctccagttgtagttcatccagcaaaagttgctccacttactggaccttatggtttagccggtgattttgccggacacttacctagcagcatcctctctcctcaagcacaaggcttttactatagaggttggttttgtgattcatgtatgttttgtttggcttctctgatcagatctctgagctcatggagtttacatgtttcatattcttgtggatgtgtaagtgtaatactagtggccatcgaaagggcaagtataagccttcctctatccatgattgacttctctagttcttgaattgcatatgagctgttagaagctaatctgaattactttctatgttggggagccaggttatgaaaaccccacaggcgaatgggacgagtattcctcgtatgtcaatgttgaaggattggacatcacatctcctgtgtgtacaccttaccatctcttctgggatctcttctttaaaacattccaaattgttcatattcttctctgatcaaatcaggttggcttcaatgagaatgcttctctggtctaccaaacgggatatggatacaaccctcaaatgccatatgggccatattcccctgcagcaagtcccttgccttctgagggacagttgtattctccacaacagtttccgttttcaggggcatcaccgtattaccagcaggtagttcctcctagcatgcaatatattacttctccaactcagcccgagctcaccagccttgtcggtgttgaccaacaaggtgataacatcggaccacgccaatcctaccatcctcatcccattggaccgtttaatggaaaccagccaaaccttggttttcctgaatggcagcaaggttttgacgggggaatatggtcggattggtccaagccttctgatatgcacaggcattcttcttctatttctccggctttatctcctcagccactcggctcatatggatcatatggccagaacatacccatggttggttcacttttcttatctactcttatccgacatatggatagctttcttctattcatggttacatattggattatatgttaaaagtagattgttctttaatttgtcaggggtcacagcgacagagatcattttacggttttggatctggttcgaactcttataacagaggttatatgcatagtggtggtcgtggccagggttctaactatggaagtagactaatttctaatgtgggtatgggaaaccaaggctggattggggttgacaacagtcgagggcgtggaagggttagtgatccatctttgggtggtgcttataatggtacttttgatatcctcaatgagcaaaatcgaggaccaagggcttcaaagcccaagactcaggtcttagaggagcttgattctgctgctgattctaagaaaaataacaaaggcagtgcaaaggagcacgaggaatccaacaacgcagactttgtcaccgactacactaacgccaagttgttcatcatcaagtcttacagtgaagacaatgttcacaaaagcatcaaatacaatgtatgggctagcacccctaatggcaacaaaaagcttgacgctgcttatcgtgaggccaaggatgagaaagaaccgtgtccactttttcttctgttctcggtacgagtctaatccttgatcaagtgaaaaaaaattagtttttcttctttttgcagattgcttacgggtttgtaaattcaggtaaatgcgagctctcaattctgtggtgtagcagagatggttggacctgttgattttgagaagagcgttgattactggcaacaagataaatggagtggacagttcccagtgaagtggcacattatcaaagatgttccaaacagccagttccgccacattatattggaaaacaatgacaataagcctgtgactaatagtcgagacacccaagaagtaagtagcaatttgtgcctatcaagctttcttgtccataagatacctcttttaagccacaccataaccacaaccaaaaactacaggtaaaactggaacagggcatcgagatgctgaagatcttcaagaactacgacgctgacacgtcaatcttggatgatttcgggttttatgaagagcgggagaaaattatacaagaccggaaggcaagaagacagccaagcttgccatctgcaggagtagtagcaggagaaaatgaacataaacctgcttctgctgcattacccacagacttcatgaagaacatgtccaagagttttgcgcaagttgtccgcttggacgaaggcagcaaagaagcagtcaaggccagttcatctccagatgcaattacaacagcagcagtctcttctggtcaatccaactagtaagtaaaagacatcaattagcaaagactatgttttcaaattccataatatgatcttttgtttgttctaagaaggtatttcaaatgaaattttacgtctgaccgggtctggtttttgtgtaaagtaagcctctttcctccgcccttttctgcttcaggggtatttagccaaaatttgattcatttccctcttttcaatgttctataataccctcactcttctgagttgatagaagaagaagatgaagaagataatgtatgaaagacaatataatgtttctcttgtaaagttggcctcatttatctttgcaggcagtttttcaaaataaaaatgcagattacacacatcaatcaaattcaaagctctcagctttccacatatccaaagtttgtttctttgtgtgttttttctacacatatcttagtttttgagagtccgattgtgaacgtgacaagaaagtcaatcaatgacttatccatatgaatgaattgtcatcaaaagggacactgaattgtgtggttcatactcatagcatgtcaatatattcgtgaccctttttacaagcaagacagattcagatttgtgagatgttatgattcactaacaataatgtggctaagggatcagttgtaattgatattatccatttgtgagaaacaaataaaatagtttcatataaatctaaggactgtctatgtcagtccttagtctattttgccatatttctagatctaatcgggttgcattattacgtagatagatatgatctacttactgatgatttttttttttgaaaccttaatgtataaaaaaatggtttaaaagtactaaccattgttggtccacaaaaataaagggaagaaaggagggccaaatcgtaacattaataaaaaaggggccaaactgtaacaacaaaaaaacaaaaagggccacaaagaaaaaagagagaaaataagaagagtcccggacaggaccgagcttgaggattcgttgttgcctttatgactcagccaacaagaaccagactaatcctagtcctagtcctagtccacgcgcgaatatacaaacgtcttaaagccatttgatagaaccgatttccaagggttttgctcagaaaaaacacagagagagattttggaattcgatgaatagtggtgataccttatcgacgttagctcaatttatctcctcttccgagagatttttccggcgagctgacggtgatgtagtcttttgttattgctgggccaccgtgctcgcacttgtcttcattcttctctaccaattcttcctttcccggaaattccgattcttcagtcatgcttcttcttcttcccctgtcgtctcggtttctcaatctctcagctcccaatcagggtaaagtgttaaactttcaatttagtatctttttgccgaatttgtttgctgcgtaaatctataacctttagcctctttcccttttgtgtgttcatgcttgtgcctcgtatgatttttagttataatcgtctactttatgatcttattattctactctttgattatctctgagacttcatctattgactatacgctttgcagaatatctactacacttgtttctgatgaagatctaaagggtctgattcaaaaattgggggaaagaagtgaggatgctgagatatgggaagatgttattaagaaaagcaaccctcgtatctcctacactgctaaatgctgcaaaccaacagtaatctcaaagttttatctttgtgtagagctttttacttttccaagtgtctagtaagattgtttttttctctggtaactgagtttcttctttggtttcttgtaggatggtagtcccatgaagtatctgagtacaactgtgtttgaggattgctccccagaggttttgagggacttttacatggacaatgaatacaggaaacaatgggacaagactgtggttgagcatgagcaattgcaggttgacagtaatagtgggattgagattggtcgcactataaaaaagtttcccttgttgactccaagggagtatgtattagcgtggaaattgtgggaggggaaggataagttttactgtttcatcaaggtaatgatgcacttatcttaagggcattatttttaatgctattatttctaaattacattattcatttgcacctatgcattcctctttaaatttgctaagtatttctcgtatatgctagatacacagacctggaccatgttatatattatctgttattcgctttgcctctttacttattgttttgctctttggttattatcaggaatgtgatcacaatatggtgccgcaacagaggaagtatgtacgtgtaagttatttcagatctggttggcgaattaggaaaggcaagtgtttcttgtcagggttatcatccatatttcaactaaatcttctcttgatatctcatcagtaacatataccacaaatctctgtaatatgtatgagtggtgaataaggtttttcattcctccatactgtctatgcataacttaaacttgctgcagttcctggtaggaacgcttgtgagatacacatggttcaccaggaggatgctggattaaatgttgagatggcaaagcttgctttctcaagaggcatatggagttacgtttgtaagatggaaaatgcacttcgcaagtacattgcaaccagtcatcgaccccaagggcccacattatctgctgtaagcttaatgaaaaaggtgagatgttagtgtttttttttacctgctctgagttcagttctctggtcaagtgctggatagattgttccctgcaaatatctgtttgtgaaatctcaatgaatatgccttgtttgacccacccttgtcttatcccacagattccatcggagttagaaagtcagacagacgacattacaaactcctcgggaactaccactagtggtatgcacacaggtgaaggagccaaacggaagaaactgttgagaaagccttcaaagaaactgatagcaaatggtatgttacttgtgggcggtgccgttggtggtgcaatctgcctgtctcgtggtcactccgccttaggggcaaaggtcgcgttggcttacttcttgtcgaagatgagaaagcgtggagctcaactgagtcaaacttcccaaaacgctggtatttaagtcatgcatagatttggttttgatgaagcatgtgcaacttacttagattaagcttgtgtgatagggagtgtctgtaaaagtgattaaacgtgtgaatagaaaagttctatttctgcaatgtctctgatcacatgagctctggggtcttcaaagttttgtatacgtgtcgtggaagactttatatttgtgttaatgtgaatgtaaaaacttgtattttacagtcaagcccttgtttttctcaccaaatttcagaccaattgaatgaaattgttgtaatttttgtttgttcacacacacgtgtgcttgaaattgaatatacgttgaaacaaacttgtttatgtgtgtgttttgcagttggatcgggacttggacacagttgtggtctctctcctaatgtttcggtgtctgcttcatttttagctgtacatttctctattcacacgtccagatttattcgccttttcactcaataacgtcattcaaaaatcctaaaagaaaacagaagaaactgaatttgccatttttggttactgccacaccatttccaatttagttttctttcatgacctatctagcttctttgtttcctctcctttggttttcgtgtgtttccttcatccccaaggaaacccggaaccagccctgggtttctctctggatcatctcttttgttattttacagattttgatttttgagcttaaaactgtcggatcatgggaccaaatctgcagcggatcgtacttgtcttcattgcatgtttcggaatcttcacctccgttgttcttgcaaaaaccgatagccaagacggtgagtgttcttattgaatcatttaaaaacgttgtgatccgatcttgaaatcagagaggtggttgtaaaatttcatatttagttcatgaacgttattcctgcctgatcatatttatggattcttgtagtatctgctcttaatgacgcttataagagcatgaactctccatcaaaactcaaaggctggtcttcaagcggaggcgatccttgtggcgattcgtgggatggcattacttgcaaaggctcttctgttactgaaatgtttgttacttcctctctggtcttgatcaatggtttgatactcttcaccgattctgattttcttgttttctcgttttctgtttctgtagaaaagtatctggacgtggactcagtggatctttaggttaccagcttggaaacttgaaatcgctcacttacctgtgagaatgtttttaccctcgatacatctccttaatctctacttcttgatcaaattcagttaattgatgatatcagctacatgttctgttttgtcattgtaacagtgatgtaagcaagaacaatcttaacggaaacttaccctaccagcttcctgacaagcttacttatctgtaagtatcttcgaattacaaagccataatatatgatgttcattagtacacaatttcaatgtgttggtattgcagagatggctctgagaatgacttcaacggtaatgtgccatattcggtgtctctcatgaacgacctcagttacctgtaagccaaagacatttaatttgactcattcgcataatcttttcccacgtatcaccccgcccttttagtcatacctgttcttgtatttactcagaaaccttggccgtaacaacctcaatggtgaactcagtgacatgtttcaaaagcttccaaaacttgaaacaatgtaagccacatacttctttttttgcagcagatttggaaagatttcattaacttcattgagtatatgttttgcagtgatctttcttccaatcaactcacgggaaaactaccgcagagttttgccaatctaacaggtcttaaaacactgtaagagaagaaagcacttcgaagtagttgttcaaatttaactcctttgtactgttactcaccttaccattctaattataggcatttgcaagaaaaccaattcaaaggctctataaatgctctcagggacctccctcagattgatgatgtgttagtatttttcatgctatatacataacacatcgtttaaatccttgaaatatgaactttctttcattaatgttgtttatgaatcttgcgttgacagaaacgtagcaaacaatcaatttactggttggatcccaaacgagttgaagaatattggaaaccttgagtaagttttattatctctctcattctcccttaaacacaatcaaaagatgcaaaagcattaatgtgtttttcttcatttcttggttagaactggaggaaacaagtggtcaagcggtagagctccttcaccacctccgggaacccgtcacatagacagaaactcatcaggaggcggtggaggaagcagcaaggctctgacactaggagttataatagcggtgtcttctataggtggactcattttatttgcagggttgattgcattgatttctcgaagaaagaactctaatgattcttctcactttttcgacgacgagaaaggaaccaaccgaagcaagccactcttcacaccacaatcctctcagatgcttcaattcgataatatggaagaattcaaaaaccagaagacagttgattctaatacttcacttgaaacaaagccttctgttaaaagaacttcttctgtcagtttcaagaactctcctacttttcatctcataccttctacccaagtggctgctacccctgaccgttcctccacctcccaagactctcctgatacacgcggtgtgaaagcgttttcactagcggatttgcagaataccgcgtcttgtttctcgccgaatcgccttcttggtgaaggaaccattggacgtgtttataaagctaaatttcaggatggaagggtttgttttccttgttacattccacattttcttctcaagaaaactttctttagatctcttatcttgttatcctcttcttaccagaaatttgcagtcaaagagattgattcttctctgttaggaaaaggcaatccggaagagttttcacacatagtgtcgagtatctcgagtattcaccacaagaatatggcagaactcgtgggttattgttcagaacaaggaagaaatatgcttgtttatgagtatttcacaagtggatcacttcacagatttcttcacctgtctgatgatttcagcaaaccattgacgtggaacaccagaatccgaatcgctctcggaactgctaaagctatagagtaattatctaaaccatttgtttgaggagaatcatcgaactagctacttgctgctcttctttattttcattttttatcttgtgacaagaaactctcttttgtcaggtaccttcatgaaacatgttcgcctccgctagttcacaagaacatcaagtcatcaaacattttacttgataatgagctaaatccccgcctctcagactatggcttggcaaactttcaccacgtgagcttcttgtaaaaattagtgttatggagatacagagttgtttcaaatctattaaagtgtctcatctcttgaaactgtagcgcacaagtcagaatcttggagttggatacaatgccccagaatgcacagatccctccgcttacacacaaaagagcgacgtgtacagctttggtgtggtgatgcttgagctgctaactggtcgaaagccttatgacaggttccattctcaaacagtagtaatgtccgatataatatctataaagaactatacaagtatctgaaatgttttttgaatgcctctaatcttcagtgggaggccaaaagcagaacagtctttagttcgttgggcaaagccgcagcttaaagacatggatactctggatgaaatggtggatc

SEQ ID NO: 411 - DNA, 62948 bp, Arabidopsis thaliana
ccgcgttgtgcggactctacgctccagaatctgtatcatcattcgcggatatagtttccatctgcgtaatggtacgctcattgttgattctctattgtgttattatgttcttcagagcttctaagttcaaggtttgtgagaatggattgttatttcttgttttcagacggagcctggacttaggcctccagtgtcaaatgtggtggaggcattgaagaggctagtgtagtctagtgcctcaagtcattttgaagcccccaaagtattaaaagaagaagaataactcttctggagattgcggctaaaacctgagaaacttctgattaaaatcaagtaggaaactcaaaagctattggattcaggtttgtatagagagatatataggtggaggaaaggagagacagagattctattatttgggtttttgtttcagatcatgtcttaacctttagattaatcttttacacaatgagaaaagttgaaaaaagctactagtgtcatagaataaccctctcttgtaatccactgtctacaaacataaatcaaactgcaaaataaaatccaaaagtctcatctgtgtaagaatattaacaattagaccagtaagctctgttttcggaaacagagtcgtctgtgcataaacagaaatcgacaaattaaatgtagacttgcgtacgaatttcatatttctcctgatgatgttttttttctttcttgtataggattttacctaacacgaatttcttaatttatccatcctgattattacattaaatctaaagaagaaagcttcttgtatttgtgagcttacttctttccttttcaaagaagaattgaaaaatgcagcataaagaaaaaaggaactgtatctcagtgtcattgttgtttcttgctattatcagccagtacatgttcatctaagacagcattctcggattggtcttcttcgttggacaagttcccatcatcttcttcgctgctccatttccttacaaatttgggaaccatgctttttacatcacttgcctccgacacttgatccatatcgttcactctctcaaaccggacagcactaacttttcttgcattccctgctagtatctacaaaccgaaaaagacctcgattagttcaaaacattgacggtgctttgtgccaaatatgaaaatgagccactcaatacctctactctatagatttggttcttttcctttggctcttgcctctcctgtttaccttcctcctcctcaccatcctcttcccagctttccttttcaagaacaaccttcacactttctccagtttttgggatatacccaaaggcctcacacacaaagcctgagactgtctcgtactgaatgccctgtttcccaaatgaacaaacattgtgggtttcaacttttaaagaacatgttcacatttacaaagttaaaagataaccctgaggaatgctcttgaggacgcaataaagaggaataaaagagactgctgaaaataacattacctctggcattttcatattcagttcttcagatagctggtcaattgatgtattagcatcaacatcatatatgccctcatctctcatgacaatatatcctgttttcttctgaatctcctcctattgagccaaaatcatggaggccataagcaatggaatagagccttactaatgggcaaataagttatgtaagatataggttaatattctctagaaatgtaggtctagaatgacgattttcttaaagagttgaaactagggcacttactttggaatcgttttcatcaaaaatttcaccaacaatctcttcgaccacatcttcaagagttactatctgcagaaacaaattagtaggaaagagattagctaactgtggaagagagagagtaaagaagcacaaaagaagagcggcacatactccgatcgttccaccatattcgttaaggacaactgccatgtgaacctttcttattcggaattctctaagaagattccaaacagacattgaatctgcaaagtgtaacatatatcattagattttcttcagagtataataattcagtgtgaagaattcgtgtttaatgtcggtaatataacagtataatttaatccgaatgcagaaaaaatctgaagcattcaaatgcctagtttggcaacatatccaaaagcaaacacattgataattaccagggacgaaatatgcaggtttatgtgccatgtcccccacagaagtactttctaacagatcacccttcaaaatcaaacacagtatatttcattctacaacacaattaacagaaagaaaccctaacaaaaactggaagcaagaaataggaaatgaaactgtcaaaccttctgaacataatctagaagatccatagcatatgcaattcccactatattatcaatacgctgctcaaaaacaggcaccctgagaagaaaattaattgagcttgatgaataatccaagggaaacggcttaagtgagaagtctatggaatttttttaccttgagtactgatgggtcacccacatactatggaaatcaactagactggcgctggcgtcaattgcgactacatcaacaaggggagtcatcacctctcgaacatgggtatccttaatctctagcacattttcaatcatatcctgcagggcaatcggtagcataaacataggtctggtatagatttttagaaacaaatttattacaaaactcatacctgctcctcttcttcaatggcaccactcaattctgcacctcttagcatcagtttcaactcatcttcagtaacatatggttcactgacacacacaaaaaaggccacaagatttacatctaggatctgctaacttttaccaaggagaaggcatgacaatccaccaaaccgaatcaaatattaaaacaagtctagactgatgcatacctccgtcctttcaaaccaagaattttcagtattcccattgacagatatgtgacaattcttccgacaggatataatactaaggaaagccacgccactggcctgacctatgcacagtcatacaaaataagtcatgtctttttactacccacatatgagatttgaacagttaaactatttcatagcagaagggtcacaatgagcaaagccattggatatccacataaagtttgcttagagtgaaccactgacaattaattttaacttaccacaatccttgcaacttcttgagcattgtgcacagcaacactttttggagtaatctcagtcaggagtaaaatagccacctatatagtcacccaagaatggcaaattcttaggaagcaattatactgatcaaagaatatccagacagaaacaaaagaggcattgtactaaaccaaacaaaaggattataaagtttacaggtatgaaaaagtgttgaaacaattatacatactgtcatcaatccagtggcagcactaacaccagcttccccaaatatagctgttgctgcttcagtgaccagtgcagttgccgcaatattcacaacactaagaccaaccacaagacctaagataagagacaatatttatagcaatcctctaaagacgattcatatctaggaaaaaacaattacgttgttccaataagtatagtcgtcaagaatctggtgacatcactccggagcattctgaatacaccattctctggttctttctcagccaactcacgcacctgagataagccgtacataacacagcaatatgtcaaaaccaatcagatacaacattataagaacattggagaccaggcaaaaaaattgtatggaattttcaaattgagtaacttaaacaacatattcttgccaatagatctcgttgttccaaaatcaactaaacagcattagcattactaaatcacaccaaaatgaatgttctgattttaccttccacggccacagagtggtaatggacgtctctgccatagagaagaatgctgagaggctgagcagcgcagccaaaattagaccttgctctctaagaaccgtaagaacctggtaaattttaggcaaagcattcttaaacaacactacgctctgaccaaacacctcatagcctgcttcgaccacaccagccgatgccaacactttctgacatccatacaagaaaactccacagactagagctcctatcacaattccacgtttcagcaaaaccttaatcgactccagctccttttcaccagaatcggactttcgttgactgccctcgtgacattgactggagctaaacagcataaagcgacttctgtagctaaattcacaacttcgtcggaatctaaaactcaaattggagtgtttagaagaactcaacgccacagggcagtgcagctcagctctgggcagaaatcttcctgaaagcttcgatttttgaccatatctcttcaaatttaaggttttagagtcaatgacagatcgacccagaacagataattcaagtgccatacccatcataagaacctgataatagaaaaccctagagcaaacaaaaacagaaccttggagctagaaacttcgctaaaaatgcctccggtatgtgacgtgtgggaagagctcaagtatgaagaaagataagacggctcctccttactcagtcaatgtctctgtaaatgctcagaagcgtctaaaattggtagaccaaaaggatagttatctgtttagtgaaagtaaaatggtgattttgagaatgagaactaaggttcatagctggcaatggggaaacccctccggcagcgaaaagccgaaaatggtgaagttgcggagaaaaaaggcgcagcctttcctccgtcaaaattgtttttctcagaccaaagtcgctcgtgagcaagtggcaggcagataatagttaattacattaatacccctatcgcatccaccaaccaagcaaccacgcaaaaagagattactaaaccgtcccggtttttgttcatagacccgtgtgatcttgatttaataaaaactaacccggtttgctcttcaacaaagatgctgcgtcggttttactttcatctgttttgagtctatcaagctctgtttttttgttttttgtttttgatccctggttttttgttttaactttcatcaaatcaataatgacttattgagaaacgtttctgaaattttcaatcagaagtgaacaatcttttattgcattgatttgaaactagcgatgtagaataatcgtttttaggggttcaacagtagtagaagctataaactaagaacaaaagcttttaacaaaagatagtgtttcttcttgtgtgaatcataatccagctagtgttgtggctaaaccagattcagacatcctaagtttttcttcatcgtcatcatcagcaggaaaatagcagagtctttgcttcaatcgaaactggaactagatcttgaggtgtactcagccacaagcttagaaaaagaggaagacttatcctccagtaatctcactggcgtatcatactcctcaatgatccctgcaaatagaacacaacaagacatttctcaatgtttcatatgcacacaagttccatcgaatgaatttgagatttttttcagacaaaccattgcttagaagcagaaccatgtcgctgtcaataactgaagatatcctgtgtgcaatggttatcactgtacagtctgagaagtgttctcttagcgttttctgaatcagattgtcagttgcagtgtcaacagaagcagtggcttcatcaagcaccaagattttgcttctcttgagaagaactctcccgagacacactagttgtctctgacccatactccaattgtctccattctcgctcacactggaatcgagcttttgctcttttttcctcacctcgtctcctagttggcacttgtcaagagcctaaaacaccgcgcaaacattagccaagactgaacattgtttaaactagttaaagaaagaagaacgtgcgactttcagagatttaaaccgacgcacctcccagatttgatcatctgtgtactcttcaagagggtccaagttacttctcattgttccttcaaacatggttggatcttggggtatgatgcttagtcttaaacgcaagtcatgcaacccaatggtcaaaatattcactccatcaatcctgatttctccagctgaaggttctacaatgcggaaaagagtttgtatcaaagtcgatttcccgcttcctgtccttccaacaattcctgttcttaaacctcctttgaatgtgcatgttattcctcgcaacacaagaggcatatgtggagcatatcggacctaacaatgtgtccaaatattccaaacggtcaaggtataatataaaacaagtgcgagctctatatcacaaactttgataggagtaaagtataatagatatggatacctgaagatcacggatttcaacttcaccacgtgaaggccatgattgctcaggtcggtttgattctatcacaagaggtggttcactgggaacacttgcatattgaagaatcctctctaccgatatgattttgttctcaagattacagagagtccaaatcagccaagcttgcagagtattcaaactgagtccataagtcacggctaatcccgcgagacttggatcaatcactccagtaggtatggagaccaagaaaaccaatgaaaagacaaatgtaagtgatgacaacatatcaaggcgaaagcaaagccattccattgctccagctgtatagaatttgggcctagagtaaccatcacttagcctcatgttgtcagaacggaatctaaattcttggctgaaactcctaatggttgtcgcccctgaaatcgtttcagaaaaatgctgaattagaggagctttgcatactccaactaaccgcgaaagttctcgtgctgcagctatgtaataccgctgcaaagttgaaagctttttgtcacaacttcatcacttaaataaacttgacttaattttgtcagaatcaacaactcttatggaagactaaattgtaaagtttattgaaaagtacctgataccatatggaggcagcaaccacagggatgaagacgagaaaaaccagccaagaaacttgagacattactccaatgattccaataagctgaatcactgtgatagcaactgatccaaattgatacggtagttccaaatctactgcggattggtcggtagaagcctatacaaggaaaaaatggaacacaatgattaccaaatagatatatatatggaaatcctcaaataaggatagtggccagcgacgtactctactcatgattcttccacttggagtggaatcaaagaaagacataggagaacggaatatgcagtgatgcattttatgaaacagttcagtagcagtcttgtaaccagcagtgacaagaagcgtggctctaagaagaatgcagagggaacttccaaaggccaaagccacatacacaatcattaacgtggaaagtttcacaggagcttgcacatcctcagaaacaggagtagcccaagccatccagtagttgcttccaatctgtagaagctgaaagagaacttgccccaacaatatgaaaggcacaagagctcctccatatgccagtgtgatatatttccagtacacatccaaagcgacactacctttctccctctcttcctcttgaataatttgtctttggggctccacagattctaatttatcattcttcagatcctgactttctagtttctcatcaacagcgatagcatctttcacaattacattttcttggcctaaagctgatttctcagaaacagaattggcatcaacagaatcaactactgcaagagcctcctgatgcgcacctataagctccatgaaatcagttccagagttgaggatatcattgtattttccagcttggctgattctcccatctttcatgacctgaggcataagaaaaccgattttggatgatttcatattctcagtgatacaaaatatagactatataagaagataaaagatagtaaactattcacataccagtataagatcagcagcaggtaagaactcaacttgatgagtaacatatataaccgatttggaacacaaaagccccagtagaacttcctgaaataagtatgagaatgaaaatcaatttgatacatgattgtttagagaaggagacatcacaatcacactaatggctaagagagaagattgtaccttaaagagatgtgaccctgtgtgtgcatccacagcgctaaaaggatcatcgaacagatagatatcagcatcttggtagagagcacgtgcaatctgtatcctttgcttttgcccaccactcaaattaatgccgcgttctccaataacggtctgatcaccgaatgaaagtatctccagatccttactcaacgaacatgcttcaagcaccttatcatatcgttctctttccataggtttgccaaacaagatgttatcctcaattttaccactctgaatccaaggagattgcgcaacatacgcttttgtcccacaaaccttaagacttccagataccttgggtacttctcctagtaaagatgaaagtaagctcgatttcccagagccaacggtaccacaaactgcaaccttcatcccaggaaagaccttgaaatttatgtctttgagagtcgggttagaggatgagacatcccaagataaagtgctgttgatcacttctactgccacgtctgaacttcccttaggaagcctctctacaatgtcaggctgcaaattgtccaggcaaaggtaggatgcaagtctatcaagagagactttagtctgcacaatcatggagatagtgtcgggaagattgtagatcggctcttgtagaatcctgaaggttgcaagtgcagagagtatctttcctgattcaagggggattccaagaagtatacaagcaccaaaagtggagactgacaccagagtaggagccccccagaaaacaaaactaataacagccgagttatacacatactttttcagccatccttcctcagatttccgaagatcaaaaatcttggagagaaacttcatttcccatccctgaagcttgagaatcctcatgtttcttaagatctcagatgttgatttcatccggctatccttagcttccattaacttctcctgaaacctctcttgcattctcccgaatggaaaatttataagcattactataatggtagcaactaaagccgctattgatgctagtccaagatttctatacaagatccacagagctagaccgacttgtaacaagaccatccaggggtcatgcatgtaccaactgaaattaccaatcctctccgcatccacagtcatgaaatttataatctccccacttgtgcgtccttgctttgactgacatgaaagggtcagacccttttcatatatcatcgcaaccaaggctgatctcatcctaataccaaccttctgtagcctaaagaaccaatgtctctgtgaaaggcactccacaatcttagcagcaaagaaagtaatgactagcacatatccttcatggttatactgcctacgtccattaaggtattgcacgaaagtatcaatgagtgctggcccaacatatgatgcaaccgtgtagatgaaagcaaagaaggctgtcactagaatctcccactgagccgtaaaatacaaggcttttataagcttgaacgtggtaacgccacttctctcgcccccatctggtgattcaagcatactccgaaacttaggagctaacccgactacgctgtcagtatcatgaagctgcggaacatcttctagatcaagggttttcttgtttccaatgtctattaatggactcatccatgagaaagtcaaaagactgagaatgccagctctcgagtaaggagtagcctcaccactcccattggttttatttaactcaacgctgtcatcaccaccaacacgagaatcaccaccgttcaacagaggctcttccaaaactccattgctgttgcttctatctttcttgaggacagccacgtaaccgagaaacacagcagcaataaaagcgactatatcgaacactagaaggtgaacaggtacggtttcacgtctctcgtacatcacaaaatctaccacaagagagtagcaagagaccactagatagaaaaccaaccatagcctaagtaaaaagggagcctttttatgctcacaatctctgcagcgatgcaaacaaatcgacaaaaccccccaagaaaccattcccaaaagaaacccaagggaggaaactagctgttcattatctaaccagccactctcgtaccaatagaaaccactcaacgacatcaacacgagattaagcagagacagagctaaactacaaaacagagctgacttaaacccaaaatccctcctatctttcaaactctccgtaacaccactatcccccctaattttcttacgaacccatgagaaaaacaggaccagcaacaaaaccgagtgtaagaaaccagaaagccatctcaggaaaagaggtttcagaaggaaagacctagaatccagaggcaaaatagattccgaaaacgagaacaacattgctaacgtaccgctacccgtcgtggaaccgagaaagtccatggctttgagctctctgttctctctctctattctctctgttttccaatgatttgagaaaaaggtttgtaattaaataaatatggaggcgagttttggaggaggagaatacttatagaaggagagtggagtgatgatggagacagtatatcttggagagcacgctcacgaagccaagaggaagaagaaggagaaagagacaacgctccgttcctctcctctcaaaccccaccagagcactttggtaacactttgtattttacctctttcacgggtctttgacaatctattttttcaattcattaaaatgttgaaaaaaaaacaaactttgattactgttttttagccaaaaaaggatattcttttaatatctctctgtttttgttactatgttttttttcctattcttaagacgagctgatttgttgccaagttattgatacgaattgatttaattgaattttgaagaagcaaaaataaaaacaaagttggcacctactaatagtacctttagaactcttgttgttttatccgtatttttcattcttcatataataatgtatttttcttctacacctctccaagtattttgagttgaaaaattgtattttacttctatttgatcttctcattatatcaaaaattgtattttggagctgttcaattcgatttagttgtttttgtattaaaaaagaagagaaaatcgatttgttaagctttattaaaagaaatttctttatttttatatgtctctcattgcagaagataggggatagaactcctttttctccaaagcaattgctgacttttcaactagtatcctccatgtctctctgatgacgtacgaattacctttaactaaagttgtcttcttagcttgtggttgtaaatttaagatattagtacatattataagcttcagtttcactttatgtcacttttttctatctcacatgaatctgtttttcttttctttgttgaaaatctgacacactaatacattacatagacgaaccttaccaatatccgtgcgttagatttccttcgactcgttattcagtttgattcatattctacaaaacaaatcacaaatactaaaaacaaatcttctctaatccactcaagaggtgaacgtgaaaccatttaacaaatgtatacatttctttaacgtaataaataacaacgcataacccaacaactaagttatcatattttttgggttaagatattttggtaaatggaaaaataaactactataaagtttggaatatttgggaagttgtcacagtgcaaaaatttcttgggaaggaaatcaagaagattcatagaggattgggctgcaaggaaatgataagtctctgtatcttgtcagtcaacggctgtgtcccacaacatcattctcatctcataatattactttttgtaactatgatttaataataatatggtccgcattcaaattcatattctaataatcatgttatcattccattagccgttaagtctatcacgatattggagccttgtatgcatgtatgtggtcatagctactggactagaaaggccaagtctacttttttctttcttttgacaagtctttgtccatactttatttttccacttcaattatgccattttcatggaagtttcatcagcttacaaagtcaagcacaaacgtcagatcacaaattacatagaaacacgacaaaggctagacgataaacaaacttgtttggtcccatttttttatggatctttgattctatcagcttcttttggatttggattcagaacttgttgtgtactctgccacaagctttgagaataatgacgacctgtcttctagcaatctcgccggtgaatcatgttctttgataagacctgcatttaggatacataaaacagatttaatataagtcttctagttataaaagcgtaaatagaagtgtataatcagattcacaaccttggtctaggagcaggaccatatcgctgtctatcacagaagatattctatgtgcgattgttatcactgtacaatccgcaaagtggtgcctcagagtctcctggatcagattatcagtagcggtatcgatagaagctgtggcttcatcaagaaccagtaatttgcttctcttgagcaagactcgtcccaggcacaccaattgtctctgaccaacactccagttctgtccattctcactaactaaaatataagagattcatttcattagatgtgataaccagattcaagatgactcttgtaaacaatagttttattaacactaaccaggggaatccagctttagttctttcttccttacttcgtccccaagttgacaattgtcgagtgcctgaaaagaggacgagaaaatcgtgtgagaaccttccttttgttatctgcagaaacatggaaagaaacaagagccaacaaacctcccagatttggtcatcagtgtattcctcaagagggtccaagttactacgaatcgtgccttcaaacatggttggatcttgaggtatgatacttagtctagaacgaaggtcatgcagcccaatggacaagatgtttatcccatctatcctgatttctcccgctgcaggttccacaatcctaaaaagggtttgaattagagtggatttgccacatcctgttcttccaacgattccggttttcaggcctcctggaaaagtgcatgtcagtccatgcagcaccatgggcaaatgtggcccatatcgtacttgcagattacagatagtaatctctccacgagaaggccatgatttctcaggccgagttgtttcaatcacaagaggtggttcactggggatgtttgtgtattgaagcattctctccacagatatcattttgttctcgagatcacaaagcgtccatattaaagttgcttgcagggtatttagattgagtgcatatgtaatcgccagtcctgctaagcctttaagaagcaaaataccgagaaaggcgtgggagatttttagttgtgcatctgcaccaaaacaaaatcaataataaaaaggggtggtgactcacttggattaatgactccttcaggggcagaaactaagataacaagtgaagaagcgaatgcgaaagtggataaaagttcaaggcggaagcagagccattccattgcaccggtcgaatggaacttcagccgtgaataacaatcactaagtctcatgatgtcaccacggaaccttggttcttgatcaaaactcctgatagttgttatccctgaaagtgtttcagaaaaatgatgtaccacaggagatctgcttattccagctaatcttgcgagttctcgagctgcggatatgtaatattgctgcgtccatagattaaattaacaagtgtgagaaccacaaaagcattagtatgtttcatactattaagtaagatgctaaaagttaatttgtgacttatgtattatgaaaattacccggtaccaggcacatgcagcgacgacagggatgaagacaataaggacctgccaagcaacctgtactatcactccgataatccccaaaatgttaatagctgcgatagcaacatatgcaaattgaccgggtaatctcaaatctgcgacactttggtctgtagaagcctaaaccaaaattgaaaacagagtaatcaggtaaaagacgtcgtgtaggatttatttttaatatggccactttgaattttgagtaaccaaacatttggagttacttactctattcaaaattcgccccattggggtggcatcaaagaatgacatggaggcacggaaaatgcggagatgcatttgggtgaagagttcagtagccatcttgaaaccagtcatcgcaaccagcaaagctctgatgagtatgcagaaggagcttgcgaccgctagaagtacatagactagaatcaatgtgaagccgctcactggaggttccacgtccttggaaacaggagtcacccaggtcatccaataattgctcccaatgctcagaagctgaaagagaacctgtaccaccaatattaaaggaataactgctcctccgtatgctagtgccatgtattttttgtacacagtgaacccaacttttcccttctccctttcctcttcttgaactagttgtccgcttggcttgttatccgaaccattctcttgtttttctttatgatggagtacttcgttttctttgtccgtagttgatttttcagaagcatagcctgtttcacatgaatcaattgttgctaaggcttcagtgtgagctcctacaagttccatgaaatctgttcctgaatcgagaatctcatggtatttccccgcttgtgttatcttgccatctttcatgacctacaaaaattaattctaaatatataaacatgtgattagaagatgcatcggaaagatagtaagggataagtcacaaaccaatataagatcagcttcaggcaagaattcaacttgatgagtgacatatatgactgtcttgtgtctcagaagccccagcagaacttcctattttaaaagaacaatgagagatcatatcaaatatcagaagccagtacaaagtatattgtacgattttttatgtacatgaagataatcagaaagaaagggagcattataccttaaagagatgtgatccagtatgagcgtctactgcactaaaagggtcatcaaacagataaatatctgcgtcttggtagagagcacgggcgatttgtatacgctgcttctgcccaccgcttaaattgatacccctttccccaataactgtctggtcatggaacggaagtatctccaagtctttatttaaagaacatgcttcaagcaccctatcgtaccactctctttccattggcttaccaaacagaatgttctcttcgactttgccgctttggatccaaggtgattgtgcaatgtatgcctttcttccacaaactttaagatttccagatattttgggaacttcacccagtatggatgagagtaggcttgatttccccgagccaacagtaccacaaatagctacattcatgccctgagaaactttgaaattcatgtctctcaatgtcgggattggggaagagtcatcccaggagaaagtaccattactgatttccacagccatttctgaacttccactaggaagcctccccacaacatcttgctgcaagtcatctagacagagaaaagatgcaatcctattaagagataccttagtttgaacaatcattgagattgtttcgggaagtttgtagattgggccttgcagaatccggaaagttgcaagagccgccagtatcttccctgattcaagaggaattttcagcaataaacatgcgccaaaagctgttgcagatatgaaagaaggtgccgcccacaaaacagagttgatagcggacgaattgtacacaaacttttttagccagcctgcttcaatatgtctaagttcaaggatcttagaaagaaacttcatctcccatccctgaagtttgagaatcttcatgttcagtaagacctccgatgttttcttcattctgttgtctttggacttcatcaaactgctctgaaacttctcttccaactttgcaaagggataatttgccagcataactaaaatagttgcaggaaaagctgcaattgatcctaatccgaggcttttatacaagatccataaggccaaactaacttgtaaaacaagtatccatggatcatgcataaaccaactaaaagcactgatcctgtcagcatctactgccatgaggtttataatctcgccactagtgtgtccttgcttcgaatgacatggaagggtcaaccccttttcatagatcatcgaaaccaggaccgatctcatcccaagcccagctttttgccccctaaagaaccactgcctctgtgtttggcattccacaagcttagcaacaaagaaagttgtcactaacacataaccttggttcttatattgtctgttaccattcaggtactgaacgaaattatccatgagatatggtgcaacgtagcaagacaccgtgtagacaaaagcaagcagagctgacaaaacaatatctcgccacactgagaggaagagagccttgattagcttaaatgtggtgatccttctttcaccatcgtcccattcaagcttactcctaaatatccaaaataggctctcagttgtgtcactacggtcaagttgaggaacatccttgatgtctatgattttctcatttcctaaggtaatcaaagggctcatccaggagaaactcatgcggcttagaatcccagcttttgaaaaaggtgcagtgacctcttcattatcactagattcagcactgctcaagagtggttctttgagaaggtcgatcctttcaccttctcctttcttccacaagcacgaacaacagagaaacaagccagcgcagacgcccaccaaatcagaaattacaaagtgaactgacaccatttcttgcttcttgtatagaacaaagtctaccacaagatggtagcaagaaaccacgaaaaagaaaacccaccaaactctaagcaaaaatagtactttttgctcacaagaattagtgtatcgaccaaacaggtaaacagagatggaaccccaagtaagggcagccaacagaagatctaagaaaggccaaccatttgtatgccagtgaaggcaacttagcaacgaaagcacagaataaaacacagataatgagacacaacaaataagaaccagtttattatacgagaaagatatgtgtttaaactcttcattcatgatagcatcagtatcttcacaagctactctctttttgaaaagccatgaaccaaaaagaattagcaacaacaccagattcaagaaaaacgaaagtaccgaaaggtagatgggctggaggagaagagaatcgataggattttccatcaggaactgagtgttgaccaaaatgttcactctgaggacaagatatatctatatatatataggctactgagtcaataaataatattactttcgcagaccaccaagacaaaagaacaaaagagaaaattatatatatatacgatgacgccgtaaccattaaccaacaaaacatgaagagtttaataatgttaaaagactcccttctgaaactccactgatgcaaacagtggaccattctgagaacatagacagatgtgtagaagcagatccatcaaaattttgagttagaaaaatcacaaacatgttgtaacagaaacagatgatacttactgatggtaacaatatacgtacccctgagtgctggcaaatggtaaattcttcatttttcccaccaaatagatcacagcaaccagctcactttgacaatacggtcaggcggtgaatctaatttctcaccttaagatggaaaagagtttcatcgtgaagttccctgagatcctaaaatgtcatgcctgtgatttaaaaaaaattgtaaaagagagaaatagagaccaaaacgtgttgtaaactgataatgtaattcgttcctcatcagagagaaaacaaacaaatactatttcttacaaattattactgttttctttctgaaacaaacacgacaaggcaagattattaattttattataactagtttgttttcattgaacttcttttgaatcttgaatccgaacttgctgtgtactctgccacaagctttgaaaatgacgaggacttgtcttccagcaatctcgccggtgaatcgtgttcttctattaaccctgcatttttagatacataaccaatcttcatctaagccttccttctgatagaacaaacgtattaaaaaagtgtatgatcattaccttggtctaggagcagtaccatatcactgtctataacagatgatattctgtgtgcgattgttattactgtacagcccgagaaatgttgtctcagtgtttcctgtatcagagtatcagtcgctgtatctacagaagctgtggcttcatcaagaatcaatactttgcttctctttagcaagactcgtccaagacacaccagttgtctctgaccaacactccagttctgtccattctcacttactgcaatattagagattcctttcattagatgtgttttaacagattcgagatgactcttgtcgactatagttttagccgtactaaccaggggaatctagctttagttctttcttccttatttcatccccaagttgacacttgtcgagtgcctgaaatcagagcaacaaaaatcgtgtgagaaccttcctttttctatctgcagaaacattgaaagaaacaagagccaactaacctcccagatttggtcatcagcgtattcctcaagagggtccaagttactgcgaaccgtgccttcaaacatggttggttcttgaggtatgatacttagtctggaacgcaggtcatgcagcccaatggtcaagatgtttattccatctatcctgatttctccagctgcaggttccacaatcctaaaaagggtttgaattagagtggatttgccacatcctgttcttccaacgattcccgttttcaggcctcctcgaaaagtgcatgtcagcccacgcagcaccataggcagatgtggcccatatcgtacttgcagattacagatagtaatctctccgcgacagggccaagatttctcaggcctagttgattcaataacgagagatggttcactggggatgtctatgtattgaagcattctctccacggatatcattttgttctcaagatcgcaaagtgtccatattaaagttgcttgcaggctatttagattgagtgcatatgtaaccgccaatcctgcaaagcctttaagaagcaaaataccaagaacgacccggaagatttttagtcttgaaagtaaacaataacaaatacaatgattaaagggcggtgacctacttggattaatgactccttcaggcacagaaactaagataacaagcgaaagcgcaaatgccacagtggataagagatcaagacggaagcagagccactccattgcagaaatggcatggaacctcagccgagaataacaatcgttaagtctcatgatatcagtgcggaatcttggttcttgatcaaagctccttatagttgttatccctgaaagtgtttcagaaaaatgctgcaccaaaggcgatctgcttattccagataatcttgctagttcccgagccgcagatatgtaatattgctgcatacatacattaaatcaatatcaagactaaagtgagaacttcaagaaagttagtatgtgtagtatcaatgattgcattaagtctcctagattatcttatcgtgatttccatgagctatacaagacaaaggtatgaagctaagctttaatctaagtttgtcagtgttatgaagaatacccgataccaggtgcatgcagcgatgacagggatgaagacgataaggacctgccaagcaacctgtcccatcactccaataatccccaagatgtttacagcagcaattgcaagatttgaaaattgacttggtaatctcaaatccacggcactttggtctgtagaagcctaaatcaggattgaaaccacagtggttagattaagagtttgcaggatcagttttggaattgccagtacaagtcgagtaagtaaagatagatggttcttactctattcaaaattcggccaattggggtggcatcaaagaatgacatggaggcacgaaaaatgcgaaaatgcatttgattgaagagttcagtagctatcttgaaaccagtcatcgcggacagcattgctctgacaagtatacagaaggagctcgcagtggctagaaatacatagactagaatcaatgtagagccactcactagaggtttcacatccttagaaacaggagttacccaagccatccaatagttgctcccgatgtttagaacctgaaagagaatctgtacaaccaatataataggcacaagtgctcctccatacgccaatttcatatacttttggtatacagtgaacccaactttgcctttctcccgctcttcttcttgaactagttgtcctttcgggctaggcaaatcttcctcttgtttttcttcatcgttggaaactttgctttctttgcttgttgttgattgtgctgaagcagatcctttttcatatgaatcaactgcagctaaggcatcagtgtgagctcctacaagttccatgaaatctgttcctgattcaagaatttcattgtacttccctgcttgcgtgatcctcccatctttcatgacctacaaaaatgattatctgatataataaatatgtaattagataacgcattggaaagatggtagagcgaagaagcccaaaccagtataagatcagcttcaggcaggaattcaagttgatgagtgacatatatgactgtcttgtttctcagaagccccagcaggacttcctgtaacagaaacgataagcgtaagagatcatatcaatatgcatagcagaagccagcaaaaagtaaaaggtaagagtctatatacttcaagtcaagataatcagaaaaagggaaaatgattattaccttgaagagatgtgatccagtatgagcgtctactgcactaaaagggtcatcaaacagatagatatctgcgtcttggtaaagagcacgtgcaatctgtatccgttgcttctgtccaccgctaagattgatacccctttctccaataactgtctgatcacggaacggaaatacctccaagtccttattcaaagaacacgcttcaagcaccctttggtaccattctctttgcatgggcttaccaaacagaatgttctcttcgactttgccactctggatccaaggcgactgtgcaatgtatgcctttcttccacaaaccttaagatttccagatattttgggaacttcacctagtatggacgagagtaagcttgatttccctgaaccaacagtaccacatatagcgatgttcatcccatgagggattttgaaccttatgtctttcagcgtcgggatgggtgaagagtcatcccaagagaaagcaccattgctgacttccacatccatttttgaacttccactaggaagtctctccataccatcttgctgcaaatcatcaaggcaaagaaaagttgcaatcctatcaagagatacctttgtctgaacaatcatggagatcgtatcaggaagtttgtatatcggagtttgcagaattcgaaaagttgcaagagcagctattatctttcccgattcaagaggaatcttcagaagcatacaagctccaaaagctgttgcagaaacgaacgaaggtgcagcccagagaacagagctgatagccgcagagttatacacgaatttcttaagccagcctgcttcaatgcctctaaggtcaagaatcttatgaaggaacttcatctcccatccttgaagtttaagaatcctcatgttcagtaaggcctccgatgttttcttcatcctgttatctttagactccattaaatttccctgaaacttctcttccaactttgccaagggaatatttcccagcataactaaaaacgttgcagcaaaagctgcaattgatcctagcccaaggcttctgtacaagatcaataacgctaaactgatttgtaagacaagtatccatggatcatgcatataccaactaaaagcactgattctctcagcatctactgtcatgagatttatgatctcaccactggtgtgtccttgctttgaataacagggaagggtcaagcccttttcgtagatcattgaaaccaggactgatctcattccaatcccagctttctgcaacctgaaataccaattcctccgcgcttggcattctacaagcttagcaacaaaaaaagttgtcactaaaacaaccccttgatttgaatactgtcgttgaccgttcaggtactgaacgaaagtatccatgagatacggtgcaacgtagcaagacactgtatagacaaaagcaaacagagttgacaatagaatatctcgccacactgaaaagaagagtgccttaataagcttatacgtggtgatccttctttcaccatcgtcccattcaagcttactcctaaatatccaaaatagtttctcggctctgtcactattgtcaacttgaggaacatcctcgctgtctataattttctcgtttcctaagacaattaaaggactcatccaagagaaactcacatggcttagaaacccagcgttcgaaaaaggtgtaacaacctcatcatcttcggccttatccaactgcacactagtagccgcactagattcagctccattcaagaggggttcttcgagtaataagttgatcctttcaccttgtccttgcttctgcaaacatgaatagcagagaaacaaccccacgcttacggccagtacatcagacaataaaaggtgaactgacaccagttcttgcttcttgtatagagcaatgtctaccaaaagacggtagcaagaaaacataaaatacaaaacccaccagactctaagcaaaataggaaacttttgatcatgagaataggtaaattgactacgtatgtagaaagagatggcaccccaagaaagggctgtaaataaaagatctaagagaatcatcagttcgctgcgatcccaaccatttttatgcaggttgaagcaacttaacagcaacaacacagaattcaaggcagacaaagtctcacaacatataacgaccagtttattgtatgttaaagacatatccttaaacctctcattcgtgaaagcatcactattttcccaacccaaccttttcttgtaaacacaggaaccaaacataactagcaacaaaagaagattaaagaaaatggagaacattggaaaataattggactcaaggaggaaaaaaacgataggattgtccatcgcgtaactctgtttcattaggcaatggatacgagaatattgttcaagactatcacgatggacagtatatatagagaagtcgtcaataaatatattatttcgaagacaaactcttgagtggggaataatttataattccttgacgtctcaacgtcttcccttagcttttttaatgcttcaaacctcaattcccagaaattcaaatgaaatttctttgagaaaacataatattttaaaaagtttctccgcaacaatccaaaaagatcgagacgatttcatggaaaataccactcctatctaaccccaccactttttctacaacaagttttaacagaaacagatgacacttacagaagaataggtagagttctagttgattgtagcaagcaatcctggatcctgactagtcttgttataatttcctagaaagctgtagtaagcaaaacaaaactcaagacaataatgatgaatcttcagtttcttcccaacaatctgatcacagaaatcatggtttaaccaaataagcacttacatactaaacatatcttaagtctctgctaatcagaaaccaaccacaggaaactccactaaacagagttcagagtttccgagtttactttccaatcccatcttaatcagtgttatcttatggagagacaaatgatctgattatggaaacagcatcatcgcatatcatatacttcaccagcttcaataacagaagaagccgagagaacaatgaaaagccataaacaacaacaacaaccaaaaacaaagactttttcaaattacataatccgaccactcggatatatgcgacgtctggtccatagtcaaaccaggaatcttgtcatgcgttttcggattatctttaccaccaagcaacctcgccggatttccaacagccgtcgtacgcggcggcacgtctttcaacaccaccgaccccgcaccaatcttagctccttcaccaatcgtgatattccccaaaatacaagtcccagctccaatcaaaaccccatcgccaatcttcgggtgcctatctccacactgtttccccgttcctccaagcgtaacgttatggagaatcgaaacattgttccccacaaccgccgtctcaccgatcacaatagccgtagcatggtctagcaaaatcccggtaccgattttagctccagggtggaaatcaacagcgaaggcttcagagactctgttctggatcaacaaagctaggatttttctgtcctgagtccaaagctcatgagcaatacgatgcgcttgacaagcgaggaagcctttaaagtgaaggaaacaatgaacgtagcttatacaagcaggatctctctccttaacagctaaaagatctagcttgacagattcaacaatatctgggtttccttgaagaacaccagagaacaaatcgaaaagcgtgttgcttggaagattcaaattgctgagtttaacagataaagtattcgccaacgcagcttccaacgaacgctgagaaacaatcgaagcgtgataataagcggaaacaataggttctttggcgatatcagatttagcctcttctcggattttggcccaaacatcatcgacttcagcgtcgcgatcgagatcttcaagcaaaggacgagtatggagggttttggtctgggttccattgaaggaagatcgatcaggataacggaagtagttcatgtaacgaaagccagattcatcgtcgtggtgtttagaagaatcgcgaggagaaatctggggtttaccagtgcggcaggtgtcgatgcacgcagccataggaggaggaggaggaggagaaggaggaggagataaagtatggtgtttgaatttggaggaaacaaaagaaggaagaaggaaagagtgatgattgatgtgtggagaagatgaacggagcatatatagggacattgtgaagtggcggcgacttgtgaccggcaacattttttttttttctcggccaaacaaaaaacggaaggatgtgaacaaatttatgtattttggagattgtttctctctctgtcttcttctttagatttctttcctttttgaattcgattcctaattttttttgtattaaaattttttgactgtgtgtgaacactagtggccactaggagtggagagactgggtgccaaaaaaagttatgaatctgttggtatttttattgcaacttatataagaaactagataaggtcaggtgtaagatgtaaatataattttttatcaataatatttaaattttgaatagtaaaataataatttatatattgttttgatatataattttgaatagtaaaatagtagttttatgcattttattttattatactcattcaatcttattgatgatatttgaagtctaaatagtaacatacacattttttctttattataatttagtatttagaataaaaaaacaaatttttatcttacacattcaattttgtaatacattttaactatctatttcataaaaaactcgattttaattctacacacttcatcttacttgataataatttcatgtcaaaataatatttatatgagatcaaatctatatcttagttaatattaaaaattattaacaattaacaaaacataattaataataatacaaattttgttaataccatatatattaaaaatttgaccaataacatatatatattttttttgttaattatccttttggttaagaaaaataaaatgtaatcttttttagatatagtcatatgaattagtatatgttaataatgatttattttttagttatctaattctttaagaagaaaaaagttaattgatttcttttttagtatttctattttttttaaaagaaaaaagttaattattttcttacacgtatcaacatctgatcgatagacttgacacgtggtataatcgtatgagttagtaactttgaaaaccataatttatataataagatttgtttatattttctttgggatttaatttagaaaaatgtgtgtaatttatttttgaaaaaaaatggcatagcaaatcgaatcattgttttaattctcgtgcgattgaattaacaaaaattaaaaggacatatatgtcgactgtcgtaataaagtagcacttgtttggtaaaagaattttaaaaaacacatgtttattatcattttaaattgtggtcagagtttttgtgtacatcttcttttcgggagtgaggctcatctatcacatgttcttttttgtgacacctacttttttttggttaccatcaacccacttttttgttgttcattcttttttgtatataccaaaacaacaaactataacgactaaaaaataaaattatcacaatgaaaagaaaaaaaagaatatattatcacaattcactatgacgtgaatacgagcaagtgcaatcccatacaagtgaaatttaattttaaatatttcattacctttgttcaacacaagaactatatatttcattgccaccttcgagatatataaaccctttttgttagacgtgtataatagacctttcataaatcaatttaagactaatttgacttaactagtgttgtttagtaaggtttatatatgcctagttgcttatatttttaggtaagaatatatgtttttttttcattttgctttgagttttatgctttgtggttttaatatcttttttttttctatatggcttagactccaataattttttgtgttcctcccgtttttgattccgagtatttattcattgcatatcggctttagtttctctttttttttttttttttttagtcactcccgtgtgtactatatacttaatttcaacaaatttatcaatatcaaatcagttgacaaaaacaaagaataatttgatttaactttggtgtttttgtaattataaaatgaaataaacgtgacgtatgtaatgacagatgacttagttagtctatagatccgtgaagccatcgtcctattttcaagccaaagtcacttgaatttatcatgtggctctcgctctttctgatcaattaaatagctttatcaattaacataatcatatgatgtgaaaaccaaaaaattaacataataaaaagcttatatgttaaaacgaagatatttgactaccagcgacttaataaactatatccaagtgagattgtgtgaaaaaaaataactatttgttatgtttagaatcaatttcttcgatgggttttagataaatattttatttaagtaactgccatcccaaacaacaaggggaaaatacaaattgaaggtgttgttttctaataaaacaaacaattggtattacagaaattcaaaatcagtgggaacccctccaattattttccgacaatcagtgaggtctcaaaatactacaaccaaaagaagaaatatatgttttcttttcttttttttttgtcttaaaattatattttgtttcctttcagtttcagccgttgaaaatattgtctcttcgagtgtggaaaacataaaaccctgtttgtttgatgcttctaatgtggccatgtattttcgatcaggattagtgaacaataagactgaattagaacaaagcaattctgatatgaggataccataatcacgaataatgaatcacagctaaacttttattaaagttagagaaaatagtgactcataagacatagtatactagttcatatcagtgttattatcaccttacatatttgatccaatatgagtgttttggtatatcaatatgaaccagagtttaaccatttggttgaacgcaaaatagttttgaatatgtttatgcaaattgcaataaacccaaaatggtagtaaaagaaaatacaacccataatggtactacttgaaagtttatcataaaaccgatctcgtaaaatataagattatggaagcagaaattatgtatgatttcagtaatgctgtgaaaaaaaaaagcaatttattcgagtgtttttgagaacaaactataatcaaaataaataataatggacggtccatgttggtatatcgtgggaatatgccttaactttaacgactattataaaccgccacatcattgtctcatctacttaaaccaaattcaattttggcgactattcgttttctttcttctttggtcaagacattatcttacaatgaaccacttcttactataccaaaaaccatttcatatgattaaaataatgatatagttgtgtgtatgattgaacatggaaaagaatattcttcaactttataatattggggggttgacaatttctgcatcatccaaaattccaaattagataagaaaaagcgccatcgacttatcagacataaattcgaaaccattactgttttttcccttggatcgtttcgtaagcttggaaaggaaagactggtaaaacaacacttgcaggttttaattggctgctaagaaaagagacgaactgagtctagaggataattgataaatgaaatgtgttgtgacaaaaaattataatttccctattgagtttgtggataaacgaacttatacgtttattataataatgaagtcgctttcaagattccaacctcctggttttaaaataactcaagttgtgcatcttcttattcctactataatactactataatacttatattcaaaaaaaagattccactttgaatacaacaaaaataaaaaaacttatcataatggacacaggcaaactgcataacaattagtaaaacaaaaacaaattcctttgaacttgcttaattaaggatatgttcatcaactaagaaccaagcatcgctaaagatagattccaaggaccagataatacaacttacattttcgttacaaaggttctcaaaaaagatgatacaaggcttaccagttctaagcaatgtagttgatctgaaacagtctgttcattcaatgcaaaagtgcccatcacatctgaggaagaaaaaacactttggttaagaacaagcatcaagatcttgatggtcaacagagaaagattgtaatttgatgaagttttgtttttgaggataaatattggagcctatgtgcagtttcagtagctaagacacatcaatattcaaaaaccattaagaagagagatcactttttttgtttgttaccattgtagttacgcttcttcttcagagcttcacttccacatcgacaccagcaggaagatcaagttgcatcaaagaatcgatagtttgagcagtcgggtagagaatatcaatcatgcgctggtgtgtccggatttcaaaatggaacctagcatccttgtgaacgtgaggagacttgagaacacagtagatacgcttcttggttggcaatggaacaggacccatcgtctttgcattggtgtttctcgcagcatcaagtatctgcttgcatgagtcctcaataagaggcacccagtatgatctaagcttgatcctaatcttttgctttggcgccatctgataacacaaaaataaatcaaattaaaccaaacacaatgaaactccacaagaccccttaaaacaaaactctattgtggcaaatcttatgaagataccatctaaagacgatcaagatttctatacaattacttctcctttcctgtatatacaagatgatatctacttgaaggcatttcacacaaatgagactctttatcgctctgaaaaaacgtagtaaaccaaagaagtctattgatctgacaaagatagacattgaagacatcaaatttgaaaatttgcgtatcaatttctagcagtgacctctaacacagcaatgggcattggtgttagaacagatatgatactttttagcgctgtgaaaacgtagtaaagcaaaaaagtctactgttttgacgaagatggacacagaatttagaacacaccaatgcacaagtactcgtaaaatctgtattctagtaagtgagctgtaacagtaacggaatataccttatccgcgtctacactgatggatgaagagctcggaacctgaatcacacagacacaaagactattattaacagaattaacatcaaagtgctaaatgattctgcaaaacaatgtctttccccccccccccccaaatttcgcattagctctgcaaacaatcgaatccgagactgacagaggaaagagtgtacctcagaggcgggttcatcgagaatttctggagttggatctagggtatcgggaacagcgaagaccttcgtaagcgagacggatggtttcgtaaggacgcaggaactaaggccgccatgggtagaagatgaaggcagcagagagactttgagtctggtagaagaaggcgaagagcttggaatgccgaaagatggcaatagaaacgacgatacagtagaaaccgccattgaattttcccaaaaccacgaatcgatttctcttattcttcttcctcttaacgttcgaaggatgaggtttcttcttcagcagcttcttcttgagggttatccattttatccaaaacctttttctctcttttttaaatgatgagatattatttattctaagcccattaattcattaaaaggcctacgcttattataaatgaatacccattaggcccaaattgtatagtttctgttagggaccaaaagtacccattaggcccatattttatagttcttttggggaccaaaaatattctaacctagtaaaatatgattcatttgtctttcggtattttctttcttgtggattgtgatctgtctttagaagattcttttgtatctcataaatatcttttggaaaattcaacacacaaacattcgtgaagtagatggaaaatttaagaaaagtggaagacaaaatgaactacttgacaaacaaaaccccatgaaaatatgcaatgaatgtggaaaaaaatggacaatataaatattcgatgaaataatacaaactcataaaataatattaatttgaatacaaaagacaataatatcaaggaaggattccgtagttttgatttttgacttttaaatgcattgttcttaattttatctgtaattgtgtgatccataatctgtaaatatataccttcaaatgtgtgatccataatctcacacggaaatataaggtgttagcgtagttcaagtataatttttttttaataaaagcaaaatacatgtagaagaagcctaacaattaacataatgatgtcgccaaatccatgcaatttaaagaaggaaaatgacttaaaccaatcaaagacataaaagacaatgacatcttctaaatattattgtccacaagccctcacactattcaaagaccaatcatcccttactattccgtttgtatttgtctcaatcatgagtatttttttttatatatatcatcaagctatacatgacttaaaagtcatattcctttaccattaacataccataaaagctaagtcatcatgtatagcttgatgatataaaaagaaaaaaaatccgaattccatcagaggtcataaaagattcggaacttttggaacactaaccagaggtcgtttcgcaatgtaaccaataataggacataagaaaacatggattagttgacaaacaaacaatagaagaaacacagagacttttttttatccacataactgggaaatcacacttcacacgtggcatgcagccatgcagcttcagaacaaggggtggtttggtaaaatcatccacagatgcccattgcctttggcttaaattctataaataccaaagccgttgagtgtagtgtaacgctttgcacaattacactttaacctgtttaattccttcttcttcttcttcttattctagtcctcaccattcactcacaaaaccaaagaaaagaaaccagagagatggatcaaataaaaccggagtttctgaagaaattgaccaagtttatagcagtttcgatgtggattttatctcttttaaccagccacgacttctatttatataggttcatgatccaactcgtaacacacgcagtagataaaaactacatgttcctcctctgcaatggtctcgtagtggttgttgctaagtgttctggtttggtcgcttcgtccaaaccaatagagaaaatttggagtaataccgataaaacctttgattatggagatttcgagagttacactacgatactggagctagagtataaatctgatcatggaataggaacagagtcctttcttgcagaggaagttacagtggaggaagatacaaaacatcaagaaaccgaggacaacgaagaagaagatgacgacgacaacacattagcagataatgatggagaggaagagtgtggtcttcgtggcggatctataaacgaggaagaagaagggaacgtaggagtgatgacatcgacggaggaggagatgaataagaaattcgacgagttcatcagaaagatgaaggaagagcttagaatcgaagctaaacggcatttaatccttgtttgagtactttctaattaatcagttttgtttaagtttaatcaaacgcaatttgctcatatagagagcgagttacgttttctagcttcttctacatcctcctagcctctgtaagcatctcttttaatggaatcctttttaaatctaagtaattctctcgcgttacactttttcttgaaaattgttacctcgtatatattatgcaaaaatgaaactcgtcaaatacgattaaactacaatatgatcatatacatacaaaattatatgtttacatatttcatatcgaactccattattagttctataggctagactgatgtactacatgtttttagcggtgtgttgtctacacccgatagtttcgggggaataatgctgtccgtgcatgcacacgtgtatacctttgcatataatgaattttcaatgtcaaagaaaaacgtatgatggatattcctaattctatatgtcttttaggagatgatgtactttcgtgtaaacatgatatgtgatggattgagccatttttttctatttcttggctatagttgatttttaaaatgtttaattttcttgatctgataacttttgctgattccgtggccaacagaacatccggtaccatgattccaagcttgaacagtacgtatagatttctttaaattgatcatgggtttggtaaaagtaaaatgtacatacgcatttatcaatgttattacgtattcttaacaataatataatagctattagtaagccctaagatgataactgtagaaactttcagactcattacaaaattctaacaatgttataagttacgtcaaaatgatgtattgtgtacatatatttaatcccatgatccatcaatccatatgtacaacctgtagaatatttatcaacgagaacgaagaatcgaatatatgtttaaaaagtaatataagtttgctttaaagactccatatatagattctctgctctctgcttttagttttagacctccatactttttttttatcagttcccccactatcctatcctacatattcatcatcactagtctccataagatcatttttatttgaatattaaaaaataaagttactgtgaaatttgttgagaatcttctagtcgatcgcttagttgggttttcactttgaacaactttttgttttgttttctgaaacggttcaactacactagctagcatcatgcatgttccatttaatgtgatttatcttttctctagtcctttcgagaggtttttattaaaaggaaaacatttgatttgactaattcaattgatcaacgtgaaaacaccaaaaaaaaaaaaaaaaaaaaaaaaaaaccagaaagaagagtttaatactgaatgttacatgtatcaaacaagcaggaatgagacagttgaaatgaatggataatgaagatttggtactctattgagtatatgtaattactaatacaaaaacccgtaaattttcttggttaactagtttaagaaaacgattgaggagcgaaagatctatcgaatagtgatagactatacgattttgacacagcagaacatgtccactcccgtttatatttaaaatgaacttacttatacaactaaatatgacaaaacaaaataagataataaatgggtcagcttatttcatgttatataaaatgatattaggctttgattgcaacaagtttggcatgtaagtattctaaactaacgactttatacatcttagtttgtatcattccataagtaggtttcagttttggcgatcatctaagatataaacggcgtatgatagatataaaaaagccgtaaatacctaacaagagatgaatggtagtgtatagagcaatcatgcatatggagctgtctacacataccaaaatccaaaattaaaaaataaagtagaaccgaaagacatggagaaggaacagtaaactcaatcaatggacaaagaaacaaaaccaaaagaatcaagctataatactataacaattaatattaagtgggtccaattcctgttgagaggaaaattgattaaaccacatatacatgtaaacaatcatatgctcaataatgttcaaagctctaaagccaaaaatcatatcaatattcgtaacttactaaaagaaaaaaacttggtaagatgttatatgactttatattaaaacaaaaacagtattttgtgggaaagataataatgcattcagatgctatagtttgagttaatatggaacagtagagtaaatagatgtaattgttttcaagtatgtgtcaaagggaaggaaaccatggcacgaactacgaagctcaaacactgaaaacttatactctttgcaaccacaaaaggcaaaatgatgaaagaatgagcggtcaagtttgaaggaagaagtaatcagtaatttgttcactggttcctgtgggtggtttgtgtacggggaggttaatggacccaacactcatcactcatcagtaaaccttggaatatgaactagtgttaatagtatataagcttaaggctcattatatccgatcaaaatgttttatttttgggttttagatctaatccccggtttcattttttttttgtttcatatggccatagcaacaaagttaaagtgctaagcataaagtcaatgttgatatccttttattcttgttgtcattttattgataaaccagcaatattgaaatgaaaatgagcacatagctattgtttgtcgacaaaaaccaattgatgtgaaaacagatgtccagttgaagagataaaacatgattggttgaacatagtgaaaattatactcattctactaaaataatgacttcaaatacaaagagaaaatgtgtgtcaaggacttccacaaagttggaatggccctaggagtccattaatcaacaatttgtgttcttggttcttaaaaaaacatagaatccgcgtctataacgcaatcgctatataaaaaaacagcgatcaagaatagaataaacctaaaacgcggttttgagaccaaaaaaagaagattcatcttcctcaatgagacattacatgatcacgcatccactacccgacgaactcgacatccgatactgcggttctacgtaagagtaactatgcaacgttcttggtggtggcgccggtagactataatacggcggtgttgtatgcgggttagttgcctgccgtggtgcctccgagtgccgcgggggatttgacggcggatgagcatagtttccgccataaacatgtggcggaggaggatattgatacaacgaaggatatgcatagttaccacgggaggtggtaggaatgtaatagcctgattgaccgtaataaccaccgccgccgcgaggagtcataacttctccgtcgaaacggagattagtgatctttccatgttcaccgtaccgttcagcaacagccaacaatacattagggttaactctggccttgagtttcattgagttgtcgtctccggtgaaatccacagagtaaactcctgcaagtaatattagaaatatgaatatcaaccacaagaatcatcaacaaaacaaacacacacaaacgtagacagacacgtaccgtagacacaatgcatgacttctgacactttttgccgacaaagctggcaacctctgttcactttcatcacacagctctacagagtaaattaaacaacatttcttatttaggaaaaaataacacacatatatacatggtctaaagcagattaatcgtttggctaaccatatcgacagtgtaatccattgatgaagcttgtgaattcttctttttgttctttgtttggttgcttgatctaacagctaaagctaaacaagttaaatgggtaaaacatattgattattgttatagtttaaggcaagtgtatctgatatttgatcgaagatgaatattgccttttcctaaaatggcgttttaataggatatatcgtagttcgaaatggataatttgatatctgaataatcttgtgatgaatcctaccgtatattgctaattaattaaagattacgagattatgatgaaaatgagaaaacaaatcattcttatactctgcatcttggaaataagagattgaagaaatgagaatggatacatgcatattcatcttggcaatatgaaaatttcaactttattcaagacataaaatctctaacatttagaaaggaaagcaaagttccgaataacaaaaaattgaaaaaaaaatcacaagagagaccaatataaccatgtttccttgcaagtggactcactggttaccaaacttaaacaagtgatatcaagatacgaggtccaacataataacgcagacagttaaccagttgctaaacacagatcaagcactcttaatcgtccaacaacccagaggaagagctggaagagttcgcactcggaaagaccgagctggaatagtccgaactcgaagagaccgagccggaatagtccaaactcgaagagaccgagttggaatagtccggacttgaagagttctcccgacttgaagagaacagactcgaagagacagagctggaagagtctggactcgaagagaacgagctgtaagagtctggactcgaagagacggagctggaagagtctggactcgaagagacggagctggaagagtctggactcgaagagtcggagtcggagctggaagagtccgccgccagacttaaagagagcagaaaggaagaggtatccggacttgaagagaccggagtggaagtggtcttcgcacttgaagagactggactggaagtggtctttttcttaccagcggacaagtctggcaggtaccgaaagtaactctgtagcttgccattcttcactagctgtgttgcttcatcaatcttgcctgcacccatcaaacgctcaaccacgggtttgtacatgttcgggcgagacaggagcttgtgtttgatggcctcttcggatacctcaaccgctctatcaagatcacctttcttgcagagaagagggattaacatacagtaagtcactgtatcaggagtcagacccttctccttcatctcattgtaacatttcataacctcctcgaggttgttatcaacacggtaagccgtgattaaagcattgtatgtatgaacatctggggaaatcccttcagttttcataacatcaatcaagttaagtgcatcagtgaacttcttgttccgagtaagacctctcactctcgagttataactcctaatgttaggagaaagattcttggatttcatcaaatcccaaatcctatcaccttcaacaaacaactccctcctataaaactcttctaacagagtgttgaaagagatcaagtcaggctcgaacccgttcttctccagttcctcaaagatagataatatatcatccatagagcctttacggcaaagtgccttgatcatggtattataagtaaccaaatcaggagtaatacctagcttctctggtaactccttgaaggtcttcatagcctcgtcaagcttctttgaattaacataagccgatagaagcgcattgaacgacttcacagttctttcacagtttagctcaggcatttcatcgaacagtttgtgcgcatgttccgccattcctgagtatccataaagaagcattatacggataacgaaatcctccgactttatgtcatcgaacttcttctggtattgaagaacttcgtcgatcgttgagaacttctttgcttccctgagacggcggataaacgcactgtagagtccatggacttgccggaaactctcagactcgcaggatctcttgaacttctctactttctgcgtcaatttcgaatttttagaatccttggcgtcattcgacgattgacctccgtctcctacagaggcggtggatgccttcaatttactagggaatttggtggatttggtttggcttctgggttttgcggacttagcagtggcgattgaagattctttgaagattccatggaggcgactgtacagcgacgagcctaccttgctcatagcttcgtgcaggtggtgaaaatgtcagagttgagtgtgagggtttagggttttggacttaagagtgctcctccggctaggtcttatgcagtgaatgcgaaaaacaaaataaaacagcgtgccgtttctactcctggactacgcagcgttttttgtgtctaaatcttaaattcatgccgttctctaaccagaaaaggaaataagaaaatttcttttaactttgagaattgaaagcaacacaaacacactacagatagagatagttcaattattaaatcaccgcactcgcagtttgcaacaagacattaaaaagagggaaacacagactaaattaaaaactagtcaataagccttgccaattaactactctttgggaaagagacgaagcttgcactgcaaatagtcattcgtctttgctagctcgacaatctcttcagcttcgtcttgcttggaccctttcaccaatgcatcaactacctcctgcaggacagcctcatcgactagcagacgcttagcaaatatttccttgcagagctcataagcagactctaaatcgcccgccttacatattgcaggaagcaatgagttaaagacaaatttcaacgggcgacaaccattcttctcgatttccttgtaccacgttatggcttcatctaattttccttcactgacaaatcctttaatcatggcagtgaatgtgaaaacatcaggtttgagctcattacccttaagtttgtcaaagagactaaccatctcttctgatttattctccatggctagtcctaacaaccgagcattgtaactacggatgtctcgcttaacattcttctctaccattctagcccatatctgttctccttcctcaaacttcccttttgtatacgactcatgtaaaagtatattgaaggtgatatgatcaggtttcaaacccttgttctcaatctcatcaatcaacgcaacagcttcagtgaaggaaccctttccacacaatcccttgatcaaagtattgtaagatgcaacatctggttcaatcgagagcttacctggcaactccttgaagataccttcaaccaaatcaaacttcttggagttcacacaggcattcagtaatgcgttgaaagacaacgctgttctcttgcagtttctctcaggcatttcgtcgaacactttctgtgcattctcaaacataccgactcgtccatagagattgataatcctcgccacgaatccttcctttgacatgtttggatacttgttctgctcctccaggatctcctcgacccactcaaacttcttggctgcggcgagacggcgaacggttctctcatagacagctatattcttccggaaccactctgcttggcaggctttcttgaacttctccgtgatgaatttggggtcgcgttcgtcatttacgagggtgatgagggacggtttgggtggcgagggtgtggctgcagcagcggtaacggcggagaagaagcggcgattcgtgtgggtgctgaagctgaagttgccacgaaggagaaagcgagagagagacgacatcgtttttagctgtatgcaaaggtttttctcttcttttttttggatcggagtgttcaaaggtttttagtcaggggaacggctttaatacttcaaattaggtttggtaacaatataaagcaaatgaaccctaaattacttttgtattattcaaaatttcaaacttattactcattagtcattagtgaatgtactttgtattattaaaaattaaaaactgagaattattttttataatctgtatatttatgatttttccattaaaactatgttcatttgtccattctaccaatgcatttggtttgcactaaaaagcttagaaagagtcataaaaaaaacaatgagcattaccttgagttggagactagttatctcgtatgaagctcaaggagagcttacttcacgacgaatcttagaaggaatatatacctctgacaaaaaggacagtgagtgaactgagagtgcttcgatctcaaacttgacccctcttttcaacatcgtttcaagttccaaccttagacgaccaaaatcgttttgatcaagactagtttttgtcatttggttgaaatgtaaatataaaaaagtcagggaagtttttcatacctccattgtggcatttcacgcttcaggtagcatctaagcaacattgcttcagttcttttcttatctgtccggggaagttgttacaatctcaaaaaaggaagcagtgaaaaataggaaaatctaaagatttaaggcgataaggtgtttaatgatctcttaccttcttctgtcagtggcaaaagacactgtttgggaacactatatacctcagagtctgaaggaaaagctcccaaccatttcatatctggtgctcgtaatgattcaatatcataggccatttgcttacagaaagaaaacaagtgacataaggaaaatggttcaaaatgaaatgggtcagtgccatatcacattatcactatcaacaaaaacaatgcaagcggtgaaattttccgagttcagtcatctatattttgtaacagaatctaaccatggagccaaaacggtatgtggctaggatctcaaagccatatggatcacagtcgactagacaatgcacaggtagatgcaacttctccatcaggagtcgcaagaacctggaaagaatctgtgttattcgctgatatattaatcaatagaagataatgtctgataaaatagtattccaggaacctgggattaagttatgtaccttcttgttgagacatctggatatcctcttccctgccaaaaacaatcgtaactttgatgtcaaacataaaatggaaatgaaaactagtcaaaactgaaatcagtaagaatgaagcagatttcttactgtgataacaatgcagcggttcgtcttgcaaaacatgtcatttgctaaacgctggaatactataaaccatggatgaaagcgatttagtcatgaagaaagaaaaccatcttcctagttactacataaataagaggtctttcttacctgtttctttttccacaaccagtatgtactcagctaagctaacaatatctgcaagcaggaaaatgacatccaattatagttcctgatgccaccatagatagtgaatcttatacttcctgatatcagctgagataaggatttgacttctctaaagagcataaagcatcacttaaaatgattgcaaatatatgtaccttcgacttcctctacaagaacaggaacgggatatgcctgaaatgaaatcacttgcagagttatacttcctgatgccaatataaaaagtgaatcttatgttcaaattcttacagtgttcaagctgtttaaacaatcaaatttccttccagcttccctaaattttaaccaacccatcaccaacctacaacacaaaagaataatgaggtggatcttaaaataaggacatgcctcaagatagaagcattgcactcgttatcaagagcacccacccgtttccaacagaaacctgcaaaatatcacatgaatgaaaaagtaatcacatcttcaatcgcagcttataataactcttcagaaggaaaattgaaggtgaaagtattaaagtactaaccacattcaagttgtaccgactacactgaaaaagaatgcatatatcaccaattgcacggtccacaatggattgtgctgtgaagtagacgaaaacagtgttactagaaggccaagaacacaacaaagagggatgcataactaatatccgtataaaaatctcaatacgtattcgtttagaagaaaaacataactaaaacattatacgttgcttccaaattcacctttgaaagctgatggatgcatgtagtagatatctcttttcgaagcatgtctattttcttgcagaagttgttggactatcaacaatactcttagcaacatatctgaaagtaaaaacaccgcaatgtgatgctatattaagataacactaatgtacttgtagaattatctgaaacctgactcaccgattctgtaggtttgtggttccttcttaagagtgaaaatttcctgaccctttggtttatcagagctgcataagctatagacagcagaataaaatggtaaattcatgaggtcttagttttcaatactcgttgacgttgtgcttaaatccttcaaaaatgtctcgaaccaaagaccaaacacgtctgattcttcaatcaaagaaagtgaaaacaaaattgaataatcgagatcgaagagagacaaaccaatcagcttctggattcatgcaatagttcctgaattgattgatggaaatttttggagatcttccttcagccagatctacaacgaccgattgagtaaaatctgctcaaaaaaccgaaacatagtgatgaacaacggaagagccagcgaagtcatcgactagaaatttcgacatagattagaggacaaattactcaatacgattcggaaaattttgggattttctgatacctttgatcctttgaagcaaattagtcgattctgaaatagcgaattttccctccatctctttcgagtttcaaaactgaaaaatgcaatggtcgacgaatttttgtagacgggaagaaaagggatgggtgcgaaaagcttgccgttaaaaccttcgaatttaaacatgcgtgtcgtttagttcctactttccatgacgttgggccattggcatttaggcccgatacgtaactgacgtgtcattttaaaaacgcatgtgtttttaaacacgttgggccgttggcttttaggcccgatccgaaactaggcaaagtgattgtgaaaaagattcatgataacaatcaaaccaatataaatcgatttattcagacttggagacattttagtgatgccaatataaaataatcatgtgcactaaatttgaaataattaatgtgtatggtaaactagattagaattagttctagacttctagtggtcgagatttgttcataagctttatgctcggacacgtgaggaacataccaaaatgttcgaatctattatgccatacacttattttaatcatttcttctctatgatagattgctcacctaatttatatataatctaagaatatactacttagctttaacgtattttatccgataacgaattcatgataccaaaaaagttctaaaacaaaagaggcatcttgtattatttatagtatttctaactaaaacacaacactgataacatttaaattgctttgttccgtttaattagtaaacaaatgaaaagctgtcgcgtcggtggttgggtttcattcggaaagatttaaaagtaaagcgcacggattttaaggtcgttcaacatttaaattttttttgaaagtaaaatcatatatcaatgcaatgtgtaatcttgtaacgtataaactaatgagagatacctaaagaaaagaagcctcgcgcctaaacagaaacataagattaaaataagtaatatagaagcataaacttaagcaagattttattcctcgtgaaaatattacattttgtaattttattttctctagtattaaaaaaggaacaactaattaacggaaatacttaaggaattaagaacagagaggtctcatacttagtcaagtttggtgaagctatcaaagagaatgtcttcgtgttgtccgccgacgacatagtcaagaatcccttccgccgccacttttaagcctgcgccttcgcctgggatgatggtagacgaaaccgggagatcggaggtgcgtgcgaagaagaaaacggcagcgagaaagagagccgtggagagaaaaagtggccagaagtaagatagaacggtgaggaaaccgggagaataagcgacgagagctacggtgaggagagataaaacaaaggcaaacacgatttgcaacttgaacttcaaaagcttctcccggaactccatctccgatcaccgacaaagatctgtgagtctgtgactgttgtgttaacacgagaaagatggagtgaagagagatagagatatatctaaaagagagatagtacaatgctaactctctctctgtctttcctctgagtgtctatacgtaaagaaataggaaagattctctgtgacaaggataacgtcaaaatctcaagttattttgtttttaaacgcgtttgaaaattatactgtttttcttctaacgaaaatgataatatatttttaagatttttatgttactttgttctgtgacttgtatgaacatttttttttttgtaaagttgtcgtaaaagtcaaagaatgaaacattttctgacataaatagtaaatcgtacaaagctaaaataatgataagagagatattttcaattcagttataatgttgtccgttttgcatgattgaatttttaactttggattcaggccgaccaaaatatgggcctttaaaagcccgatttgggttgctaacagacgactactcttttgttagaacttacacgagccgccgtttctactttctagctctggcaaaacggcgaggcattttctttaaacatatcaacatacaattagcagcatctctacaagtttacacttctctcataaaacccaactctacgaataaaagagaaggtgttttcatttatcctcttcgtctaattgcatccaaactctcagcagagacaaatacagcttgcttttaacgtcacaaggctcgaaccagacgagctgcaaatgctccatctagtgagtgtttcactgggtttgataaaaagaagccttgtgaggttacaaaactcgacggtacaaaactggttactggatctatggtgaattcctgtgaaagcagagagactatttgttaatatcaacatctgaaggaaagcaaatggattataaagattcttacaggatgtcttaagagaaatgcttcgacccttccttcattttcctcggggtctatggagcaagtactgtataccaacaccccaccgtgcttcaccagtctttgagattcaatcaagagtgtcacagataaaagtatcagataagtcgcatattagtgtttcagaattaatcaaatgactcatcaaaatgtatgtacagagtgcatacttggaggcagaatcaagaagctcatcctgcagtttagtgagctctaacatgtcctcaagtttacggttccagcgcaaatccgctctctacaaaatacagattaatgggaacaggttaatcagatcaggtcaattcaactagcaatgttaaatcttgctggcgaaacagttagataaacttttctcatgttaaccttggagaggacgccgagtccagaacacggggcatcaagcaaaactttgtcatattgtacttcattggtttcctaaaacacattaagttggaaggaagcatgtgagtagcttacaaacttggaaacttcagatactcaaataatgttaacttacagcaaagacacgaagatcagaatgaatggttgtgataagtccatcaacttggtgtgattttgctgtctcaccaagaattcttagccgtccttcattcacatccatagcatatatcatacctataatcgattcgagtttgccagtttgaggatggaatcagtcaagtatagtagaaaagtttctcaaaatagataatttaattcaacattaatgtacaatagaggaaaataaggggtctttgtaatattaccttggcctttcaagcaagatgccatgaatagggtctttcctccaggagcagcacatgcatccattatcctctcgcctggctgaggtttcaccactgagactattagtcctgcagtaccagatgtggggagatatttagatatcaaaagaacaaaaggattttggataaacttaaatctgttaacagcatgaaaaattaatgaagaggagactgtatcttttctcaggagcagtccaaataattacaagaccaaactgacctgcactctcgtcctgaacagaacagatgccttctttgagtaaaccagcttgcacaacggtctgttaaagaaaaggcccatgatcaattatgaaacttatcagtaaaaaaactaggataagaaaattgccaacaagaggacaattcacggttacattacaacacctgcaagcctgttttgatgcggacaaattcctccaaatgtaaggatagctcgtgtggaacctgcagcataggaaagccataattgaagtaagaaactaagcattataagaaacaatcatgtgcctggttttacacaaacacgatgatttcaactgaataaagaacgagaaacattaaacgaaaaaaacctttaaactgtttagacgctccacaaggtctgctcttgtaatgtcccttcccgtattggccctgatattattagaaatagtattatctgtctgacagctaataacttatctttccttctgtgaatacaaaatgttatggagataaaccttaagctaaatccaggatcattgttattccatatcattagctttgtggcttcatccaacccaagatactttacccatcgtctaaccatccactaggaaggaaaggaaacaaaatgagagtttctttcatcaaacaggaatgaagccttatcgcagttgttcagcaatacatagttgttcagcactacatagatatcctcatagctaaaaccaagtaatctaggagcttcacaagttcaaagtatcgatttcataccaccaactagctctagcttcgaattaaaacagcatggaaagatgaggctgtagctatacaaacttacaacgggatgtgaatgaagagtagcaagtgcacgtgcctgtgcacgatcatccccttccactttgggtaatggaagggcatctttttcctgcagatccctacgtcagaattcatagaagcttaagtttgtttgattaagtacaactaaaaagaaaaatggaaaaaagtttaagaaagagaaaccttaagagagactagtttacgaagaatcccattgacaaaatctccagcaccaggtctgagggcaacctttgcaagccttacgttctgataatgagcaagtaaacaataaagataaagtaataacgaatatcagaaaaatctttgacctcactaagttagtaggaagaaatcatgcagaatatgattaaggctatttggcgctcatttcaatgaccaaatctacttttgtaaccatttgtagagtaaactgagaaacaaatacacatagaaaccagtgctacttatacctcatcaacaacagcatatggcggcatatcacgcttaatgatctcatatacaccaatgcggagaatctacaaaagaaaacaaggtttaaggtttgagaggagcgataagtttgaccacattgcttgtagtctgcaaagtctgacagcgagaaacaaaattcacaagggagttgatacctgcaatagaagaggttccatatttcgaaatgttctttcgttgtggcaaagggaaccaatcaaatgatcaagatacctcctccaccgtattgttcctccaacaacatctgtaacctaattgtttgcaaataactgacttttaggagataacagattgtaagaagtactttagagtagttatcatcagtctccaagatttaaactaaatgttctagaacaagataagaatgggaccactaaccagtctaagatctcggtcatccaaatcgcgagtccgaaaaccgatagtcctttcaacataactcatctcattgctcccagacccttttcctttctcattcaaaagatcagcaaaagcaccaccgtactcaattctcatcaatctgactgcagatactgtataggctccacaaacaaaaactgttataagatattgggacaattcaattgcacttaacaatattgatgcaaagacttcaaaagactctttgtactcattaataataattttctaagtactcattaaacgcaacgactctatgtcaacctagatattcagtgtaacactatcactactcaagctagtggtaactaaatcaatggatttactctaccagctctatgtggagaaacttccaaattcagattctgagatttccgcgacggagccaccggacctgaaaaataggaaattttccgagagattgaagacagaaccaggcaaacaacgtcgatactgccattatttttctatttttttaaagaaaccaaaaacagtagagaactattcacctcttctatcaggcgaaaatggttttcgagtcttttgggttcgcttaaacgaccctggagaagctttctgcgtttcagcagacagataaacgcgaaatgagagcaattgcgccatggatgctccactgctggagctagagccaaacctgggaactcttatcgtactttcagaagaaaacactcttttccgccaagagtgttggtttaatgggcctaaaagcccatactttgcagatctcaatttagttcaatttcggcccgtctacttttttttttcctttttttttacatttaacgcaaaggcaaaaacgtaattatctaaaagtcctcttcttccccagttttcctaatttggtaacccttgttgcaggcggctgttgctgatcgggtctctcttctccattttccgattagtaagtgtttattctactcattttgtcaaaatatcacaatgttaatgcaaatttacatatatcaactatcaaaaaggcaatcttttattgaaacgtgttctaagtttgaaaagactaaaactttcactgtgctgctgtaggattaactaggaagtcatgtggttcagaataggcaattcacgtgcaatgacagagataaagtaaaaaaagaaaagtatagaggtacccgtgacctctttcttacacgaacgtgacacgtgagcatgattgtacattagagacgaagctgccctctttcctccttccattacagtgttcttaaggtacaactatgtttctttactttctcttcagggcattgctacttcttaaagttcttcttcccattgacaaacaaagggatcagtgtttttatttcgtcccttcctttgtctgtattcttaagagacaaccaaatcttttttgtttagtaaagtttacgagtgaatggctacttttcataccgttagagatgcggtgaagctctttgacgctggtatttctggaggaaaacatctcaacaaaggacaagaagaggtattgtgccttttgtgtttctttcaccctctgtaacattgtgtgtgttccttggtgtgatataatactgcaatattttctgaaaatttggttattgttgcagggagtgttggtggaggagacaaatctctgtctctggaataaagaggttaacaagttgaaagaaaagataaagaatgctgtgaagaccaagattgaggctttgttagaactggaggaagctaagaaaacggttgagcaactcagtcaggagttgggaattaagcggaacatgattaatgatgagaaagatttagatttgagtagtagtgtaagagttgtgacttcagagctaggtgttgctaaggaatcgattcatagagtagctgaagaggagagtgagctgtgtatgttaatggagtctcttaagctcgagcttcaaaacgtggagaaagcacattcagagcttaaagagattgagcaaagagagagggatcatcaagccattgaagatctgaagaaggaaacaaaagatgcaaaaacccaactctcgttgttagaagaagagctcaagattgctgtttttgaagctcaagaagcaaaagatgcagaggaacacgccagggaacggctaaatgttgcagttttagaatctgatttcagatcattagctgtggtgaaagaaagtgctgctgaagaattaactgagacagaagctttaagagcttgcagagatgaaacactcaagacattagagatgagtgagagagaaattgaagatataaaagctgcaacacaagatgctttgaagaaagctgagatggctcaagaagctacaattgtggtggatgttgagctgaaacgacggcgtaaagcagcgagtaggatcttggcagaatccaaaatgtgtgccaaatctaccaaggaagtgctcaagtcaaaaccaagatcatcgtcaaaagaaggttgcctggtcaagtgttagaagaatcttggtcagagttgtaattgtgaaaatctgtagaacttcaataactagaagaagtgtcactttgttggttgtgttcaaagttggaagatttaataagattgtagtgcgaccatttgtggttttgaatgtatatgtaaacacattcactatcagcattcagcaatcggataactaaacaaaaacaatttgatgatttggagatttggaaatttacagagctaaaagtgaaaaatgccagtgattaataaaagaaaagataattaaggtcggttagtaaaaagacgtaaatataaataaaaggcttgtttttttatttttcactttgttctctctctctctcgtaacacgcctgagagttctcgtcgtccttatctcgatcttggttgattcgctctccgatcggaaattagggcttttgttttctgaagatgacgactgcagcacgaccaacctgggctccagctaagggaggtaacgagcaaggtggtgctcggatctttggtccatctcagaagtattcgtcccgtgatgtcgccgctcacacaactttaaagccaaggtaagatttcgaaactggttctcttcctttaatccgacgcgaattagactacctgtgaattcgatcgaaactttagctgagattgatgatattgtccagaatctagggttaattgcaatagcgtgctagggattttgacatacggtgattcagaaaaggcctgtgtacgttgtctttaggttgctgaaatcggtagtattgtggcctgtttatttcttaccggttttcttgttgtagtttttgaggatcaatagtttctagggacttatttgtgcttgatatttgaaagatactggtttctatttaagcacatatgtctcgttgtttattggattctctatactcacgtacgtctcctacttattgttgttttggcaggagggaagggcaacacactcaagaggaactccagaagataaatcttcgtgatgagcttgaagagcgtgagaggagacatttctcatcaaaagacaaatcatacaatggtaagataataaatttcaagccttttcattatgatttggactaatgagttttttttttctatcattagatgatagagatcgcagaagaggaagtcagcttttactggaaggttagagaaattcatttatttatttatgatcgttatttgtgtcacattagatagtttgatcgtgtgttttctaacctttataccctctatttagactcgaaaagggatcctgaagagcggattattcctcgcagtgtagatgctgatgattctgatgttgatatcaaaagtgacgatgataggtaccttttcttcatctcttccattcttttcttcttctttgcagttttttatatgttgtgctttaaatttggctaagactgtcaaggttgggggctgatacataagcctaactgtacctcattgcttttcatctagaccatagtttgggaaaaatacaattgatattggggaaaatgtttaactactggcgttccattctcttgtcgagtttttgttgacttcaatactctagttccttcaaaggtatcttacaatctatttatctttgttagtgatgacgaaagtgacgatgatgatgaggacgacactgaagctcttatggcggaactcgaccagataaagaaagaaagagtggaagagaggctcaggaaggtaatattgctattgtctgggatgtttctgctcagattgctattagaaatgactaggataggttttttaaaacatattgacataacaaagatttctcttgtgactgtactaatgtttggtaacatatatgtatcatgcaggaaaaagagcagcagatggaagagctaaacgctaaggaagaggaacttctcaaaggaaacccattgcttaatactccaacgtcttttagcgtcaaaaggaggttagcagcttttgaaatcttgtttcttcgtgaatcttgggattatattaattgttggaagcagatactgaaaattactcgtctcttttcaggtgggatgatgatgttgtattcaaaaaccaggcacgtggtgaaatgaaagctcctaagcgcttcatcaatgatacaatcaggaatgacttccacagaaaattcctgcatagatacatgaagtgattgtttgtcaagagtgttattgctacttctttgtatgatgattatgactaaaagcttttattctgtctggaattacgatgtctctgtactcaaacaacaaatgtttttaagctttatatcaaaaacttatgcatttgattttaatgtaatatctcacagattcctgattatctcttattcatcactaacacaatgagacttcaaaattcgaaacagctgtgtgaacttgcatcttacaagtacaagtatgtgtctgaacatcatcaaaacttcaccaatcacatgtttgaagcaagtcttcgagttttattaagagacgccggggatcagacaataatggatacacctaatcaacagcaaccatgttgagcttcagagcacccatggaagtgaaaaagttctgaacacactcagcgacagcagaagcagagcttgaagtagaagccattgtagcgcacctcgatgttccacagtaggaatccatctatgtatgtttctgcgaatctctcaatgtttgggaccatgtctttgaccgttgcagatagtttcttgaagtggaagacgtactcggtttcatattatgaccttgtcaagcttctcagtagctgtgatgatattgatagcgtatcgctctacgaaattctcatacatatctctctcacccttatcgttcaataacttgacctccatctgttaaaagctgaagagctgtatcaagttcaaaatcaataaataccaagttaataaatcacgttaaggttaaggaaaaagaggaatgcagcttaatcatcatatcacaagacatggataatccaagtttccataatttttgtattaagttttgggcctttgaggcccattaacaacattatatttaatgcgtatgtcacgctgtgttcaaaatcctttttcttccctcttttccaaaatcaaaacgcgatttcatggcctccggcaaagattccgatcgtaacctagggtacatgacccgcaaggatgcagaattgaagcttccacggatgacccaggtcaaaaacaagactccggcgccaatccaaatcaccgccgagcagatacttagagaagcgcgagagaggcaagaggctgagttccgtccgcctaatcagacaatcactgactcagctgagctttccgactacagactccgacgtcggaaggagttcgaagaccagattcgccgtgcgagattgaacacccaagtttgggtcagatatgcgcagtgggaagagtcgcagatggatttggagcgtgctcgaagcgtgtgggaacgagccttagaaggagaaaattaccggaaccacacgctctaggtcaagtacgccgattttgagatgaagaacaagtctgtcaacgaagcgaggaacgtttgggatcgtgctgtttcgctcctccctcgagtggaccagctttggtacaagtttattcacatggaagagaaacttggtaatattgccggcgctagacagatactcgagcgttggattcattgttcacctgatcaacaagcttggctctgctttattaaattcgaacttaagtataatgaaatcgaatgtgctagatcgatatacgagagatttgttctttgtcatccgaaggtttctgcttatattcgatatgcaaagtttgagatgaagcatggtcaagttgagcttgctatgaaagtgttcgaacgcgccaagaaggagcttgcagacgatgaagaagctgagattctctttgtggcgttcgctgaatttgaagaacaatacaagtttgctcttgatcagattcctaaaggaagagctgaaaatttgtacagcaagtttgtggcgtttgagaaacagaatggggataaggaagggattgaggatgccattattgggaagaggaggtgtcagtatgaagatgaagtgaggaagaaccctttgaactatgattcgtggttcgatttcgttaggttagaagagactgttgggaacaaagataggataagagaaatctatgagagggctgttgctaatgttccacctcccgaagcccaagagaaacgatactggcaaagatacatatatctctggtgagtttttttctatccatatcctttttatagatttcggtagtaacttcttatgttgatcatggtttgcataaaaaggttaagcttagattcgtgttactgaactgtcttaggcaggtattagttctattatctttgttgatcttttatcacattaaggtcacttgcattctgtggaaagcttttgtcatctgtagcatacatggttctgtggttttctcaacgactgacactgatgtgactaattgtaggattaattatgctttttttgcagagatggtaactgaagatgtggagagcacacgagatgtttacaggtaattctgaaactctttccattcatcttcttttcactcgcggcggattagactaactgttttcatttgtcttaccaaactttacagagcatgcctcaagcttatcccccactccaaattttcttttgccaaaatatggttgctcgctgcacaacatgaaatcaggcaattgaatctcacgggtgcacggcagatattaggaaatgcgattgggaaagctccaaaagataaggtaagcctgacaacggttaatctggaaattgtttacattattgctcatgttttacttaccgcggttattttttctttcaagcaaaatagatattcaagaaatacattgagatcgaactccagttgagaaatatagataggtgtagaaaattatatgagcggtatcttgaatggtctcctgggaattgctatgcttggagaaaatatgctgagttcgagatgtctcttgctgaaacagagcgaactagagctatctttgaacttgcaatatctcagcctgctctagacatgcccgagctgctatggaaggtaaattttttcagtctaatgcatccaaagaagtgaagatttctcagacttttgaaccgattgatcattaaattctctatattttttgtggcagacgtacattgattttgagatatcagaaggggaattagagaggacacgggctttatatgagagactcttggaccgtacaaagcattgcaaggtgtgggttgactttgcaaagtttgaagcgtctgctgcggaacacaaagaagacgaggaagaagaagatgctattgaacgcaaaaaagatggcatcaaacgcgccagaggttcgaagctactgctatatttattgtgcgtcttgacgattccttgtgacaagttttaactgttctgtatttcctttctttttctcagagatattcgacagagccaacacatacaacaaagactccacaccagagctgaaagaagagcgtgctatgcttttggaggattggcttaacatggagacgggctttggtaagctcggggatgttagagtcgttcaatcgaagctcccgaagaaggtcaagaagagaaagctgagcagtagagaagatggctgtacagagtacgcattgcatacatataatttcctgatttgttatctttggaatgtgagaatcgaaatgtgaaagtattatttgaatgttttggcaggtatgaagaatacactgattatttgttccccgaagaatcagagacaacgagtcttaagattcttgaagctgctcataaatggaagaagcagaaggttaaagctggggaatgcgtctagtgtggttaacataatgttgttatgcaatactcttccagcttaaaaaatagcataatgtacttacataggtgattatgtcgcttgcggtgttgatattaatgatatttgtagatttagttatacattagatttatataaaaagcttatgcatatggctttaatgctttatatcccagattcctgcttagctcttattcatctttcaaaattggaaatagtggagatagctatatgaacttctttggtcattttcttgtttcgatcttgttatcaaagatggcaaatgcttattttcttgcgaaggcaaaagtatgcacagagacggtagccgaatgccatggcaagcagaacccacagttcttgtaagccgccattcaagtttatcgtgtcaaaggacgatgagctttgcagtgtcctgcagccgcctttgctcccacattcgaaaagttggtcagctgagtattgaactttcaaaagtagcctgaagccgtagtgcatgaatgacaagtacttcaaccactgcatgaattttggtatgtgctgcatttcaagttcaaaagcgtgcgtcactttttgttatgattcattggaaacagtaatccatccaaatcataagttttgtggtacctggacatagtaacctccggttagtagaaacagcattagtaccaaagaggcgatcataccagctctcttaatgctcaatactgaagctcctaagaactctcctgcaccctgcagttacattggaaaacaaaacatgttttacgttcgaaagagataagagttgtcgatattttctctgcttacttggctagtgatggctatcagtagtattgtcaacacggtgaaaaggaagcaggggatgttcctattgaactcagccatgaagtagacaatgatcatgaagaatgtcgggtacaaaacgtgtgccaccatatcacatagtgtactgcatacgtaatacacactaagtctgtacatttctgcttttctttctttcaccaggtagatcttctcgaaggggaacacgtatactgctccaaagagtgatgacgatgtccagaagatgcagatatagaacatcaaaccaacctgcacacaagcttaccagataaatatataggaggcttataaccttggtatagtcacaaaatatatatatgtagtttcgttacttggtctctaaggtgagcctctgtatctgtctttgacttccaccagagaagacccaacacgacggccacaccaagtgattgaactagccttagcttatcaaagtaatctctacgccgctctctgaatgttcttcttgaaagaatcaagaactgatcccaccatgaaagagtccagtccttcttcacttggattgctatttgaagatgctctggggcctttctatttctatgattttcttccttctcttttggctccaagtctgtcttgtacctttgtttcaagtactgcaaaccatgaacactagaattgagtcccatgaacagtagaataggctatgacttaatgtgatccttactttgagtaaaacttcctcagaatcaggctgtgcagttttggcagccaatagttcgtcgggtagactaatgtctgaaacttgtccggttgccaagtctagcaagaactctgctgggttcattgcaatctcaggtaagattctcaaagatgagaaatactccatagattctctggctttgccgtaaaaggcagggtgtccttctgatatcagtaagagcttgtcaaacatgtgaaacattctgcttgatggttggtgaattgtcgttataacggtcctgcctgcctgaaaaagacaaactgaatcttattctactgtatctttcaagaactttgttagtaatctatttgcatgtaactagaaactgataccttagctactccttgaagaatatgaagaagtttggtggcagaagtggagtcaagtccagaagttggctcgtctagaagcaacagagaaggatctacgagaatctcataagctatacttgctctttttctttctccacctgatattcccttgacaaaacctcctccaactcttgtccgacggcatctttcattgtgtttttcaataaatcttagtttagtgtttacaagaaatgtgtctggacatcaccaagaacatgcttgaagaaagtctacgagctaggtctcactataagctggaaatattcaagaagtgtacctttcgaggccgagctctttgatgatcatctctattttggcgtatttttgttccttgctcatgctacttggaagtcttaaaaacgcagcaaatgccaaggtctcttccacagtaagttgtggcaacagaacatcgtcttgcgtcacaaagccaattctggaaaacagggaaagatcagcacataatagtatgattcaggtaggagaaaatatccaactcacctcctcttaacagatggactgtaaggaatgtcattataggtaagcttccccttgacattatctgtcaatcttcctcccattatcttcagaagagttgttttgccactacccgaaggccccattagcgcaaggatttcgccaggacctgtgcttcctgttatgcctttcaaaatgtgcttgtatccatctggatccggatttgtatgtgttaccacctttgacaccattgttttcaccaggtttgctgagctagcatgactgtttctcaccttatactccacatcttcaaactgcatataaataaaagaggcgaaaccaataagctttgtcttaatgaaggaaaatcgaaagcaaaagagaaagttgaaccttgagaaagatgggaagaggggcatcttcgagaggataagtggaaacgaactcttcatcaatgtcaatctcggatgagtattggtttctgaggtaagcttgtggcatgaactccatgttgtgaactatgccattgcttcctgtaatctgcattacatgattctcttcaacttcttctgttgatcttctgatctccatgttatctttcttattcttgttccacaagaaaattgttatgaatgtaggcttgtgttatataacggaagaagtgtgtggatcaactgtgtcaaacctgaaactttcttgctttttgtgttctctttttctctctgtttatcagggtgttagtttggtagaccacattctttcaatgtttttgtattaaattgaatgcatttgttgacttgaacaaggagcaaatgaaactatattaatttcaatatactttatatggtactaaaatcatttacatttatcgacttggcttgctcattgacgatcacaacgtacgagaataaatgtccacttgctcatataaactgatcacttgattatattgtaagattcggaagaattacagataaacgagatcaaagcggtttgtggcactcacaaaaattgaaaaaacaaaaggcaccaattctcttgtccccttgccaaatactaatcttcttcttggggggtgatgtatcctaagtatgtacacaaaatcactcaaaattccagacttaaacatctcgtaccaatctgaatatgcatctttctagtaatactccttgacctagtagttgtttcccagatttgttcgtgcagcttgaggttgctgattagttacgtgcgatggtcctatgggttcagtcctcgcagatatagatagaggcgccagtattggctgtgtttgttgatataacccacggatcccagcctgcatggttgggaaagctataggctgaccttgaagggataagttgtacatgggactggcctgcagattggctagactctgctacatggagccgtgttaaaaaactatagcataacatgcaatgacagtggggagagtcagagaaaaactaaccagtggtccagttgtgtacatgttttccttcttttcttccttgtgagtagcatttatggtggctgctgatgggatgtggttgaaggcgtatgaagtatatgagaatggaatcgtggtaggtggagagtttccaatgtcgcttccgggtttgatgtgagtgagaggtagttcagcccctggaggtgctggagcatcatctccgggtggtaagtaagactgttgttggaacccatttgggctcaagtactggtgaatgtatggttgcggcatataataaggggggaaatatggaccataagggaaatagttaagagagtattgttgcctataaaggtgcattgcctgttgagcggctgctaaggaatactgatcaggataggagataggtggagcatcacactttgcagcctgcaattatcaacaaaatataaaagacagtgattaagcattgtgttcatatttcctggctagaaaaaccacgcggttggcctgatgctgacaatgaatgcacaagactaaaaagacattgtgtggggcttcttgataataaccaacctgatgagtgtctgtgattggtaaaacctcgttctttactttatctccttctgaaccttcttcagggagaacagtttgatctggctgcaatgttaactcgttctgagctgctgaatttgaaatctcatgattcttatcctgagaaaaagttgatatatctttcctgcaaaccaagtttcatataaaggtattcatatcagaaactcattcatctgagactctagatcaattcatgagaatattgaagcaagtaacactgtaagatttactcaaagtagctattagtcaccaacctagctgatgcggctgtcccatgagaagactcaatattggagtcatcacacccaatagtaaacttgtcagaagatgcctctctcacaaaattagaatcgaagctcccaaatgtcagaccattttccagcattttggcaacctgaatgtggacaggaaatgttacgtgcggccgttcaccaacatccgacttgagaagcgactcattcttgcatttactggctgcaacctcactcttaatgactgttccaaataaagccatacgtcgaatcacataagaggctgtaatcaaactcaggaacaacttaacagaatacagaatgcacttaaagcaacattagcaggcaagtaattatatggtataatttatacctcgctcggactgttgtgggatctgaaaagtttcaactacagcatattgagtatcgttttctacaacagaatctgatacagccactgatacactactttctttagacttatccggctcaacaacatccttagaagaagaagtagccttggagagaggctgttcctctgtgtccaccttgtccacaggggatatgatagcatcttgaattttctggttactgattccacttggaagacttatagggttcggggccctgaaaaagaatagaatgcgttaggaagcccatatccaaagagggaattaaagacatagacagaattaaaagtatggatacattatggaagaaggttttgtgtcgtttcttgcattgttaggagcagacgaagcagttccagaacctcctattatgtgattagctccactctgctttttaaaagctgcacttcttccattactggcatctgaatcaacaaagagcttgaatcaaggaaggaaatatagaacacaagtttagaagtaaaagaacataaaccacaatgacctgtgtaacttgaagcaaagttcttccgtccagtccggccccttccttgtgtatttggcactaaattctacaacaggtaatacacataaaggcataagagaaacgagatgatgtaagctaaacagagaactcaagaccacacttaaaatgcaaagtaaggattcaaaagaacataggaaagctacctctttctttctctcccgtttgcttctcacctcatgaaatgtatctgaaagatc

SEQ ID NO: 412 - DNA, 86233 bp, Arabidopsis thaliana
gatctcgaactaggcactgcagctgtagaagagttgtttgggatgtggtgattagcagaaccaactccactgtgatgtagagatgactcacccgagctaatgacaggaaacagtggagctgcaccattgaaatcgtaataagcttcaccagcactggctgctgcaggaacaacttcagttgtaccaggaacagtttcataataaaatgtggattggggaagagaaacttgagatccatccacatggccatagaactgagtattaggagctagagtaacagcattggtatattgataattggactctggataggataagttgtattgtgtcgcataatcagcagattgatgcatatatgattgaggtacggtatagggaactccgagagagtcactggacaaagatgaagcgacatggccattgtcaggtggtggaggaattggttcgctataactgtctggtggcggtggaggaacatcttcactctcagacggcggtggtggaatccattcctcacccggaggtggtggaacatctgtatgaaggttggatggctctgtttgactgaacatcttaccatcagaagcgtctatcacttgaacagaagacactggaactgattcttcaacttccatatccacatccatgtcaacatcttccacatctggggagccggccttctgaagcatctcagttgaaggaataatatcagactgcccagctggatgatttggggagtgtttaggagatccatcgccgctcccatcagctgattcatctgaatgaagagattttccagattgagctaactctccatctctctcactgtcctcggactcactctctgtattagcatctgccaccaacttttctttgggagggcttttgttagtttctggttcatccattactgcagattttgcaagctggtaaatctcatcgttaacactatcttccagccgcttaagttgtttctcagtgtgaagccaaaaagaaagtaaaggtgaggtgtccaatatgagcgcctttacatcagaatgtctgacttcaacctccagaatgtactttgttatctgctcattgctgtgaaagttcccatgcgacctataaatttttagaaattagacattatcatattttaaagaagataaggaactgtggtctctttacctaacaatatcacatacgtaaacaagaagacgcaaactagaatatgttacctcttcagagacctcagcttctccagtaagctttcgatttgactcaacaagcgagatgggaggtcagtagcagctcctgcatcaaaataagtatgcacatgatctgaatttcctggccttgaaaggtcctcctgacaactaacaacagagtctatccgacattcaacttgatgaccatcagttcctaaacttttgacatatagatcttcacttttgtttctcccatccagctcaacagttggaaaagtagaatagtcagttcctgtgaaactattttgcacgggtacgaaatagcttggttcaacacttgaaatcaaggtggaagcatctgtaaccatgggcccagactcattgtacccagtcccatatgcaaaggtagtttgagtcaaaactgtaggcaattcccacgaagtttctccagtttctgtattccagtaataatactgattgctctcctcatgcagaatcatcttccactgcgacgtaacatctgtgggagcctggtgctccaaagacacactgccagatgcttgaactgagggaactgtctgcttgtttagtccatccaatgttgttgagttactcactgtggtataaccagtttctacttcagctctagaatcaagagcagaagaattctcccctgtctgctgttgatcagccatctgcatagtggtggtgactgcacctgatttgatattcgtatctttgtgtcctccttgaattaatccatcaacctggtataaataaaactcatcaagactaacagatacatcatcattactccgatttataaaagttagttgttgttacctgctcatttttattggctaagaaactatctgcagaggtatcatctgccttcttatccgaatcttcttccacctcatcatcactatactgcccaagtaaaagcaaaggattttctgttttctgacctgaaaaaagcaaataaataaagcgtcaaaatttgggagccgtaccaagtacatacatagacttcagttatatgacctgctaaaagtataggaatgtgatactttatattgcattgtaaagtaaaaaaaaaaaggatagagaataacgtcggggaagatttatcagcgacctgtcacaaataaatgacaaagccgtcagttaagcgtagcaagccaaaacagccagagacatacgaaccgctaggagctacatccagaagaaagtccccagaaagcttgaagctgcaaaatagaccaactcattcaaaatatcactgtgtcttggcctgaactgatgtcatacgacgtccttaagaccacaatcactctaatactctgagaagaaattttggtgacaaataactatgggcttggctacatagcggattttgaagatagctgatggaacccacctgaagaagaaggtgaattgggtagctcattaagctctgtttgttcccgctcaactccatcacgcacatctgagccacccaaatctcctacaaaaatatcaaaagatatactaaaaaaaggccgagaaacgcaaaattcgacaattcctacaaaaaaaaaatctaaattaaaattatcagactctttgtcaggtagcctaagtcattcataaactagctttattgagaaacgagatcgaatccacaaatccatcaatctaatagaattaatcgaacaaaagagcagaaatccattagacaagtatagaagaagaagcataccagagggttccgcaaagagatcaagcttgacacgacggccggtgctattcatggcggcgtaacgacgctcttttctcttccccatcagatttcttactctctcttcagactctaaccccaagccaattaaaaaaaaaaaaccagaagtagctttcgcgtcgcgtcgaaaggttaaaaactttatattcgaaccaaacgacaccgtttcctcgcaatagccgcctaactgccttaggctatttccattgagatattttgaaagtttctaaaaaaaaaatataataatattttattataatttagtttctcttcaattataaacacacatatacacatactctctcaatcattaatctaaagtttttctgcagagaaactattttcaatctctctcctactttattattattttatattttttagttaatgagaaactatgtaagagactactgatggagatgctcttaaacgtcgtgcgtttttgtttttttacattgtccattgcatgtcgtttaaatagtcgattaaggtttgtaaatcagaccgatccacattcagtccggttaacacattacaaatgatcagtatgctcattccacttgcaaagtatcacataaaattccgaacattgccacaacaaaatatataaatacgttcgatcaaagttttactccaatcatgtaatttaaagttttgagaagataattacaaatgctcaatcaaacaacaacaactacaataataataatcacacaaaaacttgaactcagtcatcttcaatcaattttcttagtacagagacttgagactcttaatatgattcgaaaaccataaatatgtgtaccacctatactcgattccttcctatgtgacttttcttgtgatattcctcttcaaatcattcaaaaaaaaaagcacaaaacattccattcgtggacgttggtgaaattgcgaaagatttgatgaaatttggagtggtggggagttttgaaatgggtgttatggagaacatggttcatgcaaagtatcaaacatcgttgagcaatggtgatgttactgaagtgaatctaggagtaatagctcgtatagggctattatagttcaagaaccgtaaagtttatgagattagagatttcccacctagttgtggttcaaatgacattccacctagttgtggttcaaatgacattaggctcagaccaaaaacgaaagtgaagacttgtgagactgaaactaatatttctcttcttacctctcacaagtttcgctttcgttctctatctgagttttatgtcaactgaacaacaaccacgtggaaaatccctaatggcattaacttgaagataaactattagccctataggggcaattactcgtagtttttccttagtgtatatcataaccattgctcaacgatgatgaggactcagtttgtaccatattggccattatacacattccacaatacaaaatacaaaagatttatgaaatcaaaatcaccaaagcttggtactatgcaatcattaaccaattgtgaaaacgttatcattatttaactattaacacaaaacgttgtcattagttgaccatattacaaaatggaacatggcttatgggcagttcctaacaaatataaaacctaagggccaaaacgatacatgtgtgaaatatgatcacgactcatgagtagactctaacctctttagaagctgggtaacgacaccccagttgaaaccccggtactgaagccaccggatgactctagttttacgagtttctgtaggcaagtctcgaccttgaagccaccgctttgatgcctggacataaagctggtccactgcttccttggacagcccgtggtttagttctgcttcttcatctccttcattgcattggcgtttctcaaaaaccagctttatggccgtctctgagtctttgttgcttatgcctttcttaaacaatgcctgatccacacacaaaatattcacttctccttagtagtgaaagatcagacaaaattattatctcacagaaaagataaatgtgaatggcaattcttacttgtttgatccgccttggtccccaacttaaggaagaccatctagatcgagtgaatgactccgcgtacaagctatcattgacaaaacctctgaaacacacgaacaaaaagttgaaagtgagacattttcttactcggtttttatatcagtggtaaagcggataatgttacaagaaaagtaacctagaccctgcctgatgcatcaaggaaaacaaacacatgatgccatggatcttgattgaaaagaaatcaagaggaaccttaccgaatctggaaatcatcgatcactttgtcaacgacttcaataggatatttctttcctatgagcttcttcttcaggtcagctgctgaatatgctctggagcaatgccgagcagaataagatgatatgaaatcatacacacagagaagagtgaagatgaaacaactaaaccattctgcaacattataacagaagctacaaaaactcaaagttgcaagcaaaccttaaaccgagatagcgaatagccatgtgctctgcatcttgcgtggttttgcaggcttctttgctactcttggcctgttcagcttccaaatgtagtttgattttatcataagcttgtttgtgttgtctcgtcgacttatagcctgtagatctaacttcgttgctgctttcatcattagagtcatcacaagaaacatcagagtacatatcagcatcatttttatcccgcagatgaaaatcagtatcctctccagtctctttgatgttagccttcactttagaccccaatacactatgatccaatctactagcatctatacccttgtccaaactcataaaaccttcatcagagtcatcacaagacacattcgtgtaacttccagtatcattttcctcttgcagatccaaaaatgagccatctctagcctctttgctgttacccttaacttgaaatcccaacacactatgatccactctagtaacatcaaattgctgagatgtcaaatcttcagtaatcttccgagacttcttaggaacatactttgtcagacctgatgaacagtaatcccgctgctcagaacacaagattctaggtacagagtgtctcttcgccctacacaatatcagaagtgaaacacttaggattaaaacaatcaccatgaaagtagaagatcacataacaaatacaaaacaatcagtaacaaaagtgaagaagatagccacttagaacttcctcaacagccaaataattaaattctctcaaagagataaaactttgaagcatatgtaaaattcaaatgtgacaatacaatgaagatttcaacgaagaagaaaaaaaaacagatttatgggattttagtttgatttcggcgattttgtattacgaattgaactaaaattataaactaaccatggaatacggaagaggcgatgatgttgaatgccaatcgctaaccgaaaccctagtttcagcatttcccaattgaaatctcccagctcttctggtacaaaccctagataagtttgttacaaacattggaagtttgtagctgctagagtgcgcgtgagacatttagctgctagagtgcgcgtgactctttgggaccaccattgcggcgggtgataagagtaattagagtttataattagagtaatattgtgtagattagaagaaaatttgtatttatttactgatttactctcatgaaacgaaccaataaatttatctacaacagaggtttcacctaattttctaactactgacctatatcaaatcctctttggttatatgtgatcacttgtttttctagtggaaacaaaaattttaactgtcataaacaatggattttaaccgtcaaaaattttaaccgtcataaacacagaaaaaaattatcagacaaaaacaaaaacaaaaaatctttaatcaaattatagtggattttcttaaaacgaaaaaaaaaatggaaactgatatctcaaaaagatctcttagaaataattttacccttatcttttatgtaattttaatttttaaaagataataaatggaaattaatcagattaaaagaaaaagtcaaagaaatcccattaaaatttagggaccgacaaagagtctctctactataaatatatgagtttattcagcctaaaccctaaaatcattcatcgattcaatttctttttcaagtgaccacaactacaaagagaaagaaaaaaaatcagaagccaccagatttgattgtttttgtttttggtttgtaatcatgtttacagttctacgcgtggatttcagtcacaaaatcaaagacgatcctaaaccagaagaagcgggcataattatagtcaatgcaatgatctaccgtgaaactgataccttgactttgacgacgtcgtcgtctgccgacgaactcatcagcgatgatggcaacgagtgtcaaatcaaaatggatttgattaatatcttgaaggtagcagggctcagcgactacgatactgcacatatgatgtatcactttattccccatgttgctgaaataatgtcttccccaagtgaagggtattctccagggtctgctttagaagtgtcgtggtgtcttcttcttctcgatgtgagtcatattgaggcagcggttaaagtctcgttagattacgaaatcaaacaggatcctgaaccaaaagattccggcggcacaatcagagtcaatgcagtgatcaagaatgaaaatgatatcttgactttcacgactttgacgtttgtcaacgaattcctcaaccaagatttttgtctcgtagactggtgtaatttcatgaaggaagcagggatcagcgaccaaaatattccagttgtgatttatcatattttatatgttattaaaataacttcttctgcaagtaatgggcattctcccgggtgtgctttacaagtgtcgttgtatctttttcctcacgacgagactgatatcgaagaagcagttcaagtctcgtttgacgagaccactaatttctgtttgggacccgcaagcaaactcgtggtcaagtccttaaccaggaaaatatatgacaagattaattatacaggcgaaagatgcacaatttgtttggaagagtttaacgctggaggaatacttgtggctttaccttgtggacatgactttgacgatgagtgtgccgtaaagtggtttgagaccaatcacttttgtccattgtgtcgttacgagttgccacgcgaagaagatcaatgatgaactaggtttcttaaatatatgatagaacaatttacgagatttttctagtttttttttacagaatattgcgagattttctggttttttttaatccttctacaacaaaggctagtgttaaccggcaacatattctttagataatttttgtaatccttaatgcttcggactagaaattaacaaagttcgtttttttgttgctaaagccatatcaacataacaaaccggaatataggaacgagtccaaactaatctcatagagtaactagagatggtcggaaaaaacagtccatcaattttaactagtttcaaccttatattttgttctccaaaacgcatcaaaattcaatattttcaattcaagaaaaaccgaattcacgttttgtcacatgcatgacaaattatcaattaccgctggttgcgctaaccagaaacatatccatcacagatattacaatatgaaattaaggaaaaatacaaaggttatgctaaataattaactacctgacaaaactaatttttttgacatggaaattctagttctttgacggcatataggacatgacaatacttgggcgacgaatcgtcatcttccacatcatgatcctcaccttcaccatcaccatagccaccattaaaactaagacatttagattcaaatccagctttaggcttgaaaacaaacaacccactagacgaaccagagggttcaaacagccaatcatgaacgtcccaaaagatctccaaagaaacaccatcactcacagtcacaacctcattccctctaaatctccaattcaaattcatgatcctaatcgccggcacaccgtccaccgtgatccacatctctggatcgctaggacccgacagagatgtttcgatcaccacctcattctcccgcctcgactccccaccgccaaacgccgtccgcgtgtagaaaacgcgtttcccgtggacgtgttcttgcttggagaccaaggcagcttctgtagctgaagggttcttcttcgtcctctttaaagcttcgttccttaaatccccgatcgttaaaacggttgcgttttgggatacgagagagacgtagaagccagaggaaggttcagggaagttcgagaatttggcttgacgaaaatcccagtatacgtcgactctagttccgttagcttctaagctcttgagaccctttttggcccaaaacgaagaacctgaaagatctatcttcaccggttgatgatgattctgttgctcgtctttgacgttctcgattttgatggttaaagaatgtgaggaggtggttttagaccaagtgacgtctacgttttgtggtgttttggcgatttcaactacgtagattaacgagacagagctggattgattaaacatttctcgtacgttgtgttgtttcttgaaatctttatcggtctgaacgaggtatgaacaaaacccacaggcttggcctcaggtttttgattgtcatctggagatttaagaactctgaattgttctcaagagaaaatttgatgaccttaatttgtttggtgaaacgaactaatgaaaccgaaggtttttgtttgtttgtgatttactaagaatagattgcttctaagtttggatcttcatgactcagacccataattgtgaccttacctatctttagtagcccaatcagagcttggtaaattaatttcaacgagcaatgtagaagaataatatcttcaatcgttacatgttgttatgtctttttcattttttaatttcggtttacatagttgtaaataaggtcatacatacctaatgaataaaagggccaaagtttgacaaaacttttatgggctttataaacccaattggtaatataaatagagattgtgaaacgatgtcgtttttgtccggctacatagataaaccctaagcttaaaaccttcataaaacaaaaaacatcctccgaagcagctactcctcctcagttgttgttccgccgtcccgccatcagatcccaatcaaagatttaggtattctccaatttcaataatatgttttgaattccccaaaatttttgatcgatttctctcttgaaatctctctacgagctcaattagtcggatgtttttaatttcatatatctgtgtaacgattcgagttttatctatttggttgtgtttattcttctttacaatttttatcttcagattactagttgtagctcaattactagtatttaaggtatcaaatctgatctagctttatctgtgcgaatttgattgatagccagtgattcattagaaactcatgaatttcagatttaagagtgtaattcatactttggataatttatgtattgcttgtaggtaataatttaccatagaagaaatggcagagtctactcagatggaagttgagacagcaacagaaggaactgtgccattgccgcctaaaccaaccttcaagcctttgaaagctcatgaaatgtctgatggtaaagtccagttcaggaaaatagctgtaccaccaaaccgatactcgcctctcaagaaagcatggttggatatctacacacccatttacgatcagatgaaggttgacataaggatgaatctcaaagcccgcaaagtcgagcttaaaacccgagctgacactcccgacatcagtaatcttcagaagtctgcggattttgtacacgctttcatgcttggttttgatatccctgatgctatctctcttttgagaatggacgagctttatgttgagtcttttgagatcaaggatgtgaagactcttaaaggtgagcatttgtctagagccattggtaggttgtctggtaaaggagggaagacaaagtttgctattgagaactcgaccaagacgaggattgtgattgcagacactaggattcatattttgggagctttctctaatattaaagtcgcaaggagttcactttgcagtcttattatgggatctcctgctgggaaagtttactctaagctcagatctgtctctgctagattgaacgaatagttttgaatggcgaaattttgaaacattaacttgcttttgttcggagtgatctttgtaatgaaattttgaagaaacaaatgttatggtgttctttataaaatttgttatgggatgaaaattgttatttgaatgctgctgctgctatggattcttttgaaggtaagacaaatcgagtagttgaagtaaaagaaataagaacacttgcattgcatttctataaacccttaagtctgcttattcgacagcataaacaacttggaatggtgacgtaaagacatgttcttgcagttaccatcttgagctataaaatacaaaaaaaaaaaaaaaaaaagagagaaaaagaagttgaatgtaacgagtctctttaaaatcacaatttgttggcctactttgggtatatggggccagattaatttaatccttagccgccaaagagaaacccagcagcttgttcttcgtttccttcaaacaatttgagagcttgtatcactgaatcgcgggagaaccctagttccacaagctttgcaatcttggcttcaaattcaggtccctgtggattatgtgatgaaattgattaatggagactgaaaaagaatcaaaagatgtgagactaaaaccttaaacatagtttttttacctctgatgtgttctgccttttcggttgttggcttgttgggtttgcaacagtgttattcttcttctctgtgaacccagaaggaacctatgggaccaaaagtttttgatcataacaaattgttttgaaatttagttcatcagaaccatagaagacagtatgcaaaacttcttaccgttgctccagagctagatgcatcatttggaacacgctcttcatccagaaatcgggacgggatgtctttctctgagaaagtatggtttttgtcaggttaattgaaaacaaagacaacgaatttaaaatcactcatagttatcaagattgagaaggtagtagagaactaaccttgcaaaaagggaaccgagacctctcctcctccaacagtcatgacgttttccttcaaatctatagtgcactacacacagaaagaaaaagagtctcagttttatatttggttggaacagatccaataaattcagtcaaaatatggaaatgttacctgatgcttacgcagcatatccaggccaaacagaaattccatgttaggtgagtccagcaccacgaatgaacaagggtaaaagttgtttccaatctgcaaagttcgagattttcagtttcttatgcaaagaataatgaaacagaaaagcaaaggtgaaaaccttgtcagaaaaagattgacggtgtttaccttgataggagcaacatgaatgcggcccaatatctctgtttggccaacaccatgggcaatacctttgtagcgttggtccataagtctcagcaatctgaaagtaagtagtcatcaagacttgtgaaattttccatcattctatgttacaagaaggaccagaagatataaacatggaagttacccgcatctctcagcacaactcttggatataattgtcgactgtgcaccactatcaacgaaagcctggagatggtgtaaatataggtttagaacaaaaaagatgatctaaggagtgctcgataacgcctctaagcgcactgagagaccaagaaaaattgagaacagatagtaaggtgaaacgaggttataatctggttgcaaaattctaccttcaaaggtacgccgttgacctccatatccacatagagcattatctaaggaagtgataaaaacaaaagaaatcaagactttatacaaaaaaaggttaaggaatttcagaagcataaactaaaacacaagcatacataccacccgagcaaaaccttcaggattatgttcaagggcagcttcccagttctcatcaattcctttctgttcaaatatatcaatcaagatagtaccaaaagtcagaaatgacacgaaaaggtaacaatcaaattaggagaacataagaaactaaccaaagtgaaagattgcatccaggaatcacaaaagagttatttgccactaaagtaatacaagagtccagtacatgtaacataagtaagaacaattaacctgacgaattgcagcttcaattttcctctgtgcttcaacatcaaaaggatctgcatacagaagggcctgcaaggagggaaatacacaagcagggttatttgtagtggtagatgtaacttaatgtgtggaaaaaagagaagctagtaactctttcaaagccagttatcctgaaaatcagttttattttgaagtaaggcttacaagttcctcttccttctgacgctgtaaaacagatcgctgacgatgccgtgcacgcaaaacatcctgtaacttatttaaatcgcttccagaaatcacttgtgcaagctcaggatcattctacaattcacaacatcaaaagccaaggcaacagagtcataaaacgaagtccaagaagaatttcgtagttctagttactataaattcagacctgaaataactgtcccataagattagaatccccacgaatgtgttgttgaaaggctgcagggttcaaagctgacccatcaggattcatgcccaaatcattccccgccgcactagtggcactactgaagaagagcaagcaaatgagacaaacaaagaatcatgttcacaaacagcaattgcaaaatttcaaaatagagaagcaagaggaaatcaatccaacgtacccagatgaggcattggaaaccatcatcatcaataaatcatcatccttaacacccaaggcactcaatttatcggaatttcccatctcgtttccattatacaacagctgctgctgctgaatcggaacattggactgctcattgattaaaaggaaaacaaggaaactttaagtcccaaaaaccctaaaccccagatttcagcagaagtctttaatttctcagtagcaagagacacaattccaaatataaatagacaaaagagatctgaaaactcttacctcaacctcgagcaaggctttaacattctcaacctacaggaatatagcactaaggatcagcaaaatcgaaactttcgaaaacgtcgagtaataagtgctaaagtagtgaaacccaagaacctccatcgattaattcgacaagtacattgtgattaagaacccgaagaaacaggaaagttagggttttccggggaaaagaaacttacagtctcctgagaatcgacatcgagagtgatgatttgttcaccggcggtcatgacagtgatcctcatcttcgtaatcgtcgactgtttggtttccggggtctcctctgtgacttgttttggtcaattttataaatcagaatctctgtgacttccttagatggctttacttcaggttttatgttaactctggcttataagaaaagccaaaccaccttaaacccgcctttcgacccagaagcttccaccgatattggtcttcaaatcccgaaactaccccgtattggttaaatcccgaaactacccctgaatctttttaaatcccgaccgtttcctcataagttaattgtactttactaatcaacctttgttttgacttttgaacagtaattaaccttattgtttgttggttcttaaaggatatagacttaagatttaactttatactttagtttaaacaaatcagtataaaaaggtcaatgtgtcatgaatcaattgaacatcaattcttatgtcattaggaagaggtaaagtcataacgaacgagaatattacctttttcatatagatagataagaatatagcttattttctttttagtatcgcttatggaaattttctaatggaattaggcatttttttctattgttactagattttaacccgcggtataccgcggatctattttttattttagtgttgaaactaattactttcgtaatatataattcacagtcttataattatttgttattttttatattttttatattttgtatatttaggtatattatttagtatgtttatacaaaggaaatttgattatttttttgtatctatataaatttagaaattaagtaagtatacagtttataaattatgtctttgtatatctatatatagattttgtcttccttttttcattagtcttgtaatttaacaaaaacaataatttaaagttactgtaaatgttgtttttatttttgtttttcaggtttaatattgaaatctatatatcaagatttagcaaacaatattttttagtgagtaccaaattgtaaaaatgttgcttcaaaatacaactcatattatgggcttcatctttaataattcattaggcccacagatccacataacccacacaaatttttatgataatcaatagtgaaaaccacaaaatatctgaaaaattaatacactcgtttgtgagtgtctgcttcaataatcgactttcttaaaacaactgattgttcttcatgtgtaattgagatttctcggcaatcgctgttattattctcttgcaaaacttcgacttcagagtcaatatagagtcggcaatttcaaaatagttgttcatcgttcctcaaagaaacaactaatctacaatttcttccaacgaaaagtggttatcaaatcgtcatttgatccgaattcatacgatttcacctaccattggatgaatacgaaccaaaaggaagctatggcggcagagaatcaagtcagctcaacagaagtaaaggcgaatggagtttgtaaaggtgtgtattttttccagatttggttagtaattggcagtctttggttttaatcatattcagaaacccccttttccaatacaacaatacctgggttatatgtctctgtcattatacagtttagaacagctaacaaattggtatctaagaaaaataatgaccaaatctgtactttggcacattttgttatttcgtgattgaaaataaagggtattggttaatctctagatttagatgtcgccatatcttgcagaggttagattataatatttttgagttgtaatacagtttaattactcggtttccttaattaatagctaccaaatttatatagcaacactttgttctttctgttttacaggtttaatgtctgaacaaagaactgagcaagaggttatcaatctattgcagaggtcagtttcttaatcttctttagttgcagtattttgtgtttaaagttaaagtgttcatatcatttaggtggattttgttatgagtaggaagtataaatctgagttaattgtataactgattgaattcgttttttgtctttacaaatttgctgcaacttgttaaaagcaagtgttcgaagcataggtagaacttgttaaaatggaaaacacttggcaaactgcagattgaaaatgtgtaagaataataagtacttgtttgaactgtaaagataaatgtaaatgaaaactggaaaaccaaagtctattcgattccctttagaactgctttgttaggttattcagtgaccaatgaaatagcttgaatgatactgagtttcctgcataacagaagattcagattttgattagacagtttgtttgcgggttattcaaaccataattgaatcaatattacaaaggtatagtaaatataccttctcaactatatagattacagaatatgtgagttgactcttgtcactaaatattctgaaacacctccttgaaaaccacattggtagtttgcttttgtatctttccctctttgtcgagaattagtattttcaaccctgtcttagaagtaaccctagacaacgcaacatatagttgaccatgagagaaaacaggtttaggcaagtacaatcctacttgctcaagagattgtccctgactcttgtttatggtcataacaaatgcaacagagagaggaaactgccttctacgcatcttgaatggtagttttgtatctgaaggtgtgatgtttattagaggaatatacacgatctgcccaatcctatctcctgttataacctttgcttcgacaatatgactacacaactgagttatctgtagccttgttccattacaaagaccacctttaggatctaaatttctaagtaacataacaggagccccaaccttcaaacgcaaagaatggtgtggcatacctgataccttaatactgtttaagaaatctggagtgataacaggattttttagtgagtccgaatccgaaggatctatactatcagctgatagatagattctttcttcacctgtccaaatcaagtaacatttaaatcttcagcaaaataatgattaatacagaacataaaacgatgcactaaataatcaatatagtatatgtaaacttactatcgagatgctctagcatatactgatttattgtgttaacatcctcatttttcggagctagaatagctctcctctgaaagaattttggatcactgatttcgtgcagtttagttggatctccataaatttctctactaatagcttctataggattatctgcttcttgaatcaacaattcttcaggtatatcaattatcacctcaccatcattaggctcattgacccttccatcaccaacagccaataaccaatcggaaaattcttggatttctttagcttcatcaacacttaaatcattgtttaaaagccgcatattcttagtcaacctcaacactttgcagtgatcccaaagatatgaagcatttagagatgacataacaatttctgctctccctgcaccattaattactggtagcacttgtctgaaatcacctccgaacaccataacttttccaccaaaaaccttattgtctacacgcttgattatatcagagaagcttttatctaatgcttcaaaacaaaacttgctcatcattggagcttcatcccaaataatgagagatgcttctttaataagatcagctaaatctgattttggtttgattttacaaactgaaaattcgtctggattcaaaggtatagaaaacctagaatgtgctgttctacctccttctaacaacaaagaagctatgccacttgaggcgacattaagacatatctgtcctttagatcttactgcagcagctagtgttttccaaataaatgttttccctgttcctccaaagccataaacaaaaaaaactcctcccaagtcattgaatactgcattagtaatctgatcgtatatacctctttgttcaggagtaagcttttgtatccaatcagaatgcttctttttcaaatcggattgattgttgtacctcaactcatcaataataaggcggtttgaattatcaataccctctcttgaaggcttaggaaaatgttcaatatcttctagagttgctccattaaacaacattattttctctatctcttgaagagtatagttctgaatttgagcttctgttagtgtaagttctgcatttaagaaatatacaatgtaagtatatgtggaaaatcgtttaaccatggtttataaactgtaataaaattaagtaccttggtttttgaactcgtctctcttcttaatcaaaatatcttctgataaaagatgccaagtttctgaccaaacatgttctggtctagcaagagaatcagacagcaacatcattgagaaaaaatttctcaaataatctccaaaacaaaactgagatgcttcaatcaaaccattgatataaacctggtcgtcatctagaattccacgtgcaaaacaggctagtttgtaagatggataaacaacaccgttaactgtttttatatcatcgtagctctgtggacctctcacaatgttaagtaacactctcaaataatattcgtcttccattttcctggaaacgtaattaatacgacccaaagagaaacctctagttctctttttaaattgtttgttttctccatcccatgtaaaatatgctgggatttcagcatatagacagtctcgagcacgtttcccattctttccaacagcatttttccgattcaaagtcaaccatgccaaaaactgagagtcttcattagaaacacgttctaggacatcagccattttggccttggcatcgaaataggctggttgtttccctttatcatgaaaagatagtttctgaacaggtgttgatctatgctgaattggaaatttgaatattctccatatagcctctgacgcggatacatatctagcaggggaaaaacttatgtatgagctaagaagctatatgtaagatagataagtaactaaattaaatatagattctgaaaacatacctgcaatcgaaccaatcctttatttcatccttctttttctctgttgtatctgactcaactacaggagctgtagtgtcactacttgttgcctcttttattggctcaacaataaaaactacacggtccggacctttgttgatgtatttaaataagtattttatagaaccgttctggttacaccattcgacattgatatgagcttggtatcttaaagatagcttcttattatagggcacaacatacctattgtcacatttaacaccccccttttctatatagtcgtctgtgagtcttctcctatagattggataaccatcagcacccactttagtgatttcttgatgtttttttggatatagctttgaacactgaccatcaaccatacacggagaactggtatttgctgaaccacatggtccatgcatcatagagtttttgataacctcatagagctcaggttctttgtctttgttaggaatctccgcagatattatcttgtcgatgtcgtcagctgttggtagtttactattagccgccataaatagaagtatgtgagcatgaggtaatcctcttttctggaattcgactgtgtacatagctgtaagagatgtgaaataattataattcagagataaaaatatgaaacaggttaaggtattgataagtaactctttataaaatggaacttacatgcaactgtttttccaaggagatgcctttctgttaaatctttcattaaagaatctaacttgattttgaaaatacgggcgacaatgtccggtctatcatcagctgttaaccctctcttttcacaatatcttgttatctccggccattttgggttacacgtaaatgtgataaacaaatctgggaaaccaaaatgcttacaaatggccatagcatcgtaataggtttgaagcatatacctagggccaccagtgaaagaagatggaataaggacttgatttccttcttcactcatagttgtagatccagatgatgcagattctttaatagagttgaagttctcacatctcagcttagattgattgaatttgatataagcaagtctgtttgattcaatagttgtatatgcatcacatagaaactgttgaaacaacctttttgattggagcaaagtatgagactcatcttccctctcttgaattctgaatgcataccactgtctcatactgatacacttttttttcttggtgtaacccgacttataacacttctcaattccaggagtgtaaccatcttcaccatagcaaaaaattaatgggtattgtagtgccaaataggatatatgaatctgacttatcctcttgaggcgaccagtagattttttttctagaatgatatcacggacaggcatttggctaacaaaatccccagggatcagagctgcaacctcgcctgctgtaggcatattatataacctcccatcagtacctttacgatcagaaacaattctcatatgaaatggttcatcattagtagaatcaatcctctctctagcagatctgaacttctctacatatgggttcacttggttgagcatctttataatagcgtcaatgagttgcttgttcagatttttcttgccttttgttgatgaaccattatttccctttctacaatgacaaataaaaaatatctagttagatatcttgattcattgtgtaacaataaggcatagttcctgtagtagatataacaaaagtagataggtttaatgagtacccaataacattagccctgttttcaacttcattttcagtatccacaatataaagttgtgaatacttagcataatcaccatctttcggttttaaactgccaatctggtggtagtttcctccttgcaaacgaaacatagcaggtcctctccctttaggcatagatttgtccaccttaccaccaagagaagtcatagcaaaaatcatattatatatcctgataaattgtcgataatgacgacttaatgcatcatttccctttagaagtttttttattagctcaggtgattcctttagaaaaggtaatttgacactgccttgaccacaacatagactaaacttaggattttcgctattagattttttattgatcctctcattaaaccacatcaaagcaccacaatacttgcatttgtatgtagggtcaccgtggtctaggtaacctgaaaagggtaaatttaaaactgttgtaagtatgcacttatattgttaatagaaaatgaaatgagtttacagattaaaacataccgttttttttcgaatttgatggagacctattgacagtttttgccccaactggccgtccccttttctttggttgtgtagaagtatctttaggtgtgtttaatgataaactttccaaagcttagcagtcatcagagaataaaattgttttcagatttaagtgcatcatttaaaatctagttacatcatattcttaaagaaaaaaatgacacttacccattcttttggctaaagctgcatcttttttatttggatttaaacctttaggacggcctcttttttttggaactaaaataggatattaagcaaacactattagtagtaaacaattcaatgctgtcaatataggaaattggtaagcttgaatatcatgtctaaattaaacacaggaaaagcaactacaatgatatgaaaaaaagttgtataatgattttcagaataaattgtatgatatgattacctttatctgctgcgttgttagtttgcttttttccaaatggtctgcccctcttttttggctgtggaaaagaggggacaatgtgttctatatctccacattcagtaagagtctcttcaggtgacaatattaagtcattttcgtcattgaaacaaatattcgggtccacattttctgtattgtcattaagtaaatccatagaagaatcatcttgaatattcactgaggtctcttcaggacagtcgtcctctgaagcactaagattataattttgttcactatcagtttcattgtcagtaaaatattgtggttgaagatgctccatgctttcatcatcagtgctatcatcagtgatggctgtttgtgtgtacattggagatttgcctactaagtgtttcatagaaaaagtgtgtggaattgttagaccaaattaaaatatagactataatgaaacagttagtatattacctttatcagtaggagttacagaagcgttttttaagtctgcttgtaggtttcggtaatgaaagtggctagatagagaatctatatttgaccgtggctgattactgatagtaaatgaattatgatgccgagaaagttttccttgcatataatagaaaatgattttgtgagttataacttctgaaaatgttgcagtatctaaaacatatcgttatgtgatgaaaggttaagtacattacctacagcagtagttctatcagaaacatttcggaattcttcttctaggtttctgatatgacagttgctagacggattatttatagaagactttgtctgattgctgtttcttgaattaggatgaacataaagttttccttgcatagaatagaacatttattttgtgagttttaatctatacataaagttctccaatgtaattgaatacctctgtaagaagtcaaactaacctgttgaatcgttaattgcagaattagagacagtttgtggagttataagaggtgtggagaaacgatgatacacgttgctgatgtcctgtaaaactgaagctgattgtctatgattttggctgtcattctccttgtttgaaaatgctgtgagtccactctctaaaccaaaaatatataaacatataaagagtacaaaaacaatagtagaaattgaaagatgattttgattgtaccagtggaatatggtgtgctattcaaaaaacatgattgatttaatgaagcacatggagctctgttttcatatctctttgaagggagattacttagatctttcaacaatcttccaaaaactgatttaagaggaacagaaccattgtttgcagtcacgacagattgagtacttcgactttcaggtgttactggttcagcaagacgttttctcttagttggatttgggatataattataatctgaaattggattagctggcttttttttcatgattgagtctcaaattagcatctatgatgatggtgtgaagagacttgtaaagtacatagcggctgaccttttttttataatctgttgataagtgataaatggaagatagaatctatgtagtttctatattataagattctatataataaccaattctataatcttcaaaatggattgatgtttatcttgtatatttttttgtgtagctaaggacattgttcaaataagtttgtcaagaagaatatcttcatcatcgatgctagcacatattaagaggtatgtacaactatctcatttagtataaaatgtgtactcatgttgtgttgacaatatagtgaagtaatgaatgcattttatgtggagcaaacaaatcaataacttaaaggaagctatagatacataaggaacgactttttcaaaaaataggaaatttatgtattaaaatagagtacacaaattttaggatctttaatatatagattaacaaaagaaataaagcataagttcatttaggatttgacacaaatataacatcaagtacatagagaatttcagttctcgtcaacaacctccatcatcaaatcattatctgcttcattgagatcactaaagccacgactgcaaacaatgtatagttacatcttaactcaagataagtgcacaaacgtatacaaaacataataggagttgatttacacttacatataggatggtatattgatatcattgaacttgggatcaataaaaagccgagaaattccatcaacagtcattaagacattagaccctacaccaaaaaaagtaaactctcacatacataagtccttattgattccataaatttaaattaaatttaagggtgttagttgtgttaccatgataattagtgattctccaaaagttcaacacagcaacaatgggctcataattaaaagtgatcaaactggttctcgtaaaccacttgttaacaaactcttcacaatacttgccaattgctacacattttattgcattgcccctaaagaagaacatataaaaaccaatatatttaggtttatagaataaaagatagagtgtataggccttacatattatcctttatcttgaaggcgacatatcttgactcgtagtctgtctcgccttgacgacaaacaaagggaaaacttctaataggataaacttttactatcacaccaatagcgtctgaaatttaaagtcaagcaaatattgatatcaaaaactccaaaataaaatcagtctgacctatacctaagataaaaacagttacctgtcacgcaattaaattgatcatctgtagcatacttaacttcatcgggagccgcaaagtcaaaaaaccttcttgatgatctagatggaacaggccacatttgggtatggaacagacatttgatgtgaattggtctgagggcgtatttgacttcactttgagacaaaacaacttgaaaatcagacatgtagtaccacacaccaattctcagaacatctcgaaacttgtaaagatatgagccctctggaattttggcatctatacggctactctacaaaacagaacaatcaatagattgtcactctgtttaacaacaaagatatagactttataataacagaaaactaataatagaagtaggatctaagggaaccttttcatcaaccaatagcatagtcgtctcatcaccattaagggttggattatggttgtatagcgccaaaatcttaacataaaccctccagttagtagagtgaacatgtaagtctgaaagatggtgcattgtctccattgaataagccagaacttctagatttttagtttctcagaaaagaagttagagaggaagagagacaaagtaacgtgtgttttgggtttaagtttttataaaaagagtgaaacggcgcagggtttgtataataggtacaaaaaaagtaaaagtgaatcgtcaatttttttatggtttaattactgaatcttgaaaattattataaatttaaaatagattagagtttagtcatacgggttataggttactaaaaattaatggtatgctcttaggactcattatcaacctttgttcacttaagttatagctcataaaatgtaaataagttagacataaactatagataaacataagctcagaggaaagatatagaatcaaagtttaaataagcaaaattttattattaagtgtttagataaaacttattgaaagcaaaacaaaagtgctgaattctaataaaatagaagaaaacctaaccaaagtgctagagaaaaaaaagaaacatgaaaacagaaagcaggaaaccaacacatcaatccacgattcaccacctctacttcttctcaaccttgatcctcacaggtcccttcttgcccacccattcctttttcactatgattggtgcaacactaccgttacggacatgagccgggtgaccaacagctgtggaatcagactcagcaatgcttgacttcaaatcatttgaagtcactgcttctttaggctcataatcttcaatcttagttgaaggaatctgttcaccgaatccatcattagactgatataagtcgacgggctcaatgcacaccttctttgaagcagatgcttgatcagacccgtttggattatcagcatacacacgtttagaaacaggagtaacagtgtcggttgtctcttgactatactcaagcatcagtggaatctacagtaaaacacaaatatggtttagcgagagagagagttaaagtatgaaaacaactaaactatttatttctgatgatattacctggtcaccagagacaatagaggctggattgaccacatcagttgaatcctccaacaattcttcctcaagtaacccattcttgagaaggacttttgtaaccttgtagatttccttcccgtcccaaatgttttctttctcaatagacaccaagaaaaggaaagtcttaccatacagattctttagtgcatcagggagatcgtccgggtcatcaatctagataacaaaacacatagataaattacttataatttatacatacagacaatatagttaaaagacataaaattcaaaaactaacctcatcaacagagccattcaaaacagatggagctgtctcaccgattatctcagtacagatttggtcaaacaacaaaagttttgactcaccagtgttgtccataactttagcataaatcatgtatctagcaatcacattagtgacgacagttttgcaactgtcacaccaaaacctaggttttttccccttgttgttcacaccatgaactccagaatggatatgtgtgactttcttattgcaagcacgacagctaatgtaataccaagcccagtccgtgtcaattgcatagatggtacacatcaaccttgcttttccaacctaatatatataaagcatacaacaaataagtgtatatgatgaatgagcttatattatgcaacaatattattcaattatataaatagaaatcaaaaacatacatcaacagcattaaggagttgctgaattgtgtttcgaggatactcaaggcagctatcactctttttagaaacaacaatctccaactttgggattctctcacggtatgtcaagagaattccatcctgaggaagtctgtttagaacatcaaaattgttaatttatataatttcataacatagactgatatcgatacacattttatattagagttctgaaacttacgtccttaagaaagcatcgacctcaggaaactgaggattcacaaagacttgtgatgcatcaaatgagttagataaattcctgacacctgacattagaacaatgtgtaaaatatgtaatttatgtttactttatacaaagatacaattgagagcattggattgataagtttacctttgtaggattttatcttaacaaaccggagaacacaaacaacaggtcgagcaccagcctcgttacatcctctgtaaacttgttgagcaaaagtaccccacaaggtaactccaatgcgctcatcactgtagaaatagataaatatgacaatttagactcaatatctcacatcgaatacaattatatactttaagatgatatcagcaaatatctaaaataatattgagagactcacgatgcatctctgatatcaaaatcaattttggttgttggtttattgttagcctcaagttcttccaactcaccaatcattacaatctgaccaattacatctacaaaaaaaagatagatcgttattgtcagttttaagttaaaacatattagagttattagggttatataatgataacttaccaaccaacatggtgggattcagctctccactttggatcttttcgaaagtggccaaagtcagatagttagaatctgaaactgatggagatggaatcactgaagttccattgacaaaggacatcttgtagagatgagaagtgggacggaaacttccaccggcatagttgagactaaaagtctcaatgaaaacccactcaccaacagttagcatgttagcatacttgctaaccaaatctttcctcactgaacaatgaatctttttgccctgcatatatagaaaaagaaatttaatctatttagctaattcgtgtactatatgtaaactgattaaaaaaaattatgactgatgcaatgatctcttacagtttcatcagaaaacacaacttcaagggtttcaccggtgttggctgtgtattgacgccaagcatgaagagtcttcacttgcactctccaggaggtcttgtaaggcctgacatcagtaaggtaaccaaatgtggcagccatttattgtgtgtttatggacgggtagataaagaatagagtaggtgaatgatgatgaaagtcgaataatagatgtatatatagtgttcaagttagggttacgaatcttaaagggatagagatcaaatattgtagttagcaactgaatggaataaaatcttcaagcggtttagatttcgcatattcattatctagatatgttaatgagtttaattgtttagattttatgtagactgcaagattgagaaaatgtatagaaaatataggaatatgtatattaagtgagaatatcgtgtgggttattaaggagggaaacgaaatttggtaaagatttaaagcatacttagtcgatggtgtaagattatgagaatatattgttgtaagattttgagtagataacccgtttattaaggagggaaacgaaaatttgtatagatttaaagcttaattcttggatggtgtaagatttagagaatatattgttgtcattgggatatatagtgtatcgagatttaaagattgttataaatcagaagattatctatagatatatttgtattcgagataactaataatgttaagaaaatcttggaaataatattcatataaaaatattctttacacgtcagcaatcctagatcgggataacattattcctgcaatccaagatccgaacagagttaaaccgggttatacccacccatttgaattaattgttgaattatggctcaaatcttcaacattatcttcaaaaatcccctccaaaaatgtatatatagattatctgaaaatatataatgtttttcttttttaactttatgcttaaaagctgcggaaacttttaaataatgatgaatacgaatcacatacgttacgttttgaaagaaaaaacaatcataaggtaataataaggtcaatactaaaatctaactaatgaaacattcgaatgcacaatgagtgagtccatgtgagaaagtggggaaagtattaaaaaagaagcaacaatcgaatatcataacctaaagaatcaatgctattatacccaaattcgaattcaaaggcaaaacgccgattcgaaaagaattgagatcacaactaattaaaaccaccggccggagctgggaaaccataaccgcgacgtccaaggccaccgccgcaaccaaatctgggatcgcattcgagatgaattgattcatggatcttgtgaaatccatccttgaagacaccgaatccaaatagaaacccaatcgcgatcaccacaagaagcaaacacgtgcacagcatgcaaatccgtccacaacacatcttcttcttcctctgattctcttcttcttcgtcctctgtttttgtcgccgcagattccgagatttgtccacgatttaggttgaacagctctctaatatagagagagagaccgcgtttttgtttgttggttttgttggcgagaaacgtggagagagatagagaggataaatttagtgggagagaaagctgagagagagagatataaaggaattgtgattgtgcgtgtgtgtggacgttacgcctatttcttgcttttaaagctaatcaaaaaaatcaaacacaacgcaacaaacaacggtctccttatttccttaagttgacctatttattgggcctaaggcccattaatgtctttccatttttctttttctttaaggcggtggtggtggtggtcataattccaattctatatacatatgtttagcgattttgtttatttttcttttcaactccggctgcgatttttagggttatttcctttttgtatgtagccgccggattgttggcaatttgggtaggtttcttcacttttgtttccgatttagggttgatcgttaacaataaaaagtttgtggtgcaatcatgtccaaatcggtgtattcaaatgcctcggctcgggaaaagaatggtggtgatgcatccgatttggtcctggatcgtctaatacgaatcccctcggtgtccggtaagagaatagttatggtacataataattggtcccgtatttttcaatttaaatgcctttgttagaaaaccctaattgggaaagaccgaaagagtgtggtgcatgatacgatggtcccggtcctagatttttcgaaaaattgccttggttataaaccagatcggttttaaaatgcctcggctcggttatagatggggaagaattggtggtggtgcataaaaagttgtcccttttctattcaaatgcctcggttcaaaaaccctttctaaagcttatcacggtaagcttatgattgggaaagagtgtccgattatattcaaatgcctcatttagaaacccattctaagcttattgtgataagcttatgattgggacaaagtgtggttgcctgatacttggtccgattctattcaaatgcctcggtttaaaaacccattctaaatcttatcacagtaagcttatgattgggaaagagtgtccgattctattcaaatgcctcggttaaaaacccattctaagcttattgtgatcagcttatgattgggacaaagtgtggttgcctgatacttggtccgattctattcaaatgcctcggtttaaaaacccattctaaatcttatcacagtaagcttatgattgggaaagagtgtccgattctattcaaatgcctcgggtaaaaacccattctaagcttatcacagtaaacatatgattgggaaagagtgtccgattctattcaaatgcctcagttaaaatgattgggaaagagtgtggtgcatgatacttggtctcgattccatattgttctaaaaattgccttacttagtaagcttataaatgattaagagtaaagtgcatgatactctgtctcagattctttacttgaatgccttaattcaaaagtaaaaactcattggaagctaatctaatatgcttgggagtgggaaagagttgtggtgcatgatgatactggccccttttctattcaaatgcctcggttttaaaacccattctagcttataacaataagcttatgattgggaaggagtgtggtgcatgatatatggtcccgtttctactcagatgcctcagttaaaaacccataatattgggaaaagagtgtggtgcatgatacttggtcccagtcccagattgttctaaaatgtctttacttaataagcttgtaaatgattaagagtatggtgcatgatacttggtccttgattctctaatcgaatgccttggtccatgataattggtcccgattttattcaaatgcctcttaaaaacccattttaagcttatcttggtaagcttatgattgggaaaagagtgtggtgcatgataattggtcccgtttctattcaaatgcctctgtaaaaaaatattccattaaaatgattgtgaaagagtgtggtgcatgatacttggtcccgtttctattcaaatgccttggttatatacccattatatgattgggaaagagtgtcctgattctagtcaaatgcctcggttaattaaaagttattttctaaggttatcactataagcctatgattgggacaaagtgtggtgcatgatacttggtctgattctgtttaaatgcctcggttaaaaacccattctaagcttatagtgataagcttatgattgggaaagagtgtggtgtatgatacttggtctcggtccgatgttgttctaataattgcctgacttaataagcttatgaatgattaagcgtatggtgcatgatactctgtctcgattctctattcaaatgcctcaattcaaaagtaaaaacccattgtaagctaaacttaataagcttgggagtgtgaaagagtgtggtgcatgacttcattggtcccgaattgtctgtacaaatgcctcagttaatatctcattgtaagctaagcttaaaaatgggaaagagtatggttggttcatgtttctatgtccggattgtatatgcaaatggatcggttaaaaaacatgttgtaagctcataacaaggttatgattgggaaaagagtgtggtgcatgatttcttggtcccagtcccaaattgttctaaaaattggttaaaaaccacattgcaagctaatgttaataagcttttaaacatgaaaaagagtatggtgcatgatactagatccttgattctctagtcaaatgccttggttacgcttggaatgtgaaaaagtgtggtgcataatacttggtcccgaattgtcaatacaaatgcctcggttaaaaccctattgtaagctaagcttataaatggggaagagtatggttgattcatgatactagatccggattgtatatacaaatgcctcggttaaaaaaacctggtacatgatacttggtcccagtcccatattgtttaaacatttgccttggttaaaaaccatattgcaagctaaatatcaataagcttttataaatgagaaagagtatatatggtgcataatactaggccccggattctctattcaaatgccttgactaaagagtaaagacccactggaagctaatcttaaagaacttgggaatgtgaaagagtgtggtgcatgatacttgcctacttggtccggaattatcaatacaaatgcctcggttttaaccccattgtgctaattataataagcttataaatggggggggagagagtatggttcatgatatacggtccggctccccgattgttcaaacatataccttgcataaaaaccatattgcaagctaagttaaaataagctttttcttaaatgagaaattgtggtcccggattctctgtttaaaactcattggaagctaatcttgataaagtttgggattgggaaagagtgtggtgcatgatactttgtctcggattgtccgtacaaatgcctcggttaaaaaatacacattgtaagctaatcatgtgaacgggaactggtgtgatgcgtgatacttgattcctgtttgtctattcaaatgcctcagttaaaacaacggatcctaatccaataggtgaatggtggtgcatgatatttggccccgagaggttatacaattgcctcagctcatcacggacaaagatgcatgatactgtgttccaaatgtccataaaaatgcctcattggttaaaaattccatactatcaagcttattaatggcaaaatggtggatggtggtgcatgatatactctcggtacgaattgtctatatgcatcggctaaaaaataatcatcagctcattcgaaatttatgagtggtggtgcatggtaggaatattgtctcgtctggatttatcaaatgcctcgactcggcttaaagcccttgatccttatcttatgaatgtgtaaatggttaatggtggtgcatgattggaactatgtcccgtgttcattcacacaaatgcctcgacttggtgaataattggtgatatgctaaaggaagtttaagaatgagataaaggtagttggtggtgtatgataacttgtggagaaaggggtttgaaccaactcatttggtagaatttcaaatggtcttcaaatctaaatgaccttgtcaacaaggtgagatgttgatgtctagtcttcggcaaatcttaatcttaaactatttagaatttgcatgtactttcatattttgtaaaaagagactgtgtttttttacataaatcgtttgcaggtcctaaagagatatgatcttggagcaacagaaattacaagaagtttcatcctcaaagtagtttattgatctagataaggttgatcatggttatttaatagttaatatataatctcttgagaggttgatagcggagtgaagaagctaattggtgtgtgattttgtgaatcacatcaaaactattaagattatctgattgtgttgctaaattgattattgcaggactctctccgatggatccatgagcaagtatcacattctgcagcttcagaagtgtctgatctttccataattcccaaattgattcatttgttttgtggttgatcaggtgatttgattatagctagtggagaatcttactggtccgaaaaaccctgaaaatcacaggtttggtattgattatgttttgatcttgaagcaacaataaggttcttatgcagtcaaaatctgtcttctttcttcttacagttgatgtaatcgtaaaaggacattacgttatacagatgagtttgaagacatcagttgaatctactcgacactaaaacagagatagtgaacaattacagagcaaaatcttgatatttattgtttggttaagttcctcaagaacctagtgtggttcttatttgctttttcaggtttccaaaagaggccatttccatctttgcgataaccagagataccattttcttcagattatctctgcattgatggtgatcactagatataattcaagatatccatgctgcattctctcttcgatggtgaatgtaaagaaataagtcagatgtagaacaagtaaatatgcaccaatcatatttaaagcagaaagaattattcgtgcttccgtggactgtttattaagttatagggcttaaaaagaccattaaggcccaaactaatgttttcgtgtctgaatttgtgcggaagcgtcctcacattttattgcgattatcaccccataacttttttagtcatagaatttacgcccgcactatcaaaaaagcaagtctactacaaaacttctatagctgttctcactttcaaggcatcatcgtctctctattcttgcttttcgcgcttctctctctacgtgactttcgatttcttcttacttttttctgaaatctattcaagaacctccacattcaattacacttgtctattgatcgatatcgcaaaacctaaatttggcgatcctgaatgcgtctttgaaagtagagagatttaaagatagtgtataaaggagactgaaatgttttccatcttatttctctctttaattaatcctattacattgagttcttatatatagtgtgaggattaggtttacattttatcctcatcctctaaacatttgagcctattagttaagatcgtatcttgacttgaacagctggagatgcttttccttgacgctctcttagccacagaactaactggtttgtcttcttgttctgttgcagatgaccgttgcacttggatggactgaatgggcttctcggggttctcctcttctacagcagcttcctcagtctttaactttctcatcatcatcatgcattcttcctagaatgttttaggattacccaaagtcagtaaatccaaattcaattgttattatatatatatatatatatatatatatatatatatttagaaatgagagatgttaaggttgactattcaccatggtaacagacgtaaaacaggggtttccctcctctggtcgaatcttcaccatggtagaaccgtttcccttgttgcatgttttaccatcaaattccaacatcttgcagagttccttgaatgttttagcatcaaccaaagtcagtaaatccaaagtcaatgctatatatgtacttcacacaatagcacgtaaatacacaaatattagaaatgagagatgttaaaacttgcctttagtgttagaggagaagaagtatgatacgctatatcttgagtaaccagcaagtcccactcctgcttcatgagaatggcaaattaggtaaagtcgtgaaagggtaactgtaagtcccagaaatcagaaatctctcaacttgagatgagatattaaaacttgcctttgatcgacccagcaccatgttagcagggtctagtcgatccacattgttatgactagcctccctgtcccattcctgcgtggagatgagaggcattatgtacttttgaaagggaaacttgtggtaagagaatgatggtttagaatcagagagctagtgagctgcttacagaatacgcatgtttttcactcttgagatgcgtggtgaaatcttcaaagctttgggcaccaaaatcgcattctgagcaaaacaagggagtttcaccggtttcactgcgcttgtagtcctgaagaacaagtcttgttgctcctgtttgttatcctccatagcagcatctgtggattcaaaacagcttaatttgcttgttatcagatgcatgttatgagagagaggccataaaaaatacctgccattaagctatcccagaacaactcttcaggaacatctttaagaatgcttagccggagagctagagctcgtggaggatatgcgagaagaattctgtatcccttcttctctatgtcgtaaagtgtactagctaaagttttcaggtccttagaactggttatgagcattatagtagccggagcaagattctcatcagtccactcaaacaaatccctttgaatatctgtctcagtaagtaaaggaaactaacgtttaatctaaaccctaattaacaaaaaaagagatgaaagaagatttttaactaaccgtgggcatgtttaagagcgattccagtggaagaaagcgttcgcagggattcgtcaccaccagggatctgcgttaggttgccaacggcagtgataaagagaggaccccggcggcagcgccactggcctgacttttccaacgccgattctatcctcggacccaccagacgaggatcatgaccatcgggaagcggacaggtggtcatgttccacaacaccaacgttttctcgaaatgtttgttcattattcttcgacctaaaagacaccttgaatcctatacgcacagagaagaccaaaaggaaagaacgatggtaactttcgatcagtttttttagggttcatataaatgttgtggagggagagagatacttgcggttggtttctatgggccgatgcgcgtggcccatataataataattacttgtgaattcctttaaacccaagtttaatttgttgcgcgattatcaccccatcacttttagtcatcagatttacgccccactatcgaaaacgcaagtctacaaaacttctttagctgttctctcactcctttcaagtcatcatcgtctatctctactcgcttttcgcgcttcccctctctacgtgacttttgatttcttcttcagatccgccgagtcttctttttctgaaatatattcacgaaccttcacattcaaattacacttgtctattgatcgatatcgcaaaccctagattcggcgatcgtaaatcaatggcgtcttcacctggtaacactaaccctcacaatcctccgccgttcgatctcggtactatcttcaaaccctcatccaacccttatcctccccctacaggtccgtttcttaacaaccagtacaatcagcaactatacgcgccgcctggtatcgccgcccaaccatctccggtgaatcaaacgcaacaggatgtgtcttcctcttcctccgctactaacttgcaaccacagagaacgctatcttatcccacgccacctctcaatccccaatctccccgtgtcaatcacaatccgggaacgcacatcctcgctctcctcaacaacggaggtgccgtggcgaaccaagagccgtcgcatcacaacgagatcgctcgagcttttcccggcggttcgggtcctattcatgttccaagcggtaaaatgcccaagggaaggcgattggttggtgaacatgcggtgtatgatgttgatgtgagattacagggagagattcaaccgcagctggaggtgactccgattaccaagtacggctcggatcctcagcttgtactcggtaggcaaattgctgtgaataaggtctacatttgctatggattgaaaggaggaagcattcgtgttctcaatatcaacacagcattgaggtctctgttccgtggccattctcaggttcgttgtttctcagttacttattcgagtatccatcaggtatcatcgtcattctaactacatgtttgtctccagagagtaacggacatggctttctttgccgaagatgttcatctcttagctaggtaatggttctggaactataagcttcttctactttgtcgttttacattttatttcataccgtctacttgtctatttcttcaaaacagtgttagtctagatggaaaagtttttgtgtggaaaatttccgaaggatctgagggagatgaacaatcccagataactggaaagatagttgttgctcttcagatacttggagaggaagacaccaaacatccacgtgtctgttggcactgccacaaacaggtatttcaacatatttcttttgctacgggaagttgcatatttttctgttgtgaacatgagctcgctctgttgtgtctatacttctgattgtgtaaagtccattctttcaggaaattttggtagtttcaattggtaaacatgtgctgcgaatcgatactacaaaagttggcagaggtgaagtgttctctgccgaggcacctctccagtgtcatcttgataaactaattgatggtgttcagattgtgggtaagcatgatggagaagtgacagatttgtcaatgtgccaatggatgaccacgcgcctggtttcttcttcagttgatggcacggtttgtgtttgttcttataatttccttcactatactcttggaatatacgtctactccttttcataacatttctgaagttgaatttacctgacgaactaaaattttaactgttttcgctgctaactgggtgtaacgttgaagtttaattgattgagactcgttagctttagtttggttatgctagctcatccaaaattgaagagattttctaaattccgtctcactgtagattctcttcacaaccaggaataatttgcaacagctagtatttttgtgtgtgaggcttactttttcttaataccaacaggttaagatatggcaagatcgtaagacacaaccacttgtagtattgagacctcatgatggacttccagtcaattctgccatatttgtgacatccccggaaagacctgatcacatcatacttatcacgggggttagtttgctcaaattattacttacttttctcattgctatataatgttatttggccctgctttgttgaattcacattttagaattgttgcttttgtttctgctaagttgctaacgcatacactgttggcaatgttcttctcgtagggtcctctaaatcgagaaatcaagatttgggtctccgctggggaagaagggtggcttctacccgctgatactgaatcgtggagatgtacccagacacttgatttgaaaagttcaactgagccacaagctgaaaaggcatttttcaaccaagtcatagcattgtctgaagcaggcctgcttttgcttgcaaatgcgagaaggaacgccatatattccgtgcatttggactatggctcatctccagtggaaacgctgatggattacttgtccgagtttacagtcactatgcctatattgagttttattgggacaaatgatcacccagaagaaccatttgttaaagtgtattgtgttcagactctagcaatccagcagtatacattagacttattcttgtgcatgccacctccaagagagaatgtgggttttgagaagtcagattctactgtgtcacgggaggcaaaccttgttgaaagcacgttagaaacatctggaatgaagcctaccgaattaccttcagttggttcagtgcctaaaccatctattttagtgaatagatcggaaaatgctaatatgttgagttttccagcgggccctgcatcagcggggatcacaccaccagcaattgttccacccaacggtgagcctaaaacttctgggatgccttctgagaccagtgatgtagattctgcgtatgctccttcacctcaacttcctctaagccccagactatcaagtaaactttctggctatcacactcctgtagaagcgtttgagcaagtgctaccacatcataagcttggtggcaaaacaagttctgctgattatttttatgtgaggcaaactgatgatgttggaggaagaaatttggatgtgtcttctgtcgaggaaaactgtagaagcaaggacacgaatgttacacctgatgatgatgtgtctgggattcgaagcccgtcagcttttttcaaacagcccactcatctcgtaactccttcagagatattgatgggcgtttcttccactgaagcctccattactactgaagacaagagggatagagatgcaaatattgaggaagtgaataatgatgcaagaggcttagaagttgagttgaaagaagtaggcgaagcacagacttcgcagaatggtgaaattaactatcacgaaacaactgagaatcacacttcagaaagtagagaaaatatcttctgctcacaggcttcaaatctcagcactgagatggcaagagaccgtcatcctattacagagggaagtgccattcctggggattctatggcttatggacaacctttacaagctggagatgaaaggggtcttgactcaagagatgtctctgcaaagcttcctgagtcgggttcatctagtgggttagtagctacaaatagcaaaggaaagaagcagaaggcgaaaaattcacagggtcctgggttgtcatctacatcctcaaatgttgctaatctggctgactccttcaatgagcaaagtcagagtttaaatcatcccatggcagatttacttcctcagttgttagcattgcaagaaacaatgactcaggtgacatatttatcttgaatctagttaaaacttatttctcttaacaatatttgtttttatactcttgcatcgttcactgagatacactattaagcttggtgttaccttgatttggcacatgagatcctttgttacattcgttttgaaacgaaaatcagatttggtatataactggcatttatcgatgatcagtttttgcttttcataccttggtaattttgtttgatttttatttgttgacctgaaacgttattacccttccaggtaatggcttcgcagaaggagatgcagagacaactatcaaatgctgtcactggccctatcgtaaaagaaggtaaaaaactagaagttgccttagggagaatgattgagaaatccagcaagtcaaatgctgatgctctatgggcccacttccaagaggaggctgttaagaatgaaaaggcattacgtgaccatggccagcaaattatgaatgaaacgacaaacttcacgagtaaagagttaaatgccatgtttgagaaaacgatgaagaaggaatttgcttcagttggtccaaccctagcacgtgtagtaactccagttattgaaaaaactgtatcttctgcaatcacagagtccttccaggttagtaatttaagagaaatttagagctgatttatgagaaggtccattgatgaaaaagaaaactgatttctctttatacagagaggaattggtgacaaagcagtcaatcagcttgaaaaatctgttaattcaaagcttgaaacaaccgtagccaggcagattcaagcccaatttcagacatctggcagacaagtcctgcaggtaaaaattcgagtttaaactagtttttttatgccttactgtctcttgtatatatattttttatgcttttcagacagttatgactgattgactggttatatatacaagtcttgtgcatacattctcaactgcatcgttgtttatcgtaaaagcagttgtctcttatatatatttgctgccatttgtcaacttcaggaaggtcttaggtcaagtatggagtcctcagtcataccttcctttgagaggtcatgcaaaaccatgtttgagcaagtagactcaaccttacagaaaggaattggtaagcacacgagcgcaacacagcaacggattgactctggacaatctcagcttgctcatactctgagggtatgatagaaaatcgtccttcttccagattttttggctctttcttctagttatggtagcaaaatccttttttaatcctcatgttaaacatgcttttatacaggaaaccattagttctgcatcatcagttactcaagccctaaatcgtgaattagccgagagtcaaaggaatcgcttagctctcacagctgctggatcaaatcccttggttactcaactaagtaacgggcctttaggtgctcttcttgaaaaggtttgcacatctctggatcaaatttcttaccatgaatattttgtcattttctgcgtgtttgacatgtatatacgttaactgcaatgcatcattgttgtttcaggttgaagcacctatggacccaacaacagagctatcaaggttgatatctgaacgcaagtacgaagaatctttcacatcagctctacaaagaagcgatgtctctatagtatcatggctttgctcacaggtgaattcttttttggatttcctgcatcataagatctcataaccatcagttttgcgtaacatcccatgacactggtgttgtgccaattcaggtggatcttcgtggactactggcgatgaatccgcttccgctgagccaaggtgtgcttctttcactgctgcagcagttagcttgtgacataagcacggacacatcccgtaagctaggttggatgactgatgtggttacagccataaacccatcagatcagatgatagcggtccatgctcgcccaatctttgaacaagtttatcagattttgcaccatcaccgtaacgcaccaggcagcgacgtctctgccgtcagactaataatgcacgtcatcaactctttacttatgagctgcaaatgacatctcgctctctctgtttcttcttgttagttacatgcataaaacataggaaacctctcttctctgtatttctctctctactctagttagattttttttggttacccattagttcaatttcctttaactgtaaacatctggttggttctacgtctataatgttccctttttcttctccgagagaatgagtttgctaggatctggaaaaccctgagaaaacatgaagatcatgtatgggcagggtatactgattttctaatgaaattggttttgaagtaactacaagttacctgcagaatagacagatgagtttgaagacattatgggaatctggtgtggcagtaagcagagaatttgtcaaaattgagcaattgcaataaaaaatctttttctttacttttgagttcagttgatcagtttttggattgaagggtatttgctgttgggttcggttgcctttacttgcatgtgagctcagctgaccatgaattcagaatccttgtcatcttcttctcttttgttggaggttccgatgaagagcaagaagttggaaacaaatgatgggtgaatctctggaaatgtaaatagggcccaataattgaaattaaaggcccaaacgagtaaaatctgaaaattgttttacagaagcggtctcatattttagatataaacacgatcatcaccccaaaacttttcgtgatctgggacatgcccaatttaatattttcattaaagaagaagaaaaaatagctaagtctccaaaagttctctacctgttctcactttcaagtcatcatcgtctctctctctctattgttgctctctctctcgctttttatgtgactttcagatccgccgagtcttctttttgtggaatcttttcaaggagctcagtattctatatacacctctctttgtttgatcgatttcacaaaccctagcttcggcgatcttaaatctgcaaaaaatctatggcgtcttctcctggtaatactaaccctcacaatactcctccgtttgatctcggtattctcttcaaaccttcatccaatccttatccgccaccggcggcatcttatcctccgcctacaggtccttttcttcacaaccagtacgatcagcagcactacgctccgcctggtatctccgctcaaccatctccggtgactcagcagcaacaggatgtgtcttcctcttccgccgcgactaacttgcatcctcagagaacgctgtcttatcccacgccacctctcaatctacaatccccccgttccaatcacaatcccggtacgcacatcctcgctctccttaacaataccaacaacggagcccccgtggctaaccaagagccgtcgcatcagctcccagtagtcaatcacaacgagatcgctcgctcttttcccggcggttcaggtcctattcgtgtaccgagctgtaaattgcccaagggaaggcgattgattggtgaacacgctgtgtacgatgttgatgtgagattacaaggtgagattcagccgcagctggaggtgactccgattaccaaatacgggtcggatcctcagctcgtagtgggtaggcaaatcgccgtgaataaggtttacatttgctatggattgaaaggaggaaacattagggttctcaatatcaacacagcattgaggtctctgttccgtggccattcacaggttcatttactttttctctgtaatttgtgaattacttacttattcaagtatagtaggtactcatctagttctaactacggttatatatccagagagtgacggatatggctttctttgccgaggatgttgatatgttggccaggtaatgttttggaactgtcgtctaattaggctatgctatttgtacatatatggaagagtggctcattgaattcttctttgtttattagagtttttctggttagcttcttcgactttgtggtttatacctctatttttctgtttcttttaaacagtgttagcctagatggaaaagtttttgtgtggaaaatttctgaagggtctgagggagaggatcagccccaaataactgggaagatagtacttgctcttcagatactaggagaggaagacaccaaacatccacgcgtttgttggcactgccacaaacaggtagttgaacatatttcttttgctacgagaagttgcataagattcttcttagaacaagcttctgattgcttaaatgtcattttttcaggaaattttggtagtttcaattggtaaacatgtactgcgtattgatactacaaaagttggcagaggtgaagtattctctgctgaggctcctctccagtgtccccttgataagctgatcgatggtgttcagattgttggtaagcatgatggagaagtgacagatttgtcaatgtgccaatggatgaccacgcgtctggtttcttcttcagttgatggcacggtttgtgtttgttcatatcatcccttttctttaaacctctctgaaatgaatcattccaaacaacccaagtttatactgattacgttgcaaactgggtctaatcctgacatttttcgtaattagaactagccagccttgttagtaagtgcatttgacatccaattactattctagcacattttgaattttttaaggtttgctaagttccatttctgacatgcactgggtatcatctcttttcaaccaggaattattttgcaacagctagtatttctgtgtgtgtgagtcttactctttctttccttataaccatcgtacagattaagatatggcaagatcgtaaggcacaaccacttgtagttttgaggcctcatgatggacatccagtcagttcagccacgtttgtgacatctcctgagagacctgatcacatcatacttatcacgggggtagttttcttgaatcaatactactgacttttctcagctctatctaatctcatttggctttgctgtgttgtgtttacattttatacttgtagctttcgtttctgctaagttgctaactctgtcagtgttggcaatgttcctctcatagggtcctctaaatcgagaaatgaaaatctgggtctctgctggggaagaagggtggcttttaccagctgatgctgaatcatggaggtgtacccagactcttgacttgaaaagttcaaccgagccacgagctgaagaggcattttttaaccaagtcatagcattatctgaagcaggcttgcttttacttgcaaatgcaaaaaggaacgccttatatgctgtgcatttggactatggttcttctccagttggtacgcggatggattacctatcagagtttacagtcactatgcccatattgagtttcattgggacaaatgatcctccagaagaacccattgttaaggtttattgtgttcagactctagcaatccagcagtatacattagacttgtgcttatgcttgccaccacctatagaaaatatgggtttggagaagtcagattctagtgtatcacgagaggcaaatcttgttgaaggcatgtcagaaccatctggacttaaacctactgacttaccttcagttgattcagtgccaaaaccttcgattatagtgaatagatcagaaagtgctaataagttgagttttccatcagcggaagccacatcacaagcaattgttccacccaacggtgaacctaaaacttctggcctgccatctcaaaccagtggtgcaggttctgcgtatgctactttaccccaacttcctctcagtcccagactatcaagtaaactttctggctatcacactcctgtagaggcgattgagccagtaatacctcatcatgagcttggtggcaaaacaccttctgctgattactctgttgataggcaaatggatgctgttggagaaagaaatttggacgtgtcatccgtagaagaaatctcaagaagcaaggactcaaatgttacgcctgatgatgatgtgtctgggatgcgaagcccatcagcttttttcaaacaccccactcatcttgtaactccttcagagatattgatgggcgtttcttccgctgaagcctccattactactgaagacaggagagatagggatgcaaatattcaggacgtgaataatgatccaagagacaccgaagtagaggtgaaagaaataagtgaagcaaggtcaacacagaatggtgaaatcaatgatcatgacgaaactgagaattgcacttcagaaaatagagaaaaagtcttctgctcacaggtttcaaatctcagcactgagatggcaagagactgttatcctagtactgagggaactttcattccaggggaatctaaggcatatggacaacctataaaggctggagatgaaagtggtgttgactcgagaggtgggcctgcaaagcttcttaaaggaaagaagcagaaggccaaaaattcacagggtcccggtttgtcatctacatcctcaaatgttgctaatctggctgactccttcaatgagcaaagtcagagtttaagtcatcccatgacagatttacttcctcagttgttagcaatgcaagaaacgatgaatcaggtgacatatttggtctagaagaaactaattagaaccctatttcttaacaaaatctgttattatactcttgcatcatttcactgacacactactaaacttgttgttaccttgattttgcacataggagttccaatcttacattcgttttaaataaataacttacatttatcgatgataagttattgcttggtaattttgttgttcttttatttgttgacctgaaacattatttcctttccaggtgatggcttcgcagaaggagatgcagagacaactatcaaatgctgccactggccctatcggaaaagaaagtaaaagactagaagttgcgttagggagaatgattgagaaatccagcaagtcaaatgctgatgctctatgggcccgcatccaggaggagactgttaagaatgaaaaggcattacgtgaccatgcccagcaaattgtgaatgcaacgacaaacttcatgagcaaggagttaaatgccatgtttgagaaaacgataaagaaagaattggctgcaattggtccagccctagcacgttcagtagtaccagttattgaaaaaactgtatcttctgcaatcacagagtcctttcaggtaagattttacgagaaatttagagctaatttttgagaaggttcattgttcttaaaagaaagctgctttctcttttgtacagagaggaataggtgacaaagcagttaatcagcttgacaaatctgttaatataaagcttgaagcaaccgtagctaggcaaattcaagcccaatttcagacctctggcaagcaagccctccaggtaaacttgaggttcacctagctttgtggtagtttatagaagtgtctataagtctccaactgcatacatagtttaacggaaagggagtttatctcttatatatatttcctgccgtttataaacttcaggaaggtcttaggtcaagtgtggagtcctcagtcataccttcctttgagaaggcatgcaaggccatgtttgaccaaatagactcagccttccagaaaggtattgctgagcatacaaatgcagcccagcaacggtttgactctggacactcccagcttgctcatactctaaaggtacgatggaaaatcattcttcttacagctctgttatggttgcaaaatccaatcatttctttcttctctctaaagctgcttgctcgttttacaggaatcaattacttctgcgtcgtcagttgctcaagccttaagtcgtgagttagccgagacccaaaggaatctcttagctctcgcagctgctggagcaaattctggtgggtctaattccttggttactcaactaagtggcggacctttgggtgctcttcttgaaaaggtttgcacatctctggaactaatcactaaccataaatcttgtttttgtttagtgcatgagcattttagttactcttggtggcttttcgctgcttagcaatcatagttgaggcggttaactagagaagagaactaacagcttagaaggaagtttaggcagaagaattgagcattctggattggtctaggatctgccttgggcttaggagagtttatggtgctcacccctagggttctctatctttggttcttggcttaagtttattctctgttcatcttttgtaattgagtcagagagcatataattagagaaccatttctgctcttatccgaatcctaatctgatgtcattttctgagttttgactatcgcaacatatgtcctttcaggttgaagcacctatggacccaacaacagaactatcgaggttgatatctgaacggaagtacgaagaatctttcacttcggccctacagagaagcgatgtctctatagtatcatggctttgctcacaggtgaaatttttgtttggattttgtgcatcataagatctcatacataacccatcagttatacataagatcccatgagattgattgtgccaatacaggtggatctacgtggattactggcgatgaatccgcttccactgagccaaggcgtgcttctttcactgctgcagcagctagcctgtgacattagcaaggacacatcccgtaagctggcttggatgactgatgtggttgcagccataaacccatcagaccagatgattgcggtccacgctcggccaatctttgaacaggtatatcagattctgcaccatcaccgcaacgcaccgggaagcgatgtctcagccatcagactgataatgcacgtgatcaactccatgcttatgggttgcaaatgatatctcttatctcgttctctcttcttgttcgttgcttatataaaacataggaatacaacaatcactactcttctctgtatctctctacatttgttagatttttgtttcatttttggtttgaattttgtttttcttgttttttccatccttcttttaaatgtaaaatctggttgttttatatacgtttactattcactcttcttcacaagaatatcttatgtgtaaaagccaaatcaatgtttggattaaagcagtaactttaccaatgtatttgctttagattcttcacaggttgtttgtaactattttatttcttcttgttgtctttgtcaactacagtatctttaaaacacaggctcgtacactattttttttttttgtgtagagaaacaaatttgataaaatatttaatgaacagtgtcatcattattagttatggatttgaacaaaaagttgtttataacagattaaagagaaaatattacttggtttactaaaacaaacagtaccaaaattaggaaatagtgagtgtgttctttcgaattgccaatagttttaaatatctcaagatcaaataaaatgatttcttacttggtctacttgtttcgtgtatatttgaaaagtagagcaaaagatgcgataaaagaagaaaaattataaaggagaaaactaaaatcatatacatttctctactcataacttctttatacattgttaactgcttaagttaaaagaaaaacaaaaaaaaagagcggattaaacttaatttccccttaattttccaaagatatgacaaggaaaaaaaaaaacgtaatcaaaggggaaagtaagtcaaaaagtgccctttcgctgctgcaaaatcataggaagcctaaaatcaccaacactgatccgtctcccatctccgggtcgtagcgtaaacccgccccgaccgacccatcgctccggcgtgtacccgtctccgtggtactctaagcgtcgagtcgtaaatcgctcttgtagtcggatccgcaagtgtcgcgtaagctttgtgaatctccataaaatctcgaccgtccgattccgacgcatctggatgatatactttagctaagctccggtacgccgtcttgatctccgtcaaggacgccgtttcattcactttcagtaattcgtagaggctagaaactctccgacgaacggattccgttacagctggctcggcgttaagcgtctgagctgaagccttaaacgacggagctccggtgggaaatctcgcggttccgctgtagaatctggctgttctctgttgaggaagaatacaatttcccggtgagaatctcccggcggagttaactagggttccagccattttagcaattaaaataaaacttgaggggcaaattcggaagaaagtgttaaaatatagagaagcagaaagagagagaggttcttggagaagaagaaggatatgaatcacaaaggaaagagaaggagtgagaaagacttatataaagagctccataccccaaaaaaaccttttttgtaatttggtaaccaaattttatattatttattatattcgaataaatcttgatcggttttagaatccgtgtgtatgtgttcattttagcttattattgtaatggaatcgaagaaaagaagaatagctattagttcttctcctactattttaataaaattcaccgtgttttgaaaaaaaatatctaggaagctaagaaaaaaatttgtttaatcataaaactgatccgaaagaaagtaatatgatacgttctaccgacagtttgaatttcacagactatagggtttaataaatgcaagtttcaattatagggtttaaagtaacaataaaataaaaataaaggggttaaaatgcaaaataaagtaacaataaaaagagcgaaaatgaagggaaaaaagaaaggtaaaacccgtgggagagtggcagtcacctgttttgtgaaaattctatggaaaggatgacgtgtcagccaattcaaagattcgccttctagaatcccttttctcggctcggctcgctatgatgatttcattgatgacatgtcatacagctgtaatttataaaggttttatcactaatattagtttgtcgatatatacattgttttcatgcaatttgaaaactaatttacttaatttaaaggatgcatattttgaatagtcaactctaaccaattatttaaatctgttaacagtgtttatatggtggtacttttatcccgatgttttaataatgtcatctccactaatctatactactagtacaatacttgcttgcaaagaatatattcgattcattgataaataaataaagtgcttctagaaggaatcgttgccattagatcaacggctgagaattgagagagcagaaaacaatgtaccgtcacatgataatcagacagggaaaagtaaactcgtcgactaataaatatcaacgccattctagaagcattttgttgtctttatctgctgaattatttattacgtagtagtatttaataatgaatgtgtagagaaaatagaccaattaaaaaagtgtctgtggaggacgtggcggtgtggccacggtgatggataggacttctagaagactacgaaccctacagaaaaaaaaaacgattttgtgcgtaacacactccattttttagtgtttaacaaacggtggtagtccattgttttcatcatttacaatatcaacgcaaaagagattgtattttgacagtaaacattggaagaaaaatatatggcttgtaaattgtggcttatagtagtaagcacatattaatatttgattggtaactggatggatgaaaactaactttgttaattatcgctcgcaataagcttctagacttgtcgtttcatattaacaatcggccggtaagcttgggtcatatgttttattactaatgtatcggatgaatgaaattgaactttgttaggtacttactttaaaatgagtgtctcgcaataagcttctagactgtggttgatactagtagtaataactgataactatataagcatgtaatcaatattttattaggatgaatgagatttacctttgttggttattttataatgagtgtgtctagcaataattaaagtttattatactgtgatttaatgaattgtgtagttaaaggtggggactactactttggttgagggaacttggtgggggagtcatgtttttgtgtgtactccaagttccacaaatactaactcttctttgcttccctttttaatatgcaaatcaaccaattatatttctgttattacgaccatctactaatatttaagtctttcttgctatctattttctaaagcatccacttagtaattaaaaaaggagacacttgtaaacttcattatcatcataaaaagcaccaccacaaaaaaaaaattataaccacagcccacaggtccacaagtaaccagcgtcaaacaaaaatcttggttgtttttttttgttgtctaattgaaatagttacttgtcttttgttcatatatgtggatattttgtttggctctatagcaactctcattatttcgcaacctaatcattatggtctcgcgaagtcactcgatctgagccaaaatcagatacttagtggtttgcttgttacatcttatatcatttcgatatttgtcaagaaagaaagaaagaaaaactaatatcatttcgataaaaagaattaaacaacaaggtagtagatgaacaaactaatgacagacaatacacgtatataatagaagcgacaagtcggtggtatgaagatacctggccatgtgcttaactgcaaagaaaagtacttctcaacttcttcttatcaaaattattttttaatgatcgaattatacgaatctgtatagatttataattagaggggtattgggctaattgctagtgagtctagttatactgggtccatactttgagaacatgaaccttacggcccattaaactactcataggcctagatcgctctctactctttttataaaatttcaaacgaatagtataagactataagttttgtgataattgcaaaaatatactcaatctacaattaatttttaaaaaaattttaggggtaaaattattaaaaaatgagtaaacaagttcaacactgaataagtgttaaaaacattatttgcttcgataccataaagtttaaacccaaattcagaatataatcctaataaataaggtgtatgcataaaaagctagtggtggaaactcgagcaccagtctcgattgaaagttgagaagaattatcaactcatggagcatcacaaatagccaattggtcgtaacatagatagtggctacaagtaatatttaactactgaatcgaatttgtagtgatttgttcaaataattcgaaacctattgtaccatttttatacttttttgtaacatcagctaaagtaccaaattaaatgataaaaatgttgttggttaaataatttattgcaatatatactgaaattaggacaaagaggctagatttcttgagggaaataaatgcgggaactgtcgtaaatggggtgtgaaacggcgccgttatttgggtgtctccatgtcttcttccacattctaagaaagaaagaaagaaaattaaataatttattttcatcaactgatgaaacatcaattcaaccaagaacgaaacttcctctcgctcgcgctctactgacaatctgagatccagggattctattccagatcactctcaattctctcctccatatactatcgagcaaacggattcatcatcatactctgcgttgtctccagcagatcagaagaagaataagtagagaagaaacctcaatcaaagtcgttgttctttcttatttcggttatgcttgatttggtttctcctacttgttcaccaattcttcttctctgacccttcgttgactgcaaggtaaagttgccttctttcttttgcccttttgttcttaacctcaaagtctcgattttgttgtgaaatcattccatctctttccgattcatggctcttctgcgttaagttctctggattaggtttagcaattttatacgaatgagtaaagtttgactcaacaaattcttaatttggcgttattcagatacttttgattttgattcgcgactcttttctccttttccctaaggaatgaggtttataactctgtgcagtgctacttgtagttgttgctcctgtaatatgaagctgttcaattaatataaaagtgtctgtttccctataatgttaagcgttttagattaatttgtggtgtaaaaatcatccatacgactcctcaaagtgttttcatctagtgtcactgtggttataacttggatctcatacaagaagctttcctctgtatccaggttgctgcagaagcggacgctgtagttttatccttggtccatgtgttggtagcacaagggtatgagttgttgtaaagtgccagttcttattgaagcacaagttgaagtaagttagttcacggcatactctttggtttctggatagccagagattttgtacgtatctgagttcatcggcttgttgtgggattaatgaaaaagatgtttgctgtaacagatggtgtcggctaatgaacttgagaacaaaagcctatttaggcaagaagaagatgccacacaaactaaagaagcttctttaatggagcaaggatcactttctacaagtttcccccagcacacgcctaaagcaccaaagaacagcgtacttaatagcataaagatcgtgattttttgtaataaactcaatctactactacctttcggtcctctagccatattggtccactacatgatagatagtaaggtaaattgttactaattctagtagtttcattttcatgtcatgtttaagagttgaatctcaagaaatggtttttgctgtgggtcaggggtgggtgttcttgctgacgttagtaggcattacaccattggctgaacgtctaggatatgccacagagtaagccccgctagcacttgtagcactaacttaccatatttttttattttgtttgggagacttatgcttaagtatttgcttctctggaacaggcaactggcttgttacacgggtccaactggtatggctttgttcttctgaaacgggcaattccttttcctttttttgttcttttttttcttttgtagttttgttataattgttgacgtgttatacatatttcacagttggaggcctcttaaatgctacattcgggaatgtgacagagctgatcatatcaattttcgctttgaaaaatggaatgatacgtgttgttcagctgacgttactaggctcaattctgtctaacatgttacttgtacttggctgcgccttcttttgtggtgggctagtcttttaccaaaaagaccaagtctttgacaaagtagaaattcttatccgcttcatgatattctcgttcttcttcttgctattctctaccgtgtttctgagccctattcttttgcaatccagggaattgctactgtgaattcaggattgcttttgatggctgtcatggggatactcttcccggctgttcttcactacacccatagcgaggttcatgctggatcatcagagctagccctgtcaaggttcagcagttgcataatgcttatagcttatgctgcttacctcttcttccagttaaagagccaatctaattcttatagccctctcgatgaggtttgttatgtgccattaatggttgcctcctttattcaaacattggcttttctttcagtgtttttaatctgtagaaccatatgacaagagctgatatttcttgttttacagcttttcctttttctcgtatataagccaacagacataaaaccaatcggtttgtgtagttctgttcgaccttgacttaccttcttgtttgatatatgctgtaaactataggaatcaaatcagaacgaagaaacttctgccgaagatgaagatcctgagatctccaagtgggaagctatcatttggctttcaatattgactgcttgggtctctcttctttctggctatcttgttgatgccatagaggtaatcaacgattcgttgccatatgatctgtctactgctagagttatttatattgcagtagttcgaatggcaatcaccacaatatcgtaatgttgaatattttttcagggtgcctcagtctcatggaatataccaatagcttttatcagtaccatcttgcttcctatagttgggaacgcagctgaacatgcaggggctatcatgtttgccatgaaagacaagctggtatgcagagtagttcttgagctgtaacaactttaggttcttgattccgatatagccttgtccctgagacacaacttaacattatctcacttctacaggatctgtctttgggagtggctattgggtcctcgatccagatttccatgtttgcggtatgcaccacaatacattgcaagaacagtgatatatcatatctggacaagaagatttgtgaagtaatttccgtttgatatttgattaggtcccattctgcgtggtgattggatggatgatgggtcaacagatggaccttaacttccagctttttgagacggcgatgctgttcatcactgttatagtagtagcattttttctccaggtggctaaaatccttaagtctaaatcactgtcgataatgaaaagataattccaaaatttttaactgatgatctctgttatgtacgcaggaagggtcatcgaattacttcaaaggattgatgctgattctttgttatttgatagtagctgccagtttctttgtacacgaagatcctcaccaaggttagttcatttgaataccataaactgagtattttctggttatggcttgtgcttgttccatgatacggtcatgaaatggaactgctagagaagtttttctctttcttgcatattcaacaagacattctggtgatattttcatatttctctgttgtgttgttttggttagatggtatataaaccggaagaagagtctggtgtgaagcataaaagggtcttaattaatgatctaaggaacacgaattgttggggaagagatgtgaagatgtaaatctgattctcaagtggtatccacaaactcgaatctgctaaacgtattatttgatttacttgttcgtctgactaaaagtctttgttcgaacaagtgaaggtttatttattcctttttggctttccctccccaaccaaaatcaacattcttagaaggttacaagttttgataatattacaatgattccatattacaaatgatattatgaaagattgaagatttgttcttgtgctacacaaaataatcacattgctatgatttctatttctcaatttttactttgaaggataacagtctataatttgactggaaacgttctcaatttattattgttatgtgttcttcatgcagaaaaaagaaggggagattttgaaaactacctgtgtttctgtgtttgagttttcatttaaaaattacatctttctctatttttaataaaaattgtaattcttaatatgttaaaataaaataaatttgaattcttaattatgtttcaactatttttgagataaagagttatttattttagatattttaaaatttaacaaaataatatcgagttttttttaaaagtctatcacttaacaaaatttattttatttgtttggacgaaattttgtttacaaatatttaagataagaattaaatttgaattttaattgtttttacaattatttctgagataaagaatttatttattatatatattaaaatttaataaaataatatttaaaaatatttttaaaaagtctatcacttaataaagtttattttttactttttggacaaaattttgtttaaaaatatttaagataataattatctttaaaattattagttacatcaaattttaatttataatttatttttctgttttaagtattagttttttttagttattcctaaattttaatgaggttattttagtatttttatatgttaaaagttaattgttcaaaaaagaaaaaaaaatagggtattttttcaaatgaaaactcacaaatagaattttttttccagatttaccttttaaaaaaatgaggtaaaacattttctgcatagcgattttgttgttggttcacatttggataacgagtcggcaaataaacgtgaacttttggtctgacagaagaagactgatgaaaatctcgacccacgcgctgttggtcctcttattttttcatttatgcaaaaaaacccaaatcggagggttatatagtccacggatttttgtttcacgcgctaaacgcgcttatggtgcgcgtgtttttatttatttcgtacgcgagtgtagtttttttttaaatccttttaatttccgtatttaatcgttttagggtgcaaacgatggacttctctttgggcttttcttagttttcgtttaacttgttggcccatatatgatctgtttattatcgatataatttcacttcagagaagaagaataaagggaagtaacgatcccatgcccccatctcataattttttatttttgttgttttctgggttccttcgaaacctttttttttttttttcggcaaagccttcgaaaccttttctctaactttcactgtgatatataaaccgaaaccatggttttataactttcatgttattattattacatctattttggcacaaaattaaaaatcaataaaaggtggagttactttagtattatcgtcttttgacgagactcagttcctcgacattaatcaagcaaagtacgaggaagaggaagatgtatcggccaagatctgcaaatggtggaacaaaatatcaaacattatttcatcaccaagaatatttaaaccataaaaacgagaactagaatattttggtatttatcacgtttctgatttctcaacagagtcttgtctatgcatttgtaaatcaagaaaagtaaatgtaaaatccacactcattacctcaagctgatcttcggtgaatgagtctttctggatgttccatgtatccgcatgggttcgccggaactcagccactgctttagtcacagtcgattttataggtgtaggttcacccgcgaaccgagccagtaaggtcacatgctccggcagccagctgaaattattcacaaaagcttcagattagttaaaggtgtctcaagcttcaagcttgagctctgcttcacacgctttgacgtaaagatgttacctgggcatgtcataaggaacagacaaaactgaagctaccaaaccaagaacggctccatgcacccccgcaatggactgagttgaacttgatttcctgaaaaaaatcgattacaattctcaggatcatgttaaaaacataatcgaagacaagatatgcaaatcacagcttactatatattattttcatttgcgtttccataatggaagacaaaaattgagacaaaaaaatgcttaaaagggaagaaaggaaaacctccgatttcttctcttttggattgagtttgcctctgcataggatctatcacgaaaatctgcagcaaaatcttcatctcctcctttcattaggcctgctagaactgctgctgcatgctctcgtacctgaaaaccagataaaatcatttaagggaaagaaaactgtgcacttggtctttccagatacaactaaacacaaggttgaatcactcaaaacaactccatccaatggacaacaacataatcctatgtggggaggaaataaaaactaagaacttgcctctacttggctgtcaacaaggagcttttccactgttttccagattttttgtttatcttcatgagtgaggatgaaagtatgcctagtaagaaagggttaaaataagaaagctttattaatcaacagcgtatttacttgtcattttgctacatgtcatatatacaatcaacagatattacctatacataaaagttcgcagatatgtcagggttgaagatcttatccgccagttagagtcatcagcagaagaaagaatgactccaataactttctgtagatgagactctgggaaaactcgccacttcagcagctcaaaggctgccttggccaatattgacagatctttatgtgatgtttccttcaatagatggaaataaaccttgaatgattcccagtcatggaaaagtaatttagaagaaagaacgttaaacatatataatgattatacctgtaaggacatcactggatagaggaatccagcaattacgtctagcagatacgaagctcttccagatttgaaagaggagataatgaaatggaagagctatagataggataaaaataaagaagattagtatcaaacgtcccaactatagggaagaaaaacaatatactccaaaaatttgaggcagacagtaccgtctccatccatttaacatcatcaagagaatcgccatttgattgagcatttcccatatctacatctgttgaagtgtccaagctatctgatatgctagcttgttgaatgttttttacagcttcagatgcttttgcactaatcaatttgaaccaattttcctccttaagttggctatcaacatccgttttcccttcttcagttggatattcttgttgatatgacatccgcagccgaatgttagaacataatactgaaagaattacaccgatagcttcccttatctattcattgtcacacaaaacaaaaaggctaatcagacttttgttctgacactcatattttagcttgtctaaaggcagtcaaaagggacagagatgtagagtaaaataaatgagtatgagaagtcttacttgtgccgaggagtgggacatattacagatcaactcatcaagaagcacgatatgcagcttcacttctgttacgggcatctttggtggagatagttctattagagcagccgaaagaaaagcataccgctttgcaacaacagttgtggtcgcagttggtggtaatggtgccactatacagtccaaaatttgttgtctcatgacaggaattttggttccttgcttccctttccctgtgacagcataacgtatgcaagcagcccactccggtatggattctactgattggccaagaataacattctgcaactgaaccattatccagctatcccactcattaaaaagaccattaacatcagagtgcagtacacctgctaatgcttcagcagcaacacactgttttggtctctccttggcgttacaaaactcctctaaggggctttttagtgccagtaacacaggcactccacattcttgtgctaatcgcttgaagatgcgagcaaaacttgggtaaaatatatcactgcctaacaaagatatccaactaggagttctaggccatgaagccgaaaattcaaaatagaaacgagtgattgacttgtccgccatgctctggaaagatgaacttccgtgattccctctagaggaactatctgtgtcagtgatatgaatatgagaaagactttcaaaagtctccttgaagaatccttcttctctaaaaatttggctcaatgctaaatcaagggatgagttggcattttcagtttcttgtgaagacacagaaggctgatccttgccttgcatcttatgaggcgactctttaagtagaatgtttagagctgaaatggcaagtattctggtctgaggaagttgacttttcaagtttttcaagaagtggcctggaaaataccaacataatcttagttaagaaggagcagctcaagtaacatgaataaaaagcgatcctatatattctaccaactaaaatctgtaccagcggtttcatcaaggattttgagagagaagcttgggtcaatcctagaggacataactaacagaaggagcactctgttagccatcaagttgtacctggaataagtaaaaaagcataatgtaaccataacttcaaaattatgattctaagagttggggagctaaaagtttaactaggtctatgaaaataatttccaatgaaaaaatatgttaatggtagggtagatataccgccaatgcaagctggaagaatcaaaactcatggagccaatctgagaaacaagatctccagaagtagagccctcaacatggctttccaatgagcgaagtatgtttctcgacagtcccgcaaagtgaatattatatttgacaaaaagctgcaaacatagaaaactttagccatgacggaagaaaaaaggcctttattctaataacaaagactggacctttacctcaatgattgctttttgggatttcatagattcatgatgagaactacaaaagatttaaaaataaatcttaataccaattttacaagcatatttgtccttacctagagatatcttattcatgaaagtaaaaaggttaccttgaaagaatcccaagaagaaaagaggaaaatgattttggatcctggagtagcagaacaaacataagattttgcaatcgaaataaggcaaagaacaattaatactaaatgattaccgtagttaaatgcttgagaacactgtgtgaagagagaatggcacaagaaccaaggactacatattcttgtacatccggctttcgcaagttctcagtaagggacagaacacactttgaaagcaactgcggccatctctttaacagttttatcaaagattttccagcaagcctgaataacaccagaatttaaagcaaagccgggtcaattaatgtattgaaagaagggtaaagccctgcagagaaatttacagaaaattctcactgaatagggtgtttaatcctttcccaaacttaagaaccataaccattgacatgcattgttatcatagatgaacacgaaagtactcacactcgaacagtttcatagttgtgcagacagagggtcaaaagatcatcaaccaaaaatgttaagggttctggtggagagaagttcccatctgtacgaaacagatgataggacgattgtgatgatctccatgtgttgtgcatgtacgctttatcaatgagtgcccatctaggcctggaagacaatacaatttgcaagaaattaaaattaagatatgtatgttttcaattaagacaaaagagagacctaccttctcttgcccttagaattaaactcagtaataaagtttgctgggggctctacaatcgcagcggattccagtttccaagcctgcctgtgatttgaccattcatcatactccaaactgcctgcaaacgtttaaaggacaagtgttacaaagggaaaaacatgtggcttgtcaactgcaaaaagggagcacgccagaggctttctgcagtaccatagtttcccagggcatccattatgcggattattaatatcaacaagatgctgtcatctgactttttctctaacaagtatctgcaaacatcacataacaaaccatcacaaaataatatttccagttgtacgcatatgcgttttggagagaagcaagcagagcagctactgaacaaacattacttgcaggctgcatgaatagttatagcagttttttctcgtatctcagcgctgccaacacatgaacccgatgctccagctataaagaactgtagatcttcaaccatatcatgtctaggtgatggcctgaaatcaggtaggcaggacaaaacaccttgcaatgtagaatctatacgcaatagagtcactttaaggtgtgttttctcatctcctgcaccacaaataacatcaatgaggcaaacacgtgtaaattttttagagcaaacaagtgtacgtaatatcaccaatgaaaaacagaaatgtaagcctttagctataagatgaaacacgcaaacccaactagtatacgatagacaaatatgcatatccttgaaataagactgaaacacacaaagcaatgactgaaattacctgcatcagagtggatgttcgattggcaaatactcaaaagatcatctagtgctgactgaagatggagatctaagagctcattggcaaactgagtttcctcttgggtgggaacatgccacctggaatgcgccacctgctcatccttagaagaagctttggtgcttatccattcctccaaagcaggagcagcagggtgacgagacaaacatctgtcaaaaacagaatagtactcgagtaaagagacaagcaaaaaaccccaagatatttataataaacattcttgagttatcacgcacttgtattgatcaataggatagtaaagaatcagacttccgaggagagatcgaagaagatgatccccagctccattaacctttccataagaagaccatcacattatcaaagaagccagataaaagtacacatcactaaaaaataacaaagacaaaagaaaaatctgagtccatagatgtcaattcagcaaaaaataataccttccaagatgaggaattaaatgcggaagatatagcttcgatcaaaagacctttgtacggaagaagtgagctgcctccataagtgatggcaactgacaatactttcagctgataatctatagctgcctcaagcgctggagaaagtgtttgtttgtcttgctgaaaaaaggtgatacgaaataaaataattattatttacttttcatattgaaaagaacacataaaatgtcgaacaaaaactactgacaagaaccttattggaaacaagggtctctgcacttccttttcctccatacccattgacagggatttctttcagagaagatataacagcaaggagcattggttcaacaatttgagcaactgcttcttcgggggttgaatgaacacatgcacaacaaagcaacccaacctcggcaattgcaccaggaaggatatttgtctgaacaaactttgatatctttttcaaggcctgtgagagattaaaacatacaagcaatcatacttctcttccaacaaaaagtataaggagtttctaaagtaacagcgacaaaccaacctggttatatagagatccagatagccttccaagtaggatttcaagcatgcaatagtaatatggaccatcctcaaccaaaaacgttcctgatgttgcagatgaacttaggccttcatttctgcagtgttagaaagtcttaatattattaataatagagggaaatcaaatgttatatacaaaaaggaagagaccacaatcatgaagcagattgaaagaaaccctgagtgcaatatattacttacataacactgttgggttccaaatgctgtaacaaagcaatcaaacgacacaaaaattcatccagccactccgagaaggaagccattgtcatgaatgataagtcatcagaactatcgtccaaaacagccatctgcaacatgcaaggacaaaacccaccgataaagaaagaagtcttttgaacagtgaatgtttaaaaactttcaaggtaaaagagcttacattggaaaatatggagccaattagttgcatagtggccaaggttttaggggggtcattggcatccataccaagcaatgcatttgatagagaaatcccaataagatcaagaaacatcctatcgtccacatcaccaccaagatcttgtgatttagcagttgacatggaagactgcaggattgaccggccagcaaatgctacggacatcatagcagttttcaactggtgggtggcagttgtctgactatacataaacaaatatagatgagaactttcatcttaatggaaacagataaagtaaaaggatacaaaagtttgtatgataaagaagggaacacaaattacaaaccgtttccaaagccaaatggaaccgagaagccacaaaaggaaggaccaaagaaggctccacataagacaacatggatgtcgctgcagcaactgtttcggaaagatgttcgttcttgctatattgaccacgatcaatcaacttcaacaccacgccaacaaaagctaccctttccggctttcctaaacaggttgctggcagactatctggatctctgtagcaataggatctaatcaagagaccgccaatttgattgaatgcattaaaataatggtgatattgctcttttcttactgctgctcacgctgtaaacgcttttggaaagctatcaccaggtgaagcaaaaaccgttccaaggaataagtccaacggccaccattagaaggatgataatacctacatttaaacaatacagaaacagtaagtagaacacttgtaactttgcggtttatgtaatcaatacacaaaagggtgtcaaaggtgtaagtaaacaaactgttctaagagattgaccaatttctctaactgctcatgtgccgaacttccaggtttcagaaagtatacctgaatagatgccaggaaatccatcccataaagagttattagtcaggtacagcagaataatgcagtaaaatgaaaatgtaaaagaacttacaatagattgtgcaattgatttagatggagtagtagtcctgttggagaacaagaatcttgtgtttctgggaacatcaacggagaaaggatatgatccactcccatttgcaacaggaacctaaaattgaatctcataagaatccttgtgtggagataaagagaatacaataatctgggagacagtaaagagcaagacagaagcatctgaagactgaatctcatttaatttctgtcatctatacatgcccagctgcatttcaagcacaccaatttttcatcttccaattcagctatttcagacagttaaatgagagcaaaattatatatttttttcaaaataaaactgaagtcaagatcttttgtcatttaggctggaactccgaagacttaatcattagcaacactaggaaaacttcactcacctcaaacatattcaaaaatctactgaaaagcatgggcaagtaagactcccagtcgataaagctgcagttttttatcacgcgagctagtacagatgtccattgactattccaaaattgacaatttggtattgaatcccagagctctagaacgttttttatccactttctacaaggtcagaagaagagaaaacgaagttcaaattcacttgttaaaatgcgagaaaatcagagatatcactgatctccaaaaaaaaaaaagttcttactcggagaagaaatcctgattttcggggttcgtaggaaggaacaatctcacaaagccagagccctcaaacgaggaattatgccaaggattctccaaaagagacctggacgtggatagaagaagatcgaaaagatgagcagagctatagcatttaatagactctaattacagccatcaatctagctacacatacactcttaaagacaaagaaagtccaactcaattatctttttttctttaaggtttctaatgaaaagctttaatataatcccattacccctactagtgaaggcacaactctcgacttgctcgggactgcgacctttattaatcacagacatctatacatgtatcctaatattacgagtctgatatggtctttattcatcaattcacccagagcgatgtgccatcatagggacatcaggacatcgtatacaggagagaatcggtgaaaaatatggtggccataatgaaaaactttccaatctcataaaagactcatgtatgatgaacaaaatgcttccttcccacattttccaattctttgtccatagcagaaataaacaatgtgctttcacatataagaatgtaagctagaatagacaggatcatgatagtgtcttcctaattctcttgacaatactagatacactaaagcatgtatataagtaatagcactaccatgatgagtgtaaagatctcgtgtcaacaacttacatgaattcagaccatatctcagatgcggccccttgtggaaaaaatctcctacaggaacgaatgagggaggtaacagccataaagtgtcgttgtcttaacctccaaccttcaggacccgggctcctattgaagaaaggagttcgaaaacattatacatgaaacaaaaccaagacatccaacggagctagaaaatttctacccctcatgagtacctgaaaaaaaaatccataacttatgcctgccagatatcgaaagaagactcacctgctgaaatgagcatgaatcaaggtatcatacaagggcctccactgaactttcaaagacagcttcttacgaaacttgttgatcagtctgactaaaacattaccccatctaacctatggtaccataaccaaccaatcacccaaaaggtaagcataaaaaatggaaaagcaagggtatatgaggaaacagagcaagtagctggagttcgttctggtattatttttcgaacctgtgcatacaacttattctcagatgaatgaaaaatttgtaagccaatttccacgagttcactaacatcttccacggacaattcacttttcgctctaacaaagctgcaaaaagaaaaacaaaggtcatcagacacggaatagccaaatgcagcataataagaatcatgtatgcccaacttacataagtgagaaaactacaagacggaaattactacacaatcaatcacaggtacatagtggctactggataaccagtggaaccagtctgtaaaatgatttcagactactagactgcatggtttaagtataaaatctgaacctaactacaattttcacgcaaattccaactgtttattgaactctatcctagtcatgtatcgcgaacacccaaaacccccagcagtttatttcgatatactgactcgattgtaaactgagctaatcgtctctcaaattcatcatcctcgtctacaaatcccaataagaagcagccaattcgaacgagaaaaaataaaaaaatcaacgaggtttatgcaatcaaaatcgaggactcacagttcgataacggagatccatttaagagtggcgtaaacagactctggatcatcgggtcggtgcaactctttgacgcatctcacgacacgcgcgaaggactctttctccttcttcgtctcctccgctacaggcggcggtaaccattcattgtacagatgcatcgcttcttctcagtctccgtctttcgtcgtcttcaattttatgcagattgatgtagtctctcctctctcagacgctgaatttataagctgcgtttgctttttcagtttattttctcttgttttctttccaagcaagaaaaatcatatccgaggaaaaggacaatgaacataccatagaaatgaaaacaacttgaggaaaaaaaaattattgtattgactttaccgttgactggctaccggcaacgggagcggcaggtacaccacttaccgaaaccgactaaataggatttcaaattagccccttaagttttacttataatacaatttacccttaaacatttgacttgtgctatattgtttagatggaacgcatactgtccacaagtaattccggccaataaattgtgaatttaagtctgaccgtacggtggagacacatacgcatagatggatatttttgttgtcaacaggtggaaatttaagcagctattatttgttcatcgaattaacttacgtacgtatatgatgacgacattaacattgcagtttattctgtgttaggtcggggtttgtgataggaccaacgttctaaatgagtgattaaaaattactaaatcatagataaactatcactaaactaattgctaactgaggtttagcagaaattcaatgaattaataataattattttggttttaacaatcaacaaagtcgttgtagtatagtggtaagtattcccgcctgtcacgcgggtgacccgggttcgatccccggcaacggcgtttatttttatttcccttttttgtaatgggccgtttctgtacctgaaaagaagtctttataagcccataaagacgaactaataggcccaaatttgtgatcttaatatattatggactctgttttctttttcgtaagctcttcaattcttaactgtttacacgcaaaagtgccatagtggttaacacttaaaccaaataaagacacctgaaatgttggaaaatatatgactctcagcagtcagcatcacgtaatcgtcgttgagccgcgctatctattttgtgcatttttctttaatatgtactcataagggttttttttttgcatgagcataagcagcgataagttgatacatgagaatgtttacgtgtggacggaagtaaattgttttgcacttgaaaagataaattttatgagtcaatgccattaaacattcttattacaagtttattttctcgaagttgcatctgaataacattgtagtattgattacgagattgaatttatctcgaatagtgagtctaatgagtgtacacatatcggattttggatgggaccataaaacacgacgtggtatttgataattataatttattaagtactgtactgtctgtctgtgttccgaagataatgttaaacaaataacaccacaatctcctatagaaagacaaacctgtcctcataacctaaaccaaaattttcattcaccttagggtgaatatgtcatataaggtaataaagccaatcttgtaataacatatagaattatagatatgattctataattaattaacccaaacaataagtagatatctatattaaaaatcaaatcaaatctagtaatcggaaaaaaaacgaaccgtccctttctccactcaagtagttaaattggttctgtgaaggaagataaatccgctgttcctctcctctctctctctcttcccgttttcacttttgttcgttctctggcggccgatcccgtcgctcgctaccttttaagatattttttttatctaatgaacctgaaattgtaattaggcatataattggggattatttgctgaaattctcatttctagatcgaaaaaagcgaataattcgttttcatttgattcttgcctaatcttagggtatgtcctcccccttgatctgtatagtttttttgatgttgtgatttgttagggtttgtgaattaattgtttcagattgggttttgctcctttttccatttttgtctgctttagtttataggttaggtttccggattttgtgttggagtttctaattttgctttgaattggattattagcccattacgtttcctaggcatagacattgatcaattgcacggtgaatgttttaactttttaagctgttttgatttccttaaactgttcactgattactatttatgtgcagtttatgcccccatttttgagtagggatgtagaatttcttgatttaaaagctttaataatatggtttgtgtgtttgtatatgcaggtgtctttatttatctaccaaaagaatgtctaattatcgaggagatgatgctgagtacatggaagacgtagatgatgagatggaagatgttgaagatgatatggatgaggagtttcgtggtgatgatcttggtgcttcagattctgacgttgaagaatttgactattcggttagtatgatgagatggaacatgttttgttggctatgctactttctaatctcattttacagctttttttttttttaaactatgttttaatttcgtgttatatggtttcagaacaataaagtagctgataccacggctgagcaagctcggaaagggaaagatatccaggggattccgtgggacagacttaatatttctagagagaaatacagacaaactagattagaacagtataagaattatgaaaatgtccctaattctggagaatcatcagaaaaggtaagggttatatcctctgatcctctatttgtattagtgttcaggttagctcagtcacctaatacatcattttgtatggattcaggtttgcaaggtcacacagaaaggaggactattttatgacttctggcggaattcacgatctattaagtctactatactacatttccaggttttttttttttaatattgagagctcactaacttggactagttgatagtctttctctttctgattggatttatttattgtgtttggcgtgattgtggacataacatttgtctactgctaaaaacctccatctgatcaagaatttttattggtgtcatagctgagaaatttggtatgggcaacttctaagcacgacgtgtatcttatgtcaaattttctggttacacattattcttctctaacgtctggaaagcatgaagttctcaatgtccgtggtcatgttgcgccatctgaggttggtttttgtcagaatgtagaagttctacattactgtaactctatgtggtgctgaactgcttttgctgcatttagaaacatcctggaagtttacttgaaggatttacgcagactcaagtaagtacacttgcagtaaaagatgactttctggttgctggcgggtttcaaggagaacttatttgcaaggtaactctagatttatctatcacggattaatcacattatcgacttgcaattctgttctatgagattcatctgtttccactttggttcagcatcttgatagaccgggtgtcagcttttgctctcgtatgacttatgatgataatgctataaccaatgctattgagatctacaacaaacccaggtttgtgctagtcctttgcccgaaaggtccacattaagttgttagagtcactgcttgtaacttagttttggcttctgtttacagtggtgcacttcattttactgcgtcaaataatgactgtggagttagagactttgacatggagagataccagcttgttaagcatttccgttttccttggccagtgaatgtaaagtccttatttgtttcttggtttgcttttgatctcttacacttgcggaaaatagcatgagttacagttaggcttttataaccccatttcttcttcagtgtacctaatccaagtgataaaggtacatgtgttttgaatcatttaacaaaaatggtattctctgttttcaatttgttggtacagcacgcatctttgagtcctgatggtaaattactggctattgttggagacaacccggagggccttattgtagaccccaacacaggaaaggtacatatttgcggtcctggacataagtgtgtgagatactcaaatggtttgtcaccacgtgtgtgctttatagttccacatctttggaatttctgcagacgttggaaacactatcaggacacttggacttttcctttgcctctgcgtggcatccggatggagtcactttctctacaggaaaccaagataagacttgtcgtgtatgggacatccgtaacctatctcagtctgttactgtcttgaagggtaacctgggagcaatccggtcaatccgctacacatcagatggaaaatacatggccatggctgaaccggctgactttgtccatgtctatgatgtctcaaacgggtatgaaacagagcaggaaatcgacttctttggggaaatctctggaatatctttcagccctgacacagaggcgctatttattggggtatgggaccgcacttatggtagcctccttgagtttggtcggcgcaggaactattcctaccttgactcgtatctttaagctagaagagaagtatacacaaccctgtccaatgaagaaaagagagctcattcagcaaccagtgaacatgacagaagcaaagcatagatatatggatatctcaaagatgtaaatgatgtgttgtgcaaatgctagttagttagtgtcttttgtttccttctccggctggtgtgttattttccttatgtctggttatgtctggtctcaaaaggttcaagatgtgtacagaaagggctggttcagtggtggcacagactggattaggacttgagggtggctccgcagcgggttctggattcaaagtcgggaggatcattgttgttgtgtttggtggcttgtgatcttttctttttgttccttgtacttgtggttgttgtaggaactcgagtgtttagatcctgttctgagtttagaatttggagatacttaactaaattaaaataaattaataatagtcctttgttcgttataattcgattacaaaccctaataacagatgatttctctaatcactaaacaacaatggtgatgtgtcgtatactacttttggaaattacgtccattattaacataactcaatgttcatatttataacatgaaatatttattgtggtatgaaacagagcaggaaatcgacgtcaataccggccttaggtcctatcagactacttattggtttgtcaagatctcatctcgtgacagcttagcttccgtccatctgagagaaccattgcatgaccgcaaaaccttgctccacgcctccaccgccgaactttgagcttaataaagatactacagacggggacttaataaagatacatcacatatcatcaagtaacataacgaaaagaaacatatgcgccatgtttttgaagaaagatctggatatatggatatgcctgtaattcactacaaaaatggcacttactaaaagaaacaacaagagagacactagttcacagttagtaacctcctcactagctctaaagccataataaagctgacaaatcctccaactgatagaaaacattacatttagaaagaaaaagaaaacaagttctatagagaaaaggaaaaatgttacaacagacacgtaagacaacaaaagggagaaaagctactgagccactgtagaagcagtagctcctgattcatgtgaagacttatattccaacatctcaattctgtatctctccacatccttaactcctttgtcttgataaacctgtaatgatgaacaaatttgtaagcaaacactggtttaatgaaaaaaaaaaaaaagtggatataattcgatgatgattggttacctgtttctcagattcagtgagattgctccacatgtgtcctattttcttagtgatggatcgttcttgtccatggtactcaggtttaagcctcgcgtactgctcagcaaaaaagaagttgtagccactcctgtggcatttgggtttttgagtatcgactacagccaactttgatttcttcctatgccggcgttgtgatgattgtacaatggctgaaggtgtttccatggtttgttgagactgacttggcgtttgaggaatgtggtaaaggacacctttcagctcttgagaacccaatttcatcgtcaccagatagccgctatcaaacttcccatcaatgaatccttgaacctcatacccaacttgtggttcatcaatacctgcaggttccacaatgaagcacaaagacacacggtcaaaattttactagacacacacgcggtaaactcaaaacatataaggaatggaatcaaaggaaagataagtgtatatttatttgttccagtctaaaaggagtgaaacagagccaatatttgtaacacgttaaactcaggaatctttgtcacgtgagaaaactaatgaaccagattggggaattaaaggcctaccagacattacttctttaaagagaatctgtaataataaacttctatccaacggaatactaaatacaacatactacatactgatgaatggacaaagatatggagggaagaataaaaaagccacaagagttagagaaacgtgtcttataccttcctcagggtttggagattcattggcaaggctcttcaatgcttcatctggaaaagcatgagaattttggcttatctcagtatgtaacagagcaacgaaagaaaaggtaagacaacgataagaattttagtgctgaaatagacctgttgattggagtgaagacaccggtttttcaaggtaatacacatgttccagctgaaaaagaaacttgagataatacttcctcaagacaaacgatgcacttgttatcgttgtcggaaaactgaatgcaccaatcacttctttccatttccgatccttcaccacctagagtaaaaaaaacatacacacttcaatactcaatggaacaatattaatctcccaaaagtatgattaacggtaacatgaactcattcataccctttcgataccacctcgagacgtaacctcgatgaaaagccgatgcagatcaagagtgtttcctcccacagtaggaacccttttacagagacggaaaatgtttcattaccagacagtgatcaattaataaacacaagagacaaaacaacacacattaagcctaaactcgttcatagatataattacagtatccagattagtaaatactaaatccagtttgatttcatttccttatgaacaatataaacaggtaaagaatacgataaatctaattcaacagacgatacacatgacataacgcacttcctgcttaaacttcaccaatccggaatccactaaaccctaattgacaattttcaacatttcactgagcaacaaaatctaattctattgctttcaatctcaccaaacaatataacaacacctcaagccttaaatccctaaccaatcttcgggagagatacaaacaaacaaagttgggttttttcttccacaatcttaaaccaaacgaaaaggtctcacaaaaatgtgaaaagggtaagaaagaaactgacttcaaagtcttgctggttaatccgaggaaagctcggagcttttcccagaagagagcagagttacggacaagatcatcatatttggcaggaacagaggaatcgtcgcatctcttgttgtcagaaggataaccattaacgggctccacgtgagtttgagagtagggtggtgaaatatcggtcgacatcttttttttcttatggccgtcttggtaaaggtaagagcaattgagaccaccgtatttcagatttttatttttcttataagattataaattgggacaaattggataaggattaaacgaaattcacacaaatttgaatgattttatcttctgagattttgccctaaatcatacaaacttttatctggggactttaattttatgtcctttatattatttttagtcaagacaccaattttagttccttccgttttcggcttaaattactttgattaggtttaagacgaaacctgagagtccaagcccatagcataagcctctgccccgattaaactactccctacaacaatggcctattgttttaaaaaccagaccggaccggttgattaaccgaatctagattgaatcaaaaaccaagatttaagttaaggttttattacactcttgagtcaaatcacaaaaaccgtcggcaaaccattataaccggtgatcggattcgatatcaaaaatctagttcacaaaataataatgtctctttagttgttgatgggaaatttaaacatcgtaatttaactataacaatggggacaatatccttgagagaccttatttattacaatctggagaaacaaaaaaaatgttcggtaacacaacaaggagaaggaatttttcaagttggtattactaatcgtgaagcaggagagaattgtaggacgagaaaccgaagtatagagacgagcaagatcaattgtgtcaagatatagaaaccgagcttacatgtttttcctaagatgtttccacggtttgatacaggatcttctttcagagaatgtaacttcttagtttcttggagtacttgtagtgaactcagagatcttgtgagcatcaaatgttcgatttcagtttcaatctttctctggaagatgcattcaagttcagattcaatctttgagttttcgagttcttggatcctagcttcctttgcctcgagagcagctctcgcttcctcgagtttgtgttccagaagttttaccttctccttcaagatcagtgcctttgatcctgaggatgttgagttatcttctttacaattttgatgacttggctggtctgaactcaattcatcggtgttcgaatgtagtagtacagattccttacctagctcctggaaactttgaacctctgcacacgtttcaatcgcatagttagtttagaaatatcatgtaacattgataatataaacatgggagctttaggacatgaacattgaaacaattcacatggatatcaaaaatcaaggttcgtgtgcaaacctttccaaagaacttcctgcagaactgcaaagcttctgatagaatctgcaagtgcgtctttatctgcccaatgattgttgtttttcttactctctccatcgtcttctttattcccgttttcgcttctgctatatgtttgaacttcctccttaacttgaccttcattgctaaatcccccaatataattcatcgtcaatctctcatctttctctccatggttaccaacagaaaccgagccagtcgaaaacacaaaatcactacttctcaagtcggaatccaagctggaacaaggcttctccttctcgatatccccccgctcttcgctagccctcttgatggtatcactccagagtttctcttggctacctgaaacaaccttccctcctactacattctttccacctatggtattaccactatgctcttcacttttctcaaacgcttgcccaacagcaaacatacaacctatatcgggactaaacccgttggctacccctggatgatgcaccatattcactgacccaacagagccttcactactctgccttgcttcaactgaagaaaattctacatgtttagaaggaggattcaccaaaccagccaatccacgtttcagtaacttactaccatcatcaacaggagcagcctcatctctcacaggaccatctcttttgatccgtctccatttcttcaaaccaaaacctttcctcgtagaatgtactgatccaccaggagattcaacgctgttcgatcgttgaggtgatccaacacctccttcctcatgatcattatcaggcaatactaataatccatttgcagggactgaattaccgttgtcttccacagaatcagggactgactcattcatgcctaaatccatttcacaacaaaaaaaaaggtatcaaattctctgtcatcagagacacaaatctgaaaatttccaacagctaaagaactagattcagctcactacttcaaaagaaagaactgatgtatagtgttattctaacctcatctaccgaaacaacaatgaacaaaactcaattcacaattcaacaatctcatctaatcaagtccagaaattttttgaaaaaacaaaattaatgaaaacagagagaagcgactcgaatcaatatttaaagcgtacctaaaacaatccaacgagagcttgcctgagttacagatgagcaagagaaacaaaatcctaaagaatttagagtgcgacggagaaatccgccgacattattaccgggagaagctgtatcaacgaaaatgattaaagtggacgaaatgattctacagacacaggaaaaaaaaaacattaaagataaagaaagagaaaaaataatgaagatggtgcgaatcatacgtgggacccacatgacataaacccagtgcgccaagctggccgtccgatctggagtacacaacatgtcggaattaaagtgtgtatatgagcccaacatgttggcctgataaggcccattaaaactagacttaaatattttcaaaataatgaaaagtgtgatttttctattttaaaatttaaaagatttatttggtatcatattcaaaaatcaaaataatgttttatgcagatttgaacatttacaaatcattaaaaaaatcaactccttaaaatgatttttttatctattttttgtataaaacagatttaaaaaataaataaataaatgctaattcttgaagtatggaattgttttataaatgtaaaatctccattctgttgaggaaatgggtaaatatttaatatatttatataattaaaagttagtgaaaactatttacaatctgaaatctaattccaaaacatttctgaaaattttagtgaaattttaaaatatggacagataaactgattcattaaatataaattaagtattttagtaacatgtaacaaaatgtgattaccatttattttaaaatttattatagttattttactttagaatctacaatatccacaaaatttattttattttaatattgttaattgtcaaaatagtatttttactgatatctatgaaaatatttgattttgtactaataaaattgaaaatgataaactttgtcataagtaactattgtatatcatctatagtttaagacagtaattatgattagatatattgtgtttgagacaatatttattttttaacataattcatatcattattaaacattataacaatacattatatgttttgagtgaatcaataatctattatatatacatacaaatactcacatttttaatatattgtaagttgtaacaatcattttctatcaacaaaaaaaaagacaacttcttcttcttctttttttctaccaatttcaattttcacatccccatttcctagtcctaaaaaaaacctcgaataatgttgatgcctcccaccatgtcttgtttgattcccaaaatagttttcatatcccttatcacttgttttgtgtgtcgtggaccttatgcccatgcaagaagtttgaatccaccagtcatgggagaaactaacccgctcataaaaacgatgaaggttcctgtgaatataatctacggaagttataaaagtggacctgatgattcaggtaaaggtcacgatgcacctttaccaccaaagataccgatgaatataaattacggaggttataaaagtggacctgatgattcaggtaaaggtcacgatacacctttaccaccaaagatactgatgaatataaactacggaggttataaaagtggacctgatgattcaggtaaaggtcacgatgcacctttaccatcaaaggtaccgatgaatataatctacggaggttataaaagtggacctgatgattcaggtaaaggtcacgatgcacctttaccaccaaaggtaccgatgaatataatctacggagattataaaagtgcaccatcaccaccaaaggtatcgatgaatataatctatggaagttataaaagtcgtcatgatgattcaggaagaggtcacaatgcaccatcaccaccaaaaatacccgttaatataatctacggaggttataaaagtggacctgatgattcaggaaaaggtcacggtgcaccatcacctcctctttagtaaaagatatgttgagtccatattccttatatggcatatgtaatgtgtgtgaaagatatatagacaataataaatataaatattaaaaaaagtttgtgatgatgaagttgcactgcactctaatttgatgaggtaagatgtgatacatattaaagtaaaaatgttaagaatcttatagactatagtttcaagataaaataacatcaacaaagaaaaataagataacttaattatctcaaaattcaagatataagtgatcgaataatggaaacgggaacagacaattactcttatattcagtcttttccttcgttcgtaaacagtaataaaactgattccaacttgaaaagaaaaaagtcatagttcaaaatccctaaatcgaaacagacagtcatataacactaaaaatgtattattttagaacgtttaaaacataagtcgattatcgttaaaaaatatcccttacaattttttttgaataaatgcgaatatatatgtgaggagaagtgctttgtgaatcaatgagacgtattgagataaaggccgaagaagagatccgtgcgggagagtgcctatctacgtcaacatgggtcgacgattgacttctcaaccaagaatgtcacttccctctgttgattgttatcaataatagtaatagtgactaagcagtcatcggtagtatttaacttgtctatatcttttggatgatgcgtgtgtttatttattagatgatctaaagtttctctaaattcaacgttgcgaagagcttaatttcaacctaaatctacctaaaatatcgactttgctcagaatttgattcctcgacgaatacaacgtacttatttactatttgaaatcaggtcaagaaaaaagtccatataaatagcagtttacaaacctaaagtaaagataggtgtaattttttacccataaaactgattcgatccggtgtagctggttattataattcatcacatgttttagccaaatataatcaatattattatagttttagtcataagatgagtccgtgtgatcgaatagtttcttatttactttatttttgttgtcttgccaattggtagcgtgaaaagatctcaggttcatgcgaggcgttgattgttgaatatcaactggatgaccccctgtacacgtgagaattttgtatgggggtctatctgtgagtaagcaatataaattatcaagtatcatatgtcaattttggcttttgggtatgttaagttggacaacgaagatagagaggcagtccttggttatatatgaagcaactatatgtactactagtattaatcaaatcaactatcttaaacttatagctttggattttttatttatttatatattttctctagatagtcacgagtttgatgggttttttttaataaaatttttgtttccataatcacggtttgtattggttaagttattactgaatttgtaccgacatatacagatagatcttcgtgagtcgtctgtatatttctagttatgctgaaaaataaaacgagagtactagaaatgtagtattaatttagtcgtatatgaccaagatgtgacgaccaaaaaagaaagaagaaaaaaaaaagaaagagaaattgaataagtttacgtgaaaaaggggatagttgtaccaaaaataaggcagatttgaatgcgatgattccgctatcttaggaaatcaaaaatatcatcttcattattaattcatgaaagtgacgggtaagattttcaaatcgtatcgacttttcgtcttttcttcgagacttcgaccctaaaaatacttataccataagtattttggaccaaagtgttttttttttttcttttttccttttggtctaagataatacattaatatgaaaataaaactaaaatgaaatcataataaatggacacgagagaatctttggaagtcacaagatgtgcattcgtgcggccgaagaaactgacaaaaatgcaaccctactacggccccggccaccgagcccactctcgtatatattttcataaaccttctcactttagtataacttaattattatcccagttgttgaataatctatcttcttggcccctctactcgctatatagtatttatacagtttttgggaccctattacatctaccagttttacaaaagacatcctacacaccaacaaatttttaaaatatatagaatatgcaatacgtgaaaggaggacttcgagatcattttggtctcctccacgtatttttttcgtcatatatatgttaatgtcgcgggtttttcgacctgcagatgttttgtttattcttttcagaaatctatatattatatatacatatataaagaaatgattaaccaatgaagcctcggttaatattaatttacagttttacaccatattatatatagcttatagcttacggagaaaccttgtagaaaattctatctatccagttatgtttctcttaattactcattgataccttaactggagtacctaacctatatttgtgtttaggtaaaagtaagataggaacgagaaagataagttaaaaaaaaaagaaaaaaaaaaaaaacgagaaagataactttaaatcgattaatttatctaaattaaagttcttttcgtttagttcggcgcaaatactcgaccagtttaaattcaagttcattatatgcacgagcaaccaagcacgatgcattattgcataaacaaatgaaatcaacggcatccgattttttaaaataattaagggcatgtaattaattaatattttaaattatgaaaggatttatacgtacgtatatatagttcatagttttatagaactccgaatttgttgagggtatatatttgaaaaagcataatttttaagtttaaacaggcccagttgattgataatcctaacttaatctctcgtacctaccaaaattaagctgttgtcacgtctgttgcattcataattggtcaacaatatttgaggaaataattatggtaatagttgaaaacacttgtatttcctttttgtcaggataacacttacgtttcatgcaattatttgatataaaatgtgtagagagatatattaatcaaaatttggtgtgtgtttttttttctaaacacattcaaaacttggttaattaagttggtcacttggtagaaatttaaacaaaaaaactatggatccgatttatttatttgtccaaccaatacaatatttgacagttgttttacgtgaggtttaaactaattgtaagggtaaagcgataaatacaaacaatacgtggggattagttgctgaaaaaaataagtcacgagagggcatagataaaaaaccaataaaccatatttgtttttgtttaacgaagcactagagcttcatgcgtgtagggttataaagttacatacacgcgtggaaaaatacgagaacggtggtggggaattaggtctctatcgtagttaccgttaattaatacaatatattagaattttgtagttttagatttctctttttatgatgatattttgtcgtgcagatatttatggaagcgtgagacgttcgtgcggagtgagtaatatagataatacagatattgatgtaacaaaaaaaaaagaggatatgatttgctttgggacgttaaacacgaaaatagtcgactttaaagggttgagtaaaataattagagaaaagcttatttcagtgaaataatgcggtaactggtaggatttgaagctcggatatgtgttgatgctttggtatttttcgtcattgcattgaatatatatggtgcattgaatatttgaatatttagagattaagttacaacagatc

SEQ ID NO: 413 - DNA, 83287 bp, Arabidopsis thaliana
ctaaaaaaaaaaaaaagaaaaaaaaaaaaaaaaaaaaaaagttacaacagatccgaatatttaaattatacggaaaccgaactatacatacatcgaacaaatactaatttactgtaaattatttacatgttgcacaaattttactgaattcgtagatttctttgacatcaacatgagaacacttagaaaaagcaacaaatctagtcctccacaaaacagaacttttgttagatttataaaagattctcccctaacctgtaaaactcaaattttaaaacagttgacgtagagtttgatctattgcaatataaattatttgcacgaatactattaggtgggaatgtgagattaataattaggaaaaaattagtctttaatataatgattatgcatcctcttttcacgtaaagattagtctcatagttttgtcttctttagctttttctcctctttttttcttctctttgccaaatttcttctctttcgcttttacattttctccagcaaaataagacaagatctcaatcacttcttcttcttcaattctatctaaagctgtcacgagaaagccagagaatttctcagcttctcattttgtcaagcaaatacaaaaagaacacacttcttttttatttccgggaaaattcgtttttatgtagtggtcgtactaaacacgcttcctttatgtggaatcttaaagcagtccctttttttagttgaattcaacagtttttttctttttttttttggttccggatccgaccatctctgcaacatcgtactttgagagacaacactgtcgaagaccatctacgttgtcttctttacttggagaactctctctgtctcttctctgtactttctcccttctctttttccgtatctgtcagcctttgattccgcttttttgttccttcaccacatatacatgtatgtatcttcttcttctaccttgaacaagacttgattttgccactagttatttcagaaaaattaatcttaatttcactttgaatttttcagcgttccaagctcatatccggtgaagtttttggaggatttggttgttatggagcatagggttttctcaaaaagaagattcttgagcttgaaattgaagtctttgaattcttaagggaattttatcgaacactttgtgggctaataacatgaaacaacaatggcagttcttgatcctctgtttgctcgtcttgtttctaacggtggactctcgtggcagacggctactcagcgacgacgttaacgacacagctctgctaacggcgtttaagcaaacctctatcaagtcggatcctaccaactttttaggtaactggagatacgggtcgggtcgtgacccatgtacttggcgaggcgtctcttgttctagcgatggtagagtcattggacttgatctacgaaacggtggtcttaccggaaccctaaatctcaataatctcacggcgttgtctaatctccggagtctttatttgcaaggaaacaacttctcctccggagattcttcttcttcttcaggatgttctctcgaggttctggatttatcttcaaactcgcttacggactcttcaatagtggattacgttttctccacctgtttaaatctggtttctgtcaatttctcgcacaacaagctcgccgggaaattgaagtcttctccttcggcgagtaacaagagaatcacaaccgttgatctctcgaacaatcgcttctccgatgagattccggagactttcatcgccgattttccgaattctctgaaacacctcgacttatccggcaacaatgtcaccggcgacttctctcgtctcagctttggtctctgtgagaacctcaccgtattcagcttatcacagaacagcatctccggcgacagatttccggttagtctctcaaattgtaagctcctcgaaacgttaaacctctctcggaacagtctcatcggaaaaatccccggagatgactattggggaaattttcagaacctgaggcagctctctcttgcacacaacctttactccggtgagattccaccggagctttctctgctctgtcgaactctagaggttctcgatctctccggcaacagtctcaccggtcagcttccgcaatcattcacctcttgtggctcattacaaagcctaaatcttggaaacaacaagctctccggtgatttcttaagcaccgtcgtgagtaaactctctagaatcactaatctttacttaccattcaacaacatctcaggctctgttccgatttcgctcaccaactgtagtaatctgcgagttcttgatctgagctcaaacgagttcactggagaagtaccatctggtttctgctctcttcaaagctcttcggttttggaaaagttgcttattgccaacaattacctctcaggaactgtccctgtagagcttggtaaatgtaagagcttgaagactatagatcttagcttcaatgctctcactggtctgattcctaaggagatatggacattgcctaagctctccgacttagttatgtgggcgaacaatctcactggtggaatcccggagagcatttgtgttgatggaggaaacttggaaacgttaatcttaaacaacaatctcttaaccggttctcttccagaatcaatctccaaatgcaccaacatgctttggatctccctttctagtaacctgcttaccggtgaaatccctgtaggaatcggaaagcttgagaagttagcgattctgcaactcgggaacaattctttaactgggaacattccaagtgagcttggaaactgcaagaaccttatctggcttgatcttaacagcaataatctaactgggaatctcccaggtgaacttgcaagtcaggccggactggtaatgcccggaagcgtctctggtaaacagtttgcgtttgtgaggaatgaaggtgggacggattgcagaggtgcagggggtttggttgagtttgaaggaattcgtgctgagcggttagagcattttccaatggttcattcatgtcccaagactcggatatactcaggcatgaccatgtacatgttctccagtaacgggagcatgatctacttggacctttcctacaatgcggtttcaggttctattcctttgggttatggtgcaatgggatatcttcaggtcttgaatttgggacataacttgttaactggaaccataccggatagcttcggaggattgaaagcaattggagttcttgatctatctcacaatgatctccaaggattcttacctggatcactaggaggactctcttttctaagcgacttagacgtctctaacaacaatctaaccggaccaatcccattcggaggccaacttacgacgttcccactcacaagatacgccaacaactctggcctctgcggggttcctctaccaccttgtagctctggttcccggcccacgagatctcatgctcaccctaaaaaacagagcattgcgactgggatgagtgcggggattgtgttttctttcatgtgtattgtgatgcttattatggcgctttatagagcaaggaaggttcagaagaaggaaaaacagagagagaagtacattgagagccttccgacatctggtagcagcagctggaagctctctagtgttcatgaaccgttgagcatcaacgttgcaacatttgagaagccgctgcgaaaacttacttttgcacaccttttagaagccacaaacgggtttagtgctgatagtatgatcggatcaggtggatttggagatgtctacaaggctaaactggctgatggatctgttgtagcgatcaagaagttgattcaagtcacgggacaaggtgatagagagttcatggcagagatggaaacgattggtaaaatcaaacatcgaaatttggtacctcttcttggatattgcaagattggtgaagagagacttcttgtctatgagtacatgaaatacggaagcttagagacagttctgcacgaaaagaccaagaagggtggaatctttcttgattggtcagcgagaaagaagattgcaataggagctgcgcgtgggctagcttttctgcaccatagctgcattcctcatattatccacagggatatgaaatcaagcaacgttcttctagaccaagattttgttgcccgtgtctcagattttggtatggcaaggctggtgagcgctctggacacacacttgagcgtgagcacgctcgcaggtactcccgggtatgtcccaccagagtattaccagagtttccgatgtacagccaaaggagatgtgtatagctacggagttatacttctggagctcctctcaggcaagaaaccgatcgatccagaggagtttggtgaagacaacaaccttgtgggatgggctaaacagctctacagagagaagagaggagctgagatacttgacccagagttagtaacagacaaatctggcgatgttgagctacttcattacttgaagattgcgtctcaatgtttggacgatcggccattcaaaagaccaactatgattcaagtcatgacgatgttcaaagagctcgttcaggttgatacagagaacgacagtcttgatgagtttttgctaaaggaaacgccgttggtcgaagaatcacgagataaggagccttaaggaattcaggaagatttgaaatttgttattttcgtcctatttttggtgttactgattcagtgtatataacagtaaaaagtaatacagacactgaagggtttttacttaatttcttgatttctgaaagctattaagaaatacttcgttgtaaagtttttgtacctaacaaattaatcttatcgtaatgacaattttgtgagccgtgttatatacttatgtgtgatgatgattaacaatatgataaactttgattgatggtatttctgcttttgatctcaagattggcaattagggaaagaacacttcatgtcagacaaagaagatgatctctgcttatttcgttgaagattatggatacattacataagcgttacaaaaaaatgaagaacaaaaaaagagaaacttaatgcgtctttttaaaacaagaaaaaaattacttaagggatagacatacatacatttcaatttcatgtatatacgaataaaccatatacttttaaaaatcaattttataaaatttaaaacagttaaaaagaaaagacccaaaaaaccagaaaaataaatccgttaggtaaacgtcttgcaaatgcctctcaatcgattgaatcaacagaagaatccaaactattttgttgcattaaaagtaaattttttgtaaaatttaacttaggctccagcgtaagggttaggcttaggtgtacccttcactagaccacattggaggcttgtctcaggcatgttgtattcatctctcagtgatttctctggtgacaagacactcgcgtaaagctgctgtcctaagtagcgtctctcggagttttcagatcgaacgttccacattccacagttgtcgaatgtgagcaagattgctgcccaacattttgggtagacttggactgtgtgtctgctcactgcgtccagcaggttgtagttttttctcttctctggggtccaagtccctggctcgacactttgaaacagagtcaaattgaatattaggttaaaaatgaagaatttcttgtaatgcaagaaagcaattagatgacttgttgtgcaataaagttatgtaagaattcatgagtgttttaaatgtttgtttcacttacgcgacggcaaagaaggagtaaccgtccaagtgccacgactgaacactcttctcgtggttctcaaacaccacctcgatgaaggtgcggtgagtgatgttaagaacatttggcacgatcttgatgctcttgatttgttctggggttgggttatcagtgatggagtcgtacttgaaaaccttgtcggcaacaccaaagtactccgcaagcttcaatggggtttcggggtcagtgtgcgagactccgttcaaagcgtacctgagctttccatcgaccttgccttgagtgttcacaagcttgatggtgcgtgtgatgttgatctttccgtagtggtaagatccctgagggttaggcctggctgcactggcggtcaagttccacctgaaagatcggaactggttcaaggaccaagcccagccgactggaccagggggtagctgcgaagaagcgggacctttgcctccctcatagcggagaagaccagtggtggttataaccgacttcaagaacctagaggatgcaaccatgtagtaatctttagcttcctgattagcggtaaggatggttccgtaacactgaccaacgtgaacgtcgagagagtcataatcgttctggagaacgtgcgatccttccatctcaacaagcttcaacttgtgattctgaatcctaaagttaagagatgtcttgagacccacgttacagatcctaaccctgtaggtctttccaggtttcaaggtaaagagaggtgcatcggatccatcgcctttcccggactttccgttgatgagaataccatctggacggccaagagtacgaccgctgtcaaggaatttcttcaactgggtgtggctcttggtgtaccagtcaccgatcaagacggtgtagtcatcttctgggtcagcataagggaccgggatgaggagacggctgttcacacggagaccaccgaatccaccagcggaacggtgcatcgcggtgctggggtagtagaaatagcttccgatctgatccttaggctggaaatggtaagtgtagttggtgccgggcatgatcggacacatagttcctggagtcccatcttgccaacagttcttcctgtgttggatcccattcctaaaacgcaaaaacaaaacatatattataagcatgcatattgaaaatgatatattttggtgaaccgtgaaacaaatgttataattaccatgtgaggaggaaaggttcgtcgaggttgttgaagacattaatgatgacgttgttgttggaggttgagttgacgttgggaccagggaattgtccgttgatgagaatgacttgttgtggaacaccgagaggagacacggttccgtaggtcacgttccatacgtgatggaagtaaggatcttcggctcggactaccaccgttgcggcagcggccaggtagaggcacgcggccaagagtttaacccctcgcataacaataaacaatttttggttgagataacagttatagattttttatgtgttttggtactaattgtttattgttatatataattatgctttggggtttgaatttcgagttgtggaaatgtttcgaggcatttttatagggttatttttgacgaatgtttttccaggtttttctcgtcttctttggggtctcctaccatttcgctattcctttcgccatatttgggaatattgaagtttaacctctccctatttttggtgtttctctttaattcctcttagtttattttcttttttccctatgtcttttttggttttggttttcatgtcttcgagaattttgctatttgggattaaaaaataatctaaaggatataattttatatatatatgtgacaaaggtataggtcgaccaataaacattttacattattatagaaaatattttgaaaatcgcttattttaatcataacactttgttttgtacattatgcttttggaatttggatgattatgtctttttatataatatataccagaaaataattcgatatgtcgtattttttctatctatatatcttttgacttctaattgtaaccataggaaaaattagatgacattgaaaatcaggtaatgatgcatagcatttgttcacaacaatattgttaaagttaggaataggagtagtatcttttcccttttcttcaatcatacgagctagtcaaccgttgacgataaattcacggagagcaccggaacctttaagtatgagaaactacttcaataatcttagaaattacttacctaaaaaatcttgcactgtgtagaatttggtaagagacatatggtctccaaatacgttctcagctagcgttatgtcattgatgccaaaacgttctttcatctttctaattagaaaacaaagatgaacaaaagtttgtgatacactccctttggtcagacgaaaagagtttgtgacacactccttttgaccaagagtttgtgatacaaagatgaacaagagttcatgatgccgtaaatacaaatattttgaatgtgtaactttttgttaaagttataagtgataaactgtttttttttgtagtgtatatataagaaactctaagcatttggagaagaaaataaacatgtcgcataagacccacgatgtcaattaccatttattaggcctttatcaacatcccacctcacaatatatctatactaatatataaaattattttattttatttttatatatagaacaccatatacacacatgtacatctcaattaccatttattgtgcagactattatcttttttttttatttttatttttttatttttttgggcagactattatcttatttcaataatctgcataactttttttttaaaggatcaaaagaagattgaataacatgcaagttcatttttgaaattttattatcaaaaacatggaagttcttaaaattaaaattacaaagcatattaagttggtaattaattctgtagttacttactaagttgtaccataatattattttttgtccgtgtaataatcaaccgtagctgaaatatgttaagacaaacaaaattacttgatgatgacacttgtgggtagttaatttggcttctttagagacatgtccaataatagaataagatccgagttgtgtgctcgttagagaaatcgggagtcctaaggaccagcgagcgagagagattcaaaaatagaaatttcacgtaaagagaattagaggtgcagcgtgaaaagaggcaacaattccgtgcataccaaggtccttcacctgcataaataggtattcacaacatcaccaaaagattcgtcaagagcaagagaacatagtttcttcttgcttttgagaaaaaataattatatatttttatataggaaagggttaatttattaataaaaaaaaataaaaagaagcagaaaagagataatgcagggtggtaggcttttgacggtgttggtgtgcctcgcctccacggtggcgttggtgagcgccggtgacccttacttctactacacgtggaacgtaacctacggaaccgccgcgcctctcggaattcctcaacaggtgattctcatcaacggacagttccctggtcctaacctaaactcaacctccaacaacaatgtcgtcatcaatgtcttcaacaacctcgacgagcctttcctcttgacctggtttgtaactaatctgtaaacttattcctttcgtcagaacttgtcattcaattgttttcgtgatttttgttttacattaaaattgttgtttttgaaaacaaatctttttttttgtatcaaccatttgcatttggagttagacttttgcaatcacattttttaaaagatttttaaagatttgctttgcattagattcggttatatggccacacctatatataactagtcttcattgtatctttgaatacttagtcctgacaatggttttgggtgacatggcaggagtggactccagcacaggaagaactcatggcaagatggtgtgactgggacctcatgcccaatcccagcaggcaccaacttcacttaccatttccagcctaaggaccagatcggtagctacttctactacccatccaccgctctccaccgcttcgccggtggtttcggtggcctccgtgtcaacagccgtctcctcatcccagtcccatacgctgaccccgaagacgaccgcaccatcctcatcaacgactggtacgccaagagccacaccgccctcaagaacttccttgacagcggacgtactctaggatcccccgacggtgttctcatcaatgggaaatctggtaaactaggcggaaacaacgctcctctcttcaccatgaagcccggaaagacttacaagtacaggatctgcaatgttggattcaaatccactcttaacttcaggatccaaggacacaagatgaagcttgttgagatggaaggctcccacgttctccagaacgactacgactctcttgatgtccacgttggacagtgcttcgccgttctagtgaccgctgaccaagtggccaagaactactacatggttgcatccactaggttcctcaagaaggaagtgagcactgttggtgtgatgagctacgaaggaagcaacgttcaggcttcaagcgatatccccaaggctcccgtcggctgggcttggtctctcaatcagttcagatccttcagatggaacttaaccgccagtgctgctagacctaacccccagggatcttaccattacggaaagatcaacatcacccgtaccatcaagctcgccaacaccaagaatttggtgaatggaaaggtcaggtttggattcaacggtgtatcacacgttgacaccgagactcccttgaagctcgctgagtacttcggcatgtccgagaaggtcttcaaatacaacgtcatcaaggacgaaccagcagccaagatcacaacactaaccgtcgagcccaatgtcctcaacatcactttccgtacctttgtcgaagtcgtcttcgagaaccacgagaaaagcatgcaatccttccatttggacggttactccttcttcgctgtcgcgtaagccctttctcttttacccattaaaccaattggcaatgaatgaattgacctgcgtctcttatacaagatatgagatccctaacactttctctaaacgttttcacacagttccgagccaggaagatggacaccagagaagagaaacaactacaacttgctcgatgccgttagcagacacaccgtgcaggtataccccaaatcctggtcagccattctcttgacattcgacaatgccggtatgtggaacatcagatcagagaactgggagagaagatacttgggccagcaattgtacgtcagtgttctgtcccctgaaaaatcactaagagacgagtacaacatcccactcaacaccaacctttgcggcatcgtcaagggcttgccattacctacaccctacactatttaaactcacttcgacaaagttttttcaatttatatgtaaaattctactttccaagtgagtgtattacgtgattaattaaccctttcctaatttcatttaaaatactacatatactatcatttaactacagtccaacttgttgtttctctaataatagtaaaacgaaatcaacttaagtaacctaaacttcttcctacacaagagactgtcattgttcaatccagagaggataggagtcatctgaaattaatctcaagaaattaagtagaaggataatttgttatgagtctcctcgatcatatcgatgagtaaatctgaaaatcagaagaagaagaagaagaaatatttcgaagaagcaacactagagatagagaataagagattcaaattatgtatttcatgcacaaccgattaatttcacagcttgatttttgtttcgaagcagagaggaagcgaagtttgatatacggactaggaataacttaaccctaaatcggaactcagagaaaacagaaacgaaacctagatcgaaataaaaccctaaatcacctgaaaggttaaattccaccgcaagcaagcgtgacatgtacactagctctattcatcgtaatctgagagcaaaaccggttgacgcttgaggtcaaagtcaaacagagcaaccgatgagaatgtgaaaagaaagttcacgcgcgcgtgttgtgacgatgcgattccaacaagttacgtctttttttcttaaatgttttaatttagtagagatattaataatataatttttgaacatttatatggatgatatagccaaattttaccattttatttagtacttaacagcacatgaaattttttgtaaagaagctagtagttctatttagtcgagattaaaaaaacaaactaacttacctgaatttcttttcatactagtacactatttcatattcacagtctttatttaaatcatacatggaaaaatattaatactaccacatgattttggcaaaaaaaaaaaactttccaaaaagctatacatccaagtaaccctagtccctttgtctaccaaattggtttggtgtgagtaaaacttatgaattaccgagaagcacctctagcctaattgcgttccacctgcgaccgtctcttttcacccgagagttcgactctgccgcatatatggcttggcttggccgcccaaattttatttatttattacctcgtctcatggttggcagcagttttagaaatagtttctaattctggaggaaataaaaaaacaaaaacaaatgttcaacaaacatgtatatctttttgagaagcacgtgtgacgtgttgagcagataatgaatagagatatgcaaagtgtgtgtgatacaaccctttaatcagtattcaccagtgaaattcatcaagatcttgctgttccagctgaaattagtctggacttttatgatgtaagacgatccttctactgtatactaaagaaaactataacgaaacagggatatagaccaaaacaaatctgagcattttaatttgttctacaaagcttttattcaatatttagaggaattaattttggttgtacatatttttcaaggaatttctttttttataaaccgtttaaaattagttacctctttctgcattgttccttagcttgagttcttgcgatctttaccatataacacctatgcgcgacacaaagtaacgtgtagccaaggacaacttgccgatcatgttactttttctttttggttttatatatcttgtattttatacggaataatatatcctaatttcttcctgaatccttcaaaaaaaaaaaaaaaaaaaagtttgaaactaaattgtcttaatagagtataaagaaagatcatttaaatcggcaagtcatccttggctgcacactactttcgtcacattcgcgtttcactagctatacccacttgtatatatgaaaaccacaaacaaaagaaaaatgtatgtgttttgtatgtttcttctcgaaagtaacaatagagaatggaagaggagatctctacatatttgttttggtgcttatgaatactagaggacttacccgctctgggtttatatagaagatgggtcagagataagagaaataagagggaataaaataattgaattgaaaagagagaaagatttgagattttatgcccccaagaaggtagataagcaaaaaaatataataaaaaaagataaggaaagaaaaacctaaattaatttgaaagaaatataaaacagttgtcatatattaaagaattatatatattcgaaaaataaaaagaattaatgaaagagataaggttcctccatgcttctccatcctcataatattagttttcttaagctgcaaaaacctttacagctttaacagatgccattaagagatatggggccatatacatatctactcattcatatacatatatacacatacatcttcacatagacacataaattgctcctgtctataacgaaaattgtcatcttattgttttcttgaattgtgtttaaccttcttttcctttgaccaaaaatgtgaaatttgataaaacgtttaaacaaaatctcctatatttaaatgctctctaaattaataaatcatcaaagaaccttaatattaacatatttgaaaatttcaagtttctaattaacaagctcaaaaaggttttggttaacgacctaggtaaatagattctgtttgagcaaagacaagcatatgcaataaaaatttaagacgagggacgtggtttgagaaacaagacgcacttgcacaaaatcgacctggttttggtaagttgataggaactataagtttctaattttaggacttactaagaaataactcacgagagaaataaatgtgtgtagaaagagagaaaaagggactctcgtaaacatttttaaaagaagaaagaatctcaacatttacgtgtaaccctagctagttatcccgacaggtactcgaaagggcactattaaataaacatctatattttatactccgtataagttaatttataaacaagtaatcggtaaatagagaccgtcagttatatacatatatatatatatatatatatatattgtttctttgacaaaaatatgtgtgtatatatatacaaaaattcacagaaatcagcacttggaatctcaaagttatcgaaaagatcaaaaaaggacctgctcgagtaggtcacttttgcgtggccgtacatttttatagtttttcattattattaaaatatcaatttaagatgtcatatgttgttaaacagaagataattttttttttttttttataaaatttgaagtgaacgccacaagagattttacgtatgaaagctaaagcaaataaaagatgaagcaaatttgttagttcaacattgttctttatatttcaaaatttggttgttgttatagttcaggtaataaatatttgcgggggtgtctgtctaaacaagaaaaatggatagttgaggaaaagaagaagaaaatgggtacaatgtgatgtcagttggtggagtggcagatcgatgggattttcactgctcttttggctcaaacccctatgtctcatgtgcttccctctatttgttttttacatatatttttgtgcgaaactgaaaatatttttttcaataaaaaacctatacgtaatatttctaatctttaaatttcaattatgtggcagtatagaaaacaaagtcgtataaattctatcgataatatgcattatatgcaaattctaattcggacgatgacacaaaaatatcgctagtataaaactaagctacatgtcatggtgacatgattttttataaatgtttgtgtaagaaaaaaaaagataaacattgttcataaatgatgcttttgaaacttcttcgtaattagacaaatacagtcatgtatttgttatagtataaactttgaaaaaaacagggatacgaatagtgttatgttagaataaatgtaggagtatgtatagtggggaaaagatgaatagaaccatcgttttcggtcattttgattctttatacgcttctttatggagagagagaggtcaatcaaagaatctgaaagattgatcttatgactttgtcaataggtccatgcagggaccataaggaccccaacatatgaagatgttttgctaagtattgaatcatggaacaaatcaacgaaatagtcaaaacaaaaggtctatctagataaattataaactgctaattgctcaatcgatattacttaataatgactaaacatgccgaggcaaacattaaatttggattagaattgcatgttgcatgacaaaacttatatatgtattcttactattttcttaattgttcacaaaactatcatctatatctatctttctatctatctatacaagtgatggtacacacacatgtcctaccactctgactctaccgacattattgtcctgagtttttttcttccagaaaatctatgtccgaatccccaaattgatatgaatacgatactatgagcacgataactccggaatataatctaagaaaaagaaacaaaaaaaattctgaaaaagaatgtaatccgttctccagtgtatgtatctctggttttttactcgttctccattattaatttatgacgtttaagaaagactcacaaacaagatgaataaatgatacaaggggattttatggcatatgcagattttgttttgaagtaataatgtaacaaatcgacattgaagtaccttccacaatgcgcactatgcacaagaaaagactcgtcaaaagcaaagcaaaaggtggggatggctcttaaggtcaacagcttaagaatcttgaggagtctcgaatctagtcggtgtatcgatacccgccatacagcaaagtccactgatcaagatgagaagaaaaacgattccctgcaaaaagaaaaagaaaaggacgagacataatcaaaggcttttacgaaattttaacacattgaattaaattatcttccagctagatatgaccaagatgctcattaaacttgtccattctatgatgtttatgaatctttcttgagaacgatgaataccaaaaaaacacgagtaaaaagagtaattaccactagtatgccctccaaaagtgatgacttaaatttgcagagttcatcacagccagtagcaatttcaggagtactgtttcctttagcagtttcagctagaaacctttggagagttttgtaagatgtgtaccaataaggatcagaaacataaagagctgtatatttactgccggattgttctacagaactaacaagttccaagaagctttcacctgcagaataggtcaaagaattgcttaatttcctagttctcaaatgatatctaattgttagtattattttgtaatgatctttccacttacgctctgaatgtgactgtccagcttgactattcgattcagaaccctcggaacagagcacaaccaagtcagtttctccttctttccttgtttctcttctagcaagcaaatgatcctgtcaattattaatgagtattagaaagtgaagttaagggggtgataacactgggaaggcatgggattagggaaaataaaaacttaagagcaatgagtattactttgaaagactgcaagtctgaaagtttctgaattgttccatcctcaacaaagcacgaatctgagaacacgatattgctgactcctacattgttgggacaagcttctttaagccctgaaagtaacaaattctccatcctttcttcctctggagcagcaatatatgggaatgccaatgagaagttggaagctgtaaatagattctgttgaaacaaagacttggatgttagagtattgtaaactttatatcaaacaactatgtcagagatctgtgttacggatgcaatttcgaaatttcttgttgaagaaaagaaaatttgcacttacattcaatgtgttaacaagggcaggatctgagttcctttttgaagaaacatcagaagacagtaactgcaggcggaagagaacgtgaatattagaattctcagcataacacagaagatacagagcaaagacgattaatttcccgcaatattaaaacatcagtttctttacaatatcacaacaagaaaccaaagatccacaaggtcatttatgctaatgttaaaacaacaatactacatcattcaattacctctctgcctatgaacacaagtgcaacatcaacaggttgctcaagcttcttctctgagcactaaacaaaggagacagtaatgacaataagaaaaatcatttgacatccagtgagttgtagaattgaaatcataagatcatgaagaagaaaccataccagaaagtttgaccaacctccttgagtgaaaacagaaccaactagatcctttgcagacatgacctgataatttacagcctcatccaattcaccattagcagacctgattttcagaatcacataaaccaatcaacccagtaatctaagctaactcacatcagatatcacaagtcccaggctttttacacatttccatcaatcaaattgagaattatagagaaaacaagatgcataactggagatgcggagaccagaggaaagcaggaactgtgttcggagaagccaatccgatttcaaagagagaggccacagatagaaacaccaatagcgccaccgcaccaatttgaatcttcttcatcttcgtcgtcgaaacaattctaccggagacaaaaggaaaaaaaatcaatcgaacaattcctcacgcctaacgaaacaatcagcaaattcaaagataatcacaaacctagagagatcgagatcgcttccagaagtcgatgtatcagtagatttttatcgaactttcaaatccagagaaagaagagattcatatctccgatcttcaaatctgggcgacacatatgagtagtcgacatgtaaggaattaacggcgtcgtttttgaaacgaaaatcgctaaccgagataaccggtttcggttatgttcagatattaaccggtctgaagttttgggcttgattaggcttttaaagattttccaatacggcccaaaatttcgtgactccgttaagcgtccgtcactctggacaagaaacggaaacctccttaaatcttataataacttcgtcacgattgaacggaatatttcgtttcctcatttttttattttgttgcctcttctgcaacgcgatcccgccaaagacactctttactttctccctcacgaaaattctcaaatcgtcgttctctcttgattcaccgatttcgttcgccggaaaattgcaatttagcatcagaatcgtcgagccattttgtattatgaaagtccattgaagtaacaagtaacgagagctgcgaggttgagattttacgatgctttgtgtttcgttacgaaatcgaatacataattggcttcgcgactacgttaggctccaatctgtcgttttgattcttatctatgctcaggtaaatccgtaatcgctttgtagttgtttcatttcctccgatttcacgttttttctcgtgaattgttcgtatctgtttgggattagggttctacgatttctctgtcgatatttgtttgttattcttttaattgtggttagaagtgcaagaaactcatattgatgaatcatttgtttcagatagggtgcgcgttgatcggttcactaggggcattgtacaatggagtcgtgctgataaatttggcgattgcgttatttgggttagtagcaatcgagagtaatagccaaagtcttggcagaacctatgcggttcttcttttctgcgccattcttcttgatgtctcatggttcattctcttctccaaagagatttggtatgtcactatccttggaacagccgtgcttgtgatcatgatcaaatatttggtttaagagtttgctctgtcttgtttaattttcattgcatcacatattgtaaactgtcctgaatttctcttgattggctcatcatctttttgaactgattgatctttaaacctttttttttgcaaatctttgctatgtcgtgtttagattctgttgagccagtattcatctgctgcctataactgacaaaagatttaattgttaatgcaggaacatttcatctgatatgtatcaagtcttttacatcttctctgtgaaactcaccctggctatggaaattgctgggttcgttgtgaggctatcgtcctctctgttatggtttcagatctataggctgggagcttctattatagactctccatttccccgtcaatcagattcagatttacggaatagcttcttagaacctcctcttttagctaggcaacgttcacgtgatccagaattacgaaatagcttcttacaggctcctgctatagctaagcaacgttcacgttctgacgaaatcttggaagattctattgacgaacctgcctcctacactcctctgttagatggcggcctaagcaatatcactttgcccaatgcaacacaggtctttttatttctacctattcttctcttaagttgtttgtgtactcattgtagttgaggtttttatacttggtttgtctatggttttaccaattgggtttccagatgcttcttttcggacctttcttttgaaactgtatgcaatatagtgagaattggattgaactatctagatcacccaaccatgctttttagctctttgccactctaggttaggtgaaacttgtttctcactaacaaacaaaggccacatagtattgatattacatcatagtatgctgcttttcttgtctcagtactcctctaaaacttacacagacatagcaagtgggttttcaaccttttgtaggtgattaagcaccattcagctggagacatttacaaaggatcccaatcatctgctgcagaagcctctcgaaagaagtctcctctatccagatccttagaagcacttcattctagtctctgttgatagaacatctaatgattgtggacggtactatactataccttgcttttggttaggttaactttcacacttgacctttttatagacatagaaagaacacttgttgctttggtatatccttggactcagtaaattgcatgtgtttgtcaatctacattactacttgcagcactgctctcagcttttatcatttttgcctggcagtttccaactcacttttgcaggaagatagcttttgtcacgagcaacttcattcaacaattctaaggccattctttgttttcaatttgaagaatccagatccgagatttacatagtggataacaagcaagaacaatgcctttatcatcattcattttactcggaactgtatagaattggggttatttggactacgaatgtacattagcattcttttctgtacatgaaaaataggtgaatcggagggttagtataaacttcaaagatagttttttcatccaaaatgtttggtaaacagtgaagtttttattgcagatttttaaagtagcaacatgatttgcctatggggaaatattctttgtaatatccgtaagagaatagaagaaacagatataaacataatgttatcattttataagatctaatgacaacttgaggagactaacttggtgccagattccagccattttagtctctctatttgactcgagttctccaactcatatgattaaatgaatgatgaatatggcgtggcatggggcctaatgttgaaccaccggcccatgtgaattgcgaagttgcggtactaattaattaattgggcctaatagtagccaaggagtttcgtgcaaattaattctttgacctataaaaattggtataacttacttatccacgtcggtctgactattattaagatgagatttgattagattaataattttgaaaaaggggtcaaagactcaaaaaagtctgcgtggatctccagccgttttcagacacttacccacaaaatattcctctcggcgatgatccctttctgctgaatttttggtcctttgtcgctcgactgttttcttcgtctactatttgttccttttggatattcttcggacttttcgttgatttgattttcaagaggtaagttaataaaccgtgttccccgattctcctattaaagaggtttgtgatgtttttgatttctaggttttttgttgtttgaattttctcgtttgaaatctctaatctctacaaatcttccgtgattgagttttgattagtaaaatgattcgtgatttgattttgatttctctgtttttattatctctggttggtttggtttgatcaagtctctgatgctagggttcgatatcgtttctgcatttcgtaagaagaaacctttggtttaaatctcagtgttttatttggctatgaagcagagagagtttgaacaaggaaggattgaactatggaagatgcatcagagactagctactggtgtcacatgtgctcccgatcggtgattccattgattcaagacgaaatcatcaaatgcaatttctgtcaaagtggttttgttgaagaaatggataataatgatgaccatcaggctgctgattctctctggactcctatcttgatggagatgatgaacaacaatcacgaccaacattctaccaatcaggaagactcagaatctattcttgaagatgaagacgaagacgaagatgatggtgatgatggtgatcagaacaatgatggagaaattgatataactcatcaacttgaagagattaggaggataaggactagacattcaactgctattgttaatctgcttcaggggattcgagctggattattgatcgaatccgagaacaacgaggataatcccgataatagcgagcttgtcgtcttgatcaactcatttaaccaaaggatcagggttcatcaagattctgtagacaccacttctgttccttctggatctttgggtgactatttcattggacctggattcgagacgttgcttcagcgtttggctgagaatgatctgaacaacaggtatgggacacctccagctacaaaagaagcggttgaggcattggcgatggtgaaaatcgaagatagtttgttgcagtgtagtgtgtgtttggatgattttgagattggaatggaggctaaagagatgccgtgtaagcataagtttcatagtgactgcttgttgccatggcttgagcttcatagctcatgccctgtttgcagatatctgcttcctacaggagatgatgatgagccaaagactgatgcagaaacatcgagaaacgatgataacaatgaagatatcagtaatgcttctatggctagtaatggatcatcaccagactcaagttcgaacaattcatcggttaactaaactaaggctcactatctgagacaggtttacttgaacagaggagaactgatgggatcgtttgagatcagtctttagtgtttaatgttatttggtttgcacatagtttctcagatttggtggaaaatgtattctttggaattaattaacagtctttttttttttttgactttacattttctttctggtttgcttcaatttgttccgattagttacaactatagtgaccagaattcaaacagaaaaaaatgtaataatttgtgcagtcatcccaatcttctttgtgcagaagacttgatcctgtcttatgtgtattataattagttaattacgtaactctattacgaatgtttcaaatttcttcacgcggtaatttggaaaccttagaattgttttaaaaatagattacattgcaaggaaaatgtctacgaagtaaaagaatatatataatgaaccttagtcgtatgtttgatttgatataaatacacgtaagtttagagctgtataccgtaccatcaaagaaatattcaacttaagtttgaaaagaaatgaaaaggaagttgtggttgatcggttcccttttggttctctctttggtgatttcatcgaaggcggtctcagctcaaccatacaaatttcgtaaacttagtgagtgtttttatttatgatgttatgaaatataatgtagtatacgtacactcttacccactcataactagcatttgatctatacgtatgtacataaaatcttgttaagttgtagcatatgacataccacgatacaaaggcatcaacacgcacacaaaattttcagagtgttaccgcgtgaagaatgacagaatggttctgcaatttctgaaatggcagaatgttccatagtttggaattgttttctcgataacgcaagtttacagaaatgcagttttttattccacttctttacatgaaattggtattacggttattacataaattcatgttcatccgggatgaatcatccctttattttaatttatgattcgcatatttaattgattcatgttttgcattaatcgacaaagttgtgtattatcgatatctatactaagaagttacctaaaatgtctagaagaagatttaagaatgtcaatgaagattggaacacctcatagtgactcgccaccagcacacggatgtagggctggtggatcttgtaaaaagccgccaccgcgaggcaatggcggttagaaaaactggttttgaatgtgtacaaacatcaatatccttccttttcttagaaattgacaacgaaccagtttattttgtatgtatgtatatatgccttaactcaataaagataacgatgttcatgttcttaaaagcaaataagatcctatcgataccaaattttcatatttataaagtcttgactcttgacttgtagataaaatttgtaattctttctcttgtgtgtgataatatgttcgtttgtttgaatcaaaaagaccaagaaatgaatccgtatacaagcatattatatttgaccttttcctaatgtacttatacaagcatatttgaccttttcctaatgtactatgcatattttatttgttttaaacttcttccatacgctatttgtatatatatatacttgtatctagactaaagcccaaacaagactgtacatatcaaatgtcttatatttttgctatctaaatggtgcaccatgcacattgactacccataactaattaattaaatccatattttccgaatgaaattattttattgtgtagcctttgcgtcgtcaaagttctgaactatacaagattgatagaatatcatttgaaagctttcatataataacttttaaggaacccttgtagtcgtatacgtttgatttgatataaatacacatgtatacaacgtataccaccaaaaaacaaaataaaaaatgaaagcaaagttgtggttgattgcttctcttttggttctctctttgttgttttcactcaagacgatctcagctgatcaaccatataaatttcgaaaaatcagtgagtatcatcaatatttgtcatccggtttgtttcatctatattaacgtatgctaaagccaaattaaggaatctgtcttcgattttaacgactacatataaactcaatggaaggacctcatgttccgtactttattttttgtagaagacgaaataagagaaatgatccatattcacaagacaaagaagattcaaacaccacggagtgtgacaacgcctgcgggccaaggttcaccatccagtgtaggtgccccgcacgccggttgatatggttagacggatcagccaatcacccaatgcatattcgtacatcgtttttgtttctttttgttctttaagatttgacattaaatattgtatgattaattatttatgcaccccaaatgtaaaaggacagtccaaatccagggaaaaatcaggatttttgtttgacttgtacatattttgtttgaaatgctgacaaatagagtatcttagctttatcgtcaataaatgaaaacatagtaaacttacggaagtataaaatagtttagtatcctttgacccaatatagcgtgtataacatagctatttcttgacttatatgattatatcagttattatattatatatgtagaatatgtttatttcgaaagtcttctgacgcgctacgtgaaaacttgatcaataagttatgattaaacaaaagttatatatttgattgatatatatctatactcatgtacaatataaggtatcatccagaaaatgaaggtcaagttctgtttgattgcttcccttttgattctctctttcgcgatttcgtcatacgtcgtctcatacaaatccagtaagtattattgatgtttgtatatcatcatctttcctaaatatgctaaatgagaagctatgtaattataaaagaaagttagataacatttagctactttttgttttttacatgcatgtatgcatgatcagttcaattttttgatacctaatgaaaattgtatagaagaagaaacaatagcagaaacgattcacattcgaaaggtaatgaagatcagagtacctcgtagtaagtcaccacccgatcgccaatggggtgagggtgactcgccacaagccgcaagtccaaattcagtataaggcgatggctatacgatttgtggctacatacatcgtataatctaagaaatgttcctgatttgtgaaccttattagtttatgcaaaggacaagatacttaaaaagaaacccaatggccggctcaaatgtgttttgattattttctctctccatacaatttttttttgtcaacgaaccaagctgtcacctaaattttaaattacttacgtgagattgaccttgtcttttgtattcactgggttattattggacgtgaaaacacgttcctagataacgatgttcatgctctttgacatcttatattattattatatttttatacgatattctgtgcatatgctctacgacgatcatcactagctaggtgtgaaagaacatattttttctttaactagaaaaatgctgttggtaagtctggtcgtccacaataaatgtcttttgattttgatcgagatccaatcacaaatttgaaaattccacatacgccgtgttattgaaattacaatcccgctttagaaaaaaaaaaaaaaaaaaagcttctcttgctttttatttgtgtgtacttattttttcttggaaatttatagtccccaaagtaataatcatcattatgaaacttgactaatgttgtagctttcgcagcgacttgatcgatataaatacccattaagtgatggatccacaatgtattatattgcactaaattttgtaagtttacagataaagaaaacccatagaaatgcaaagagtcttgtggttgataactttccttcttgttttttcttctgcatattcgtcccaaatgctcgtacctcaacacaaatcccgtgagttcggtgagtatttttatttattttatttactaactgatttttttctttatcagttatcatctaaatgtttgtgtcaatctccatgtgtaataactgcaagagaaaaatgaaaagaaaaagaatcaaattccagagataatatcaagaaagattgggtgtctatggtgtgaagtaaaaaaaaagagtttaaatcaaatatatatagtcattgttatatttctaatttcctacattaactttcttatagatgaaaaaatcgcaacacaacgtagtatatcaccacccgcaaggcactgtattaaaacatttcagccagcagacataagggcatcatattcatgtaaaaagactccacccagaggcactggcggttagacatacatgtttagaaaattgtaaaattgtttgtagttttttctttttacatatgatcattagcagtgataatgttttaatttaattagttaaccgaacatgataaagtataatgtaatttgtaatgttcttttggaagatatatatatatatatataatgttttggagtttggagttttgtactttgcgacgagagtataacttctttttcacaagtacaatatatataccgcttttataattggtcacttttagacatagatttctatttatatgtccgtatttcatggaaaaggagaattctattaaaaacactatatacatacgtaacatatctaccgatcagacgcttaatttacagtcttcaaatgtatatgagctattcttttttctttccatgtgctgctacatatggatttcaaacaatatcatccagtattcaaaaactaataacgtgttgcatggaccaatgttgaagatgagcaatgtcaagcatatgtgttcaagggtagggttcagatgaaaagacaatgttggtgtcgtgtctcactacatttttgaccatttcaaaatacgctatagatttttctttgcattcgacctttttttttataaactacgtacgactagatgagctcagttttttgaacaaaaatactagaagagtacgtcaataatctatacgtacgtacaatcataagaatgaagacctagtcttctctagttatatctccatattttacgtttatttcaaagaattaggacctagtcttttctacagttcctttgatctatgtcgaacaaaattctacttttggataatatggatatggatatttataaacagattctactttaaccattttatgatcagtaaccaagactcccctatacaaaagtaagtgaattgattcatatctcttatatattattctacatcatatttaaaatttggattcataacatatttgtataacaattcaacagaaaaggtttcccttgttttttttttgtcttcgtcgtagactattattgttttgaaagtcagtcagattatatgttttccacacgctgcctcgttccaaactttttattttattttattttaaatctggtataaatacacataaaacatacatagaactatttttaactacagctatacaacacaacgacagaaagaaaatgaagagaaatttgtggctgattgctttgtttttggctctctcattggtgatttcatcttatgcagcttcaacttggccataccaaaaccgtaaactttgtaagtatttatcatccgattcgatccatatttttcttttatatgactaatgccaatttttctaacagtgataatagaatcacggccaagtaagtcgagacccgcgccccagtgttgttagtaaggcgaggttacggagaaagagcacctgccatttatgagtcatggtggttagatggacccattttataattattttattttttagtaacgaaaagaaaaatcagggaatcaaagaaaatacgtatttaataggttctctcataaattagctacaaaaaatagttctgaagttgtagaattttacgttgtactgaaaataaaagcccatcataatattgtttccgacattgaagtaatttccgacggtaaccccgttttactacttgacaaaggagaaaaccataactctttttgattagaatgaaaagacacacatcatatatatgttggtaaaaaccgtttatatttaagaagacagctcataagttaaagcattcaattttaaacgggttagaaacaaaattttctcaatttgatagacttggcggtttggacgagaagacgatcaaaacttcagagtttgcttctccgatgtttaaatcttagcgtgaacttccaatgacgcaaaattcctttgtttgtcgcccttttgctttctataaaaaaaactcctacgttttgatcttctgtccgaacaaaaattatttgaggaatcaaaccgtattgataagactggcctaatttggtttagttagttgattcaacgaacaactattattttttaaaaatggtttttaaaaaaaaatctactaggtatgatgttgatcgataattatgctttttaattatagtattaaacatgacaccctgtctctaatttgacctcattaaactaagcaatctcaagcaacttcatcgataaaacaaaagtccaaaaacttattaaatcttcttatataattaatgttatttcttagaagcatcatttgttgtaaatatgtaataaacaactccaccgcatcaagtttttctctttatatgaccacccattaagtctttgcatagtcctaaagcttaaaaagatgaattggaagttggttttgctaattggttggattctcctctcgtctattgcatcaaacccagctttggctaaagttacttatccaactcgcacaacaagtaagtatccattacctatctcttttattttatagttgttatttgatagatattcagatcaaattcgtggatctattatctatacatatgccacgtaaaactctttgatgtatggaaaaagttgatcttgtagaattaataattgctttcgatcaataaatgataactacaaactagcaacacttttgttgtttaatttgtatagaaatatacaattgttaatttacatatacataaattcttgaaaaaaataggaaatttattttatggttaatcgaattttaaataggaaaatggcttggaaatatacacatcagcaaaggaatgaagattggctttacaggcagtttttctagacctgctcctcacggaggcggtccaccgaagatcatttctaagttatgacatgtaacgatcttaattagcgatccaatctatatataatctattaacttgtgatttctgattatttgtaaagttgtttcattgtgtgtgatactcttcgaataaattaaatgaaacttcgatatgtaaattattatttagttcactatacgatttaaaatcgagtattgagtgacaacaaggtctttttcattttctcaccaaaatgatgatatgattaacattggacttttcaacaaatgcaaaaataaggaaaaaaagacaagacttagaaagtcaatatgttttcattgcatgcattgacgtatacatatcagtatcacaccaactgtaatgagaacgaccctgatatatataatctctgcctaacagtctaacactagctaatttatagtttataagatgttatatacatatatacccgggaagaaagaggaagaaagaaaaatgagtctcaagttcattcttatagctttgcttctacttttatgcatcacattttccaattcgaccgtcgttcctttttccaaaaaccggaaaattagtaagtcttcataactgcataagtgcaaatattgttattatatggtgttaaaatgaggtttgtaatatagttttaacgtgtaacaagccaatgaagaagaagaagaagaaggtagagagattgacattcacaaaggaaagaagatcaccgtaaaagtcagccgttcgcctcctgcaaaaggctggatttgttgcaatgattaactaaaaggagctatgtgaacattttcataagatcccatccttcaatttctatgaagataatatcgaccaagatcaaacttcaaagcttgaaattagaaacgtgtatttgctatatctcaaccactaatttaaggggctttcggcccattacacgcatgggaagattcaattatgttgattttgtaagttttggggctaaagtgtaaattattgaaacttgtaggcttgatttcattattccaagtttccactttttctcctccgccgtagccggtgcttcttcttcgtgaaaatctttcgtctgagattttttctttactagttgaataaaattgaagatttcgaagactacccaaaaccgcgttttacaaaaagccagattctttttttttttttttttttttataatttcattaaaactacccaatgggcttgggccgaaacttacaaacaattcggtccagttacaaaattagggttttctgacacatcgccaggaaaaagaaaaaagctcgccgcctgttgaccgtcgctagcagagcgaccaaaacctagatccggcggactcaagtcccacagctttgtggccgcctccgagaatcgtccaccaccgacgaaagattccggttttcgtctgtagagactcaactccaacgcaccaacccaccacaagactcccggaaagctagccgctccgacgtagcggttccacggaaccggatcccgacctagcaacccgaaacactcagcgataacacttctctcccatcaccggaaaatagcaaagacccagagccaaacacacgtcgatccggaccggtggagaccaaaaacggcagacctaaagactggtggctcagtcagactctctagatccaaaacccgctgcagccatctaagatccaaacagatctactgttaaccaccgcatcagacaacgaacccccccttacccctctccaacttccgccgtggacgcagcgactagaatcacgggtgagcctgagaacctcgcagcaaccctcagcgtccataaccaagagacccccgccgcaaccttctcgaccgacaaaaccagagccaaatccacatcagagagagagctccacaccacacgttgacggagacaagcatcggctcactcctggacttccttgaagaggcttcaaaccgacgatgaagagcagatcggaacaaaaagaaaaaggaaactaaatctacttaccggaaattgtcttcaagagagagagaagggcacgactttcaaggctacgattgagcctccatctcataaagccagattctttatcttccataatcgtattaaagctacgaaaacctcgatttcgtgttcaaaacttggatttgctcgctatcgaaaggtctgacctttaatccttttcatgggtttaatcgttcagatatgatttctcgtatcggtattatagcttagaggaaaagtgtcgtagttttggcagatgaaattaaaattggctctgtattcccaaatagttgaaacccatttgatgaagctatcttatcagacttttacgcataagttttcttgtggtcttggatcgtgtctagtggcaattatcttctctgagttcttttgcttagtttgattgtctgttgttttagacgaatggctgaccaaggattagaagagagtaatccaatggaccttagcaaacatccttcagggattgttcctactcctcagtgagttcttttgtgcctttgtctttattttagtctcttaagagttagtgtttgtttgatgtctatggtgaactttagactgcaagcttgtttatatttgaaatatggaatacaccttctcaaagttaaaaccttctaacttgtaatggtgtggtttttgtttgtttgtttagtagtcaagtcatttacaagatgccaccaagaattgctgctatccgtcttgtaagctcgcatcgtgaggtctatgaaccatgtgatgattcatttgcgctagttgatgcattactcgctgatcgcaccaaccttatagagcacaaccctaagatttgtatggagattggatgcggaagcggatatgtcataacttcacttatacttcttcttcaaaacgaagttcctggtgttcattatctcgccattgacactaacccgatagctacaagagtgacaaaagaaactctagaagcacatggagttaatgctgatgttatctgcgcagatttagctactggtctagagaagagacttgctggctcagtcgacgtgattgtggtgaatccgccttatgtgccaacacctgaatatgaagttggaatggaaggtattgcctctgcttgggcaggaggggaaaatggccggacagtcatcgataaaatcttgcctgtggttgatcttttgctatcagagaaaggatggttctacttagtgacattaacttcaaatttcccagcagagatttgtctgatgatgagaaagaaaggttatgcttcgagaatcgtagttcagagatcaacagaagaggagaatctcgttatcctaaagttctggagagacaaggatgaggagagccaggacaaagagacatcatcatcatcgtttgtttcgcagttttcgaaatccttatcttcgcttatggagaaacaatggcgctgatactacaaagatggctagagatctcataagcatgctttgtttaaccaagaattctctagtgttttaatttttatgaaaatcatgttttgtgttggtggtgtagtcgtaacagtgatttgatttagtggggttattggttagtggattttaactgatgtgaaattttgattttcaattccacattatgtgatttgaaaaaatcaatgaaaaattataaatttctacttgaaaaaaaatgttcactaaatcgctaaatatgcaaaaatataatagcgttataacactaaagctgacgtggccgaaaaggagtggactttcacataaaaccgaaagacagccgtcatcgtagcattaccgcataaatttccaaaattaccctcgatgtaacaaggacggtcaagggtagcatgggtatgtatatataggtataaaggggcttaaggatcccaaatccgaaacgcaagtcgatgacctcctctctctcacagatctaaaaaccagaagcgagagaaacaaattcactctccccttatataagcaccgatttataaatctttttccctcttcgattctcaattctttgtataaaaggcttctccttttctcaattcttcggcttcctttcgcccaaactcttccctcgaatctttccttctcgtcttaaagctacgaaaccctagatttcggatttcttcgctatccaaaggtctgacctttaatccttttcctgagttttttcgattagatcttatgagtttcatcaccttaagaggataagtctcgttgttttggaagatgaaatctaaaattggctctgtattctcaaataattgaaacccttttgaatgataagtctatctgataagacttttaagcatattgtcttggatcgtgtctagtgtctattatattttctggctattgcttattttgattgtgttgattttggttttgtgtaactatagaagaatgactgatcaaggattggaagggagtaatccagttgatcttagcaagcatccttcagggattgttcctactcttcagtgagttcttttgtgccttcgtatttgttttttgtctcttgggattaagtgtttgtttgacccctgttgacatctttgatgttttgtttcagaaacattgtctccacggtgaacttagactgcaagctagatcttaaagccatagctttgcaggctcggaatgctgaatataatcccaaggtatttgcattatattgtgactttttgttttaataaacggtagaaaagttgtttggaagagtactctctccttgagttgaccttattgttacctgagatctgattggtctatatactgtgtactgattaattagaatctaagatattatctgtttttggcttttgctaaactaatttgccttagctaagctcgtcttatgtaatacctcttgtgttttatgtttccagcgttttgctgcggtgataatgaggatcagagaaccgaagactacagcattaatattcgcctcagggaaaatggtatagttattttggttggcaatactttttcataattctgaaatttaattacattggtttgaattctcttctgaatttggcgactaatctccaattaggtctgtactggagctaagagcgaggacttttcgaagatggctgctagaaaggtagattttttttatctttaacctctttaatttaactttcttatagatctgttcttctttactttagcaataattgcagtatgctatttgctcctcatttgtttatgctaataggagatgttttattgtttagtatgctaggattgtgcagaaattgggattccctgcaaaattcaaggtacaatttctttaaaccttttccctatccaacattttttttcttacttttgcttatactaaatatattcaattgttacatcctgcaggatttcaagattcagaatattgtaggttcttgtgatgtcaaattccctataagacttgaaggtcttgcttactctcacgctgctttctcaagtgtgagtgatcttaacttatacatttagtagtcaaggaccgacttttagagataaaaacgttgtgctgatggccattacctctctctcatattggcgtgtggttagtatgagcccgagctcttcccagggctgatttataggatgaaagtcccaaaaatcgtccttctaatctttgtctctgggaagatcgtaataacaggagccaaggtaatatctcacttctctttaggttttgtgataatacttgttatgtctctctctagtctctagctcttctgtcacctgaaaaaatcctgagatcactcattatcagatgagagatgagacctacaaagcctttgagaatatataccccgtgctctcggaattcagaaagatacagcaatagtatgtaacacacccgtcaactttcctcatctttcttagtaatgtttgatttctcgatttattcgtgcatgaacctaattgttgtgtttatcttttatagggtcacggatttgttccctgcaaaactagttgtgcggtcttagccccttggagttgctaaagcttgctgagaattttgcccttgaacaaaggctttcacagtagctagactctcaccttgtgttttggttcataatataacattgtatatacacaatggagattctaaagacaattcttcggttctattttttttctttttctttccaagatatgtcttacatgtatgttgctgtagtgtcctcacatttccacttatgttacaagtagaaccttaactcagtgtgtagccctaaagtcttgtttatcatagagattggccaagattgtgaacaaagatggagagtttcaagatcatagattaaataacaaaagtggtgattacagtatccattacatgtctgaaccaccagcatcaataattatttcgaagataggagacagagaatcatgtgtacaatgctaagatgggctagtaattcacagtggatctgattgcatccaatatctgcatcaaattgtgagccagggaagaattagcaacaaaaacgaaaatatatgtataagatacagaccagaaacaaaacttgccttgttcttggttggcatgtagaaaggttcgaacactagagggaaaggagtgtccaggccacaaactctgcttacaggtgcttctaactgcaaaagtaaccagacatgtaagcaaatatgaaaaccagacattgttaccaaaaattataatgctgtagacaaatatgacttgtttttaccctcaagaagcaacgctcaactatagttgcagcgatctcggccccaaagcctcctgtaacaggagcttcatggctaatctgcaaccgaagtaagcaaacacatttattctctgagacttaggacaatgatactcactcagagaagcttaacttacaagaagtctgccagtctttctcactgaggtctcaacgatttccttatcccaagggatcagagtcttgagatctatcaattcacacgatattccttcctgcaaaaacattttgtttcatcatctgtatcgccaaagactaattaagtgcaaaacataaaaactaacgttttctgcgtcaagacatgcttgttccatgatagtgagctgtgctccccatccaacaagagttatgtcggaaccttctcgcataacctgtgacaaaaagttttcatttattagtcttagaagtgtactaaaagaagagacactagaaatggaacctatatacctctgcctcagataaaggtatcatatagtcatcttcagggacatcctctaccgcttgacgatatagccactgaagaagaagaacaaaggatcaaagactcttttacaggttcttgaagttgaaaataactcaagaagtagtacctttggttcgaaaaagacaacgggattcggatcacggatggatgacaataataatcccttagcttcccgtggacttcgaggaataacaacctacccaaaacatgcaattttcatatacacctaagaatatgaagcaaatagagaaagaagaagctttagtaagaagatgtactttgataccagggacatgacaaaagaaagcttcaggggactgcgagtggtaatgtccaccgtgaccaactgctccgtacggtgccctaatagtgagtcctacaattgtcacataaaccccaatgagtaaaaacttggtgtctcataaccaagaaggcacaagaagatatgagtttacctccacagttaaactggtttccacttcggtatctgaactttgcagcctcattaacaatctacgaaatcacaaaactccataaagagaactcatgcgtcatcataacttggtttaaaggtaaaggtagcatttttacctgatcaaaagccgggaaaatataatccgcaaactgaatttccgcaataactcgatttccctgcaagcgaataagtaaccagtaagatgatgtgatagcaatgagaggtaaacagaagaaacaaaagaagagaagaagtgaccattgcagctaaaccaatgccaaagccaacaatgccttgctcgcagagaggagtgttgaaaactcgagatttcccaaaacgttcagctaatcctgttgtacatcggaagacaccaccaaatccaacatcttccccaaaaacataagaccttcactcaagtgactccaaatacattataaaaaccaattcaaatgtaccttagactttaggattgaaaaatgcgagaaaagctcaccgaggatcggtctctaaagcgatgtgaagagcttgattaatagcagagtatagattcatcgatttaccactttcagatacattttcaaccgtcgatagcatcctatatccatgaccagagaccggaaaagatgatccccggcagaatctgcgtacaagagctgccgccatttacgcaaaatttagacgctttccaccaacgaatcaatctgaaaactacagaggtttagcttaaagttcctcaagtttcttctggagaagatcacacaaatttgatacttttggatgaaaccaaaacagacatgaaagtactatcttttgtcacggagtttccgagataaagcgttggagaagctatctagccacgtcagatcagacaacaagtacttatttgatcagcttcatttattattgggattttaaccacatcagcaatttcggcaagatagatcaaaacgacacatcatacattggaatggtgaaatggagagctgactaaagttaggttctctcggcttctttgacaattattggtgacagcaacaaaattatgagatcaaggtcgttttgttttgttacacgaaaaaaatcaacaatacttatctccttgctttgaaaatcttaaaacatggattgattcagataactttggagaatgacagaaacaagacgagagaggcaaaagaccatctcaaattctaaacgactcaagagagtcaagtctgaaaccaaagcaagaaaccaaaagaaaagaaaactctgcctaaaaatccaacagacatgaaaaaacaaaatcccaccctgcttttatctccttttctctaattcttcccacgatttagtaggtcctatgcgcatttttacagggtaggaacaacagaaaatgaaaaagaaacccaacataaacttgtaacgagactgcgattttgaagaaaaggaaaaatgaaaacaagaaaagattgaaaaaaaaataactgggatttaaacttctaagggcaaagaaacggatccgtctcaggtactaaagctccttccatgcttcaaggctcacggcaatcttcttctcaagagaaacgttaaacgggattgttcatatcttcatctctagtcagttttatgcccatgccgtgagcgacaccatcctcttagttagcaaccatttgccaccacatcgcctgtgactggtttagcaacagacccattctcagcaaccttaacatcactggacgtttgaacagctgcaggagattccttgctcgctgactctgcagttgcagattccttcttttcatcggttaccttctcctcgcttacctgttaagctttaatacattagaaacactcaagttatatatatactgaatgaaaaagatttctgaaattgttttctagttcttacctgtttctgggtttgcttggctttcttctccaagatagtcttctgtcgaacctcgtagaatgagaaatcatccaaaatgcaagtcttgctgctatgctccttgaaaattttcacaatcttcaaaccttgctccaacttaacctaatatgatccaaacaaagaaagttaggcacaagaaaacaaaaacgctcgtggagtaatcagtaaaacaagccaaaagatgtcacaaatatttacctcttgtgtgtctctgctgttggtaacaggtttgttctcattgttctctaaagtaatatgcttcagtaaactgtttggcacatccttcacaatatgccacttgagggggaaagagccggtccacttatcttgctgccagtactccacatttgtgttgaaatcaactggtcctgtcatttcagcaagaccaacaaattgtccacttgcattgacctgaaagacaaaaactggagtataaagaacaatatcataaaacaaagtaaaaagagcacagtttttaatttcaggattatatacacaccgagaaaaacagaaagatgggacagccgccagctttctgttgagcttcctggtatgctgcagcaagcttcttgtttccatttggtgtgctagcccaaacattatatttaatgctcttgtgcacatcatcttcactgtatgacttgatgataaagaacatggcatttgcataatccactgggaaatcttctttattgtactgttctctgtcaggaacaacacatgtgttatccgcctccccaacctcagttacatttgattctccagtctgctccttaacctctaagctatcatctagatttcccttctggttctttgtgcccttagctctaggtcccctgttaagttcattcaaaccatctacattgttctcatttccgtaatagtaactgttacccctgccccagcttctgtatttgttgtctgtggccgcccatcctcttccatttgttcttgaatcatacccagatgaaccataacccaaagcagatctccctgtgctaccatactgaccatataacttgttctgatacatcctgttgtagtacccctgagctgtaccatagccagtcactgatgaaggctggtgcacgctctgcaaagaaaaaagttgattgaaggtcagttaacaaatttggaagacttgagcggctatatatatatgccagtaaagcagacaatggtgttcattagcaaaaagaagtttggaaagacatcataccgtgtagtgagaatttgagcggtagttttgattcctcgatgaaggtactgtgctagacttagaataggaggatgcaactccactaccagaaacaggtctctgcacatcagagtacttagagccatcgtgccacggcacaggagcataatacccttcataggcatacctggggtcctgataaccagcagccaaacctcctcctggagcacccataccatacaaattacttgaggtgttaagggtagcctggttagttggtttcactggagctgatccattacttccttttgtgataccagcagcagaagcaacattattgctatccgcaggtagtgtcttcacaccagcaggtttgtttgcagagagatccggctgggtaggtgtagccacagatgaagcatacggtccactgtttggaaaatagttaggatactgatactgctgagcaccgtacaactgcccttccccgccaagctgtggagcagggctagttgctggcgagtaaggatacgctgcatacccataaccctgaggatacacaacagtcccattctctccataaattccctggtaaaatattgaacctgttaagcaaagaaaatataaagacgatgaaaggcactattataactagtcagcacacacttacagaattcatgtcaacaccctcaggatttgtgtaagctgggtagtcagtccactcttgaccactcccatatactgaaaagttacaaaacgaaaaacttgttaaaccagtggtgacaatttagtgaaataatgtttctagattgtaaatgatttgaggatgaagctaccattgtaatactggtagggattgtaaggattaggaacatagcaaactgaagggtcagcagcatcactgggaagcattggtgtcaaagatcgatcataagaaggaacttgaccatgaacatcaacgcctccatactggtagacggcagtctacacaagacacaaaacaaaagcgttaaaaaaaactggaagaagcaaaagttgtgacaacagaaaaccaaaattcaatctgcaaatcaccttcttgttaggctcagggatctctgaagcttttgctggcgagtccaaggatagtttctgcaacagatctgtagcttctacaaacaaggtgagtcaaggaagcaaagaattacacaattaaccattagaatagtggaaagcaaacattctcaaatcaatcaaactcgccacaaatgaatcgatttgaatcaatatagaaacctaacaatcgagaaatatattgagaaacccgaaactgaatctaggcaatatcaaatatatctgaacaagactcaaaatcagctcactggattcaagatccaacagattcaagatcgagaaatcaaaacacagatcgagaaacataaagaaaggatacgatcagcaggaggagcaacggtagccatgagaggagattcgacaaacaaagatttggatagatccttctcggataaaaggggatgcgaccaaagagaaagaagaagaagaagaaaaaaaagaagatagagaaaccctaaatggaatcaggaaaaacccagatcaaatctagggtttaagagatagaatagaagagagaaagaagaaaaaaatggccgcagccgccaagaaggagaagggttttgcttcggggaagaggaaaaaaagggttttgtctctctacctctccctctgattcaaatagatccactaatcaaccacctcaccttctctcttttttttttctttctttttttttttttttcttccaccttaagatatttcctcttttgttttaaaagaagactatagaccgtgtggttttggttatttttcctgcaaaatctggataatatacttttccattttcttaaaattggtaatcttgtaataaaatagatataaatctcaattctgttaccaaaatataattcaaaagtaaatttggtcaaatttaaaagcaaaagagggcatgctttctattataggtgtgtttcttctataaatttaccccaatatacattgaaatatctttaaaaatatatattaaacttttttgttttgagcaactatttaaaaactaaaagcaaatcattaagataaaaccaaagaaagtaaaatctatttttcagagaaacttaccaaaactagctattcaagaaaatatactttacctttaggataaaaggaagtaaattaccttagcttaaaaaagctattattaaataaaaacattttaagatcgagagtatgtaatgggcctatttgattaaagattcataaacaggcccaaatcaccaaacaaggccaccggaaataaacccatgatccgattacccatccgacgttctagagagttctaatgagaaaacaatgaagagtacatccaacggctaagattagctcgaagtttcaagagctaaaggctcatatcgcctttatattcaaagaaaaaattatcagtagcaagtgcattcttcatttcgtcattggagaaacctacttcttcctccttatccggaataaacctcttcggcgccatctctctcctcacctccgtcgttccaccgtccggtgagtgtcacttttcccatcaattgagctcacaatgttggcgcctatgtaattgtgtgtgtcgattgattgttttgttagaattggaattaacaagtattactagtagctgagaaaaagtatgttaccttgttttcgtgttcccggagatttgtggctattggtgtagttgtggttttgagtatttggggattgagctctgattttgaaattcatctgttttttgttttttgttgccagttttaattggttagtacttttggtgaatctttcgttttatgtgaactgttggattgattttcagtgtttgagaagtgaaaatggcatcgacattcactgccacgtcttcccttggttcgttgcttgctcccaatgctatcaagttgtcttctgcgactagcatctcttcaagctcgtttggaaggagacataacgtgtgcgtcagaagatcccgtcctgccatagtatgtgcagccaaggagttgcatttcaataaggatgggactaccataaggaaacttcaggtgagaattaatgaattgattttctggagtaatgattaggattcgttttatttttggtttctgattactcgtttgttattagactggtgttaacaagctcgcggaccttgttggtgtcacacttggaccaaaagggagaaatgttgttcttgagagcaagtatggatccccaagaattgttaatgatggtgtcactgttgcgagggaggtatgaaatttattgtctgtttaaccaattatgttcctttcgtttttaattacttctctaagcttaaggttttcttctgcttaggtcgagttggaggacccggttgagaacattggtgcaaagcttgtaaggcaagcagctgcaaagaccaatgacttggctggtgacggtacaacaacatctgttgttcttgcacaaggttttattgctgagggtgtcaaggttgttacattcttctttcagctttctctgattttatactcagaagaacagtatattaatctgaaattttgtatttttcaggtggtggctgcaggtgcgaaccctgtattgatcactagggggattgagaagactgcaaaggctttggttaacgagctgaaacttatgtctaaggaggtaagtaactattatgctaaaacttccttcttcttaatttttcgagagtctatagcaagatggtctaaaggttatgtcattggaaatataggttgaagacagtgaacttgctgatgtggcagctgttagtgcgggtaataaccacgaagttggaagtatgattgctgaagcaatgagcaaagtgggcaggaagggtgtggtgaccctggaggagggaaaaagcgctgagaacaacctttatgttgtggaaggaatgcaatttgaccgtggttatatctccccatactttgtgacagacagtgagaaaatgtctgttgagtatgacaattgcaaggtaatttttctttattctgagctaccaaaatgatattgtgatgcaaatagcctaacaagtttctactgtgcagttgcttcttgttgacaagaaagtaaccaatgcaagggatcttgttggggttctagaggatgcgattagaggcggatacccaatcctcataattgcagaagatattgaacaagaagccttagctactcttgttgttaacaagcttagaggcacactgaagattgcagctctcaaagctcctggatttggagagcgcaagagccaataccttgacgatattgccattctaactggaggtaggtcatgtttttataacaaaaaacctatatgtgggtatcaatcaatgtgccctcctgatttggaatcatttggctgttaaaaccttaccgtgttgcttctgtttttgtgtgcagcaactgtgatcagagaggaagttggtctttctcttgacaaagctggaaaagaggttctgggtaacgcttccaaggttgtcctgacaaaggaaatgacaacaattgtgggtgatgggaccacacaagaagcagtgaacaagcgtgttgtacagattaggaatcttattgaggtatatgtttgagtcaaaccgcataagagtctgtgacagctacttttttttgtataaagtttgtttatgctaatacaactgcggttgtgcagcaagcggagcaagactacgagaaggaaaaattaaatgagagaattgcgaagctctctggtggagttgctgtaattcaggtaaaatagtaatcacatggactttcttggatttgtatgatagaagaataagttaagtgatctaattaaagtttttacatcttggttaaaggttggagctcaaactgagacagagctcaaagaaaagaagctgagagtggaagatgctcttaatgctacaaaggtgattttctttatccagctgatggggttataggtatcgtgctactcatgtatatcttaattatatgacctcattgagtttcaggctgctgttgaggaaggtattgtcgttggtggtggttgcactctgctccggcttgcatcaaaggtcgatgccatcaaggatacccttgaaaatgatgaagaaaaggtgattggcaaaatcaagaattttgaaattttttgcaaattgcttgctcttactgcattttcaactatttcccatctctaggttggagcggaaattgttaaaagagcactgagttaccctctgaaattgatagctaagaatgctggtgttaatggaagtgttgtcagcgagaaggttataacaacataagaacatccatgcttattcagctcttgatctacgtaagttgcttaaaaagctgtatttatttattgcaggtgctggctaacgataatgtgaaatttggatacaatgctgcaaccggcaagtatgaagacctgatggctgcaggcatcatcgacccgacaaaggtcagtttctcacatacactccctcactctgttttgctatcccatctgatcgcaaaatatccaatgaacctgagtggatttttgttttcaggttgtgagatgttgcttagaacatgccgcctcagttgcaaagacgttcttgatgtctgactgtgtggttgttgagatcccagagccagagccagttcctgctggtaacccaatggacaactcaggttagtccagaccttctgattcataaaaactggacagtgacatcaaaacaaaactcatgtttcttcatcactgaatctttctcgattgtcttgtttcaggttatggatactaagatagaccgaccaggtttgctcgtaaagctgagagataggcaaaattccgaagcgagagtagctcactgggatacggattcctttagcttgcaaacaaattttctgtgcaagtgtagtgatttttgaaccagagaataatgtgttcactagatatcatatttgaaatcattttgaataacttgtcagtgatcttcaaaatcttgagtgctcttaataacaccatcttatatacatgctaaagctgagggaacttagatagaatgcaaaaagtgtactttaaatttaaaagcttcttgaatctgactaagaaagaacttcattaactggttaagtaaacaagtgtaatataaagcaattcttttaacaactctaaaaccgtaaacactgaatcgacaatcgacatataacctcaggtgagcaaaagtggattctactatatgtacctcaatgtagatggattctaaatccaaagccacaagctgaacagagccaattctcaagcaagcttcttcacccttcaccattgccatatcttccggtaaaactaagccgagttgatcacagaataacacaaacacagctttgatcgccatcatatctaacatcttcttcttcactgcaaatataacagggattcagacaaatgtcaatcaactaattctcaaagttagcatcttttgaagcctgaattgatcaaagattcaaacttcataccaagaaacctaagaaaaacaaagattcaaacttcatagaagacagtacctagactcgaattctcggatctcagcaagttctttccccatcaaatccacccactgtactttcttcttctcctttctcccaccatctgctgaatctaagacctccttcttgagactgcttttcaagatttccccattactaagactttcttcttcttccttttttccctctagagcacaatcttcttctctaacaacctcagtcaacaaaccatcaacatgatcaacaacaacttcttcttcttctacatgtgcatcatcatcatcattgtcatcatggtcacgatcatcaacaaccgtagtcgaagaagacacttgaggaaaagtattctccaatttgagagaaccagaagcgtagatatgaggagaaggcttacagaaacagatgaaagaagggcactggatcttacacagcaaaaccctcatcaaaacatatgttgggtctttaaaacacccgatcatcaaattccaaactttccctcttttctctttataaagttacaaccttttcatgcccattgagatgcccagattggactcaaaaagcttcgaggatttcaatctctggatttctgaaacaaaaaaaaaaaaaaaaaaaaagagcaacaaaaggttttcgaggaagagttaataaccacaatatataatatcacacttcaatagaatccaaagaccataaattaagcgttgatcagatgaggaagcagacaaaagtacagggaccacgcaatgctaatattactaattgagaaagaacagattccacaattgagaacaatcagccatggccattaaagaaaaaaaaaagaggaaattgagagaaaggcatttacttttttatgaatttgtgttgtgtgagagacaaaagagtgactgaccaagtttttaagaatttatgaaaaagtgtttgcttctttttctctgagaagaagataaagtagttagtcttcgaattttgctttttcaatgcctttaaaggtgaagtctttttttaactaattagattaactgttccctcgcttaatcttatatattggattctgtttgttgttaggatatcatatatatttattttctaatattttttatctgttagataattattgagaagattatgtgttttgttaaaaaaaattagttacgtatatagttaattatatatttttttaaatattactatgctgcagaatttttaagttcataattgtaattaaattatattacttttatgtctaccactaacacatgctttcaagtttaaacttggttatgacagtactgagatcaccagtacaaaccattaacttataaattttgtttgaaaatcatctacttataggattaaacttatacatttatttagatatgaactgtgtgtagagaacttatatgtatcagcaataatcttgcaaatcttaatatttaattggacaaatctaaatgattaatgttaatggaataagtcacacgaagtttccacgtgaatgaaagtatttatcaaaaattaataatttctatatattttgtatcgttgacaaatccagatatgatctaatactgtaattttttttatgaatgatgtaatctattagatgcacgaagtttctgcaaatcccaaatggatatatacacataggtatgtcaattaatatagagaataatgacgcgacataggatgcttctgagttctgacatattatttcgagatcaatcaaactcaaaagacatacagcttgtctcacacatgtgtgagattttgcttattattgtgcatgcatcatcaatcatttataaattggtcggatacattcaacaagttacctcatcgacatctaaagctaaaacccacaaacattatttccactccaagaaagagagactataaatcttttgtattactttagtagcaaaagaaaaaagaaaaaaaaaatcctttgtattatagtccatgtttaaagttttctacactttggcgttagcttgtccttttccaacttaaaaaagtaaacgaatatcatatcattttcttaaacaacattcgaaccatttaatggaaagtaattctttaaagttctttttgttgttagctttgtccctgacctatacaacaggagatcaagctttgccgacacgaaatcaattagaaaatcagcaaaagttagagagaggaggggagcgtgaagcttcttatctttttatacaagaaaactgaatcagtgttagtttcttcagtaccttgaacatgtcgtgtggctaatacatatggaacccttacccacgtgtgatatcttcttatgctccaagtttagtgcagttacaaatcaactagccgggaaataggaaagaaagagattaaatcaaaactttatttgtttcttactgtttaccacatgccaaatgggataaaatggaatgatccaagtttttgtgtgttctgttttaggcactcatcaagaataaaataacttcttgttttgctatctaatgacgtctgttacacattcttcctccaacttcctgctggagaaatcaccaataaagatacacaagaatgctataaaagctacaacatgcattaccacttgcatgtttcagtgttactgctgaagtttcagaacaggaaaagcaatgacgtctcttatactcgcggagttcgtcaacagcatcaccagcctgtcaattccaagcccctaagagagacaaagaaacaatgatagtgaaccaacataagtacttgagcatagtaccggtcatgttatagacttgagtgtgcaaccattaactaatgaaaatactattactctaattgtatagaagaaagaaaatagacataagtaccattcccgaagccggaggcattccgtattccaaggcagtgagaaagtcttcgtcaagggtcacttcgtatgactcatcatcatcatcatctttctttgcgtttggttcaggagattcccgaacagcctctgctctctttgcgttatgctgccttacttgctcttccaaccgtgtcctctaccatattttaaacaaatcactaatcttttatgatccagtctacacaaagataactaaaaagcagatcgttcactatgtagaatgttattcatcaagacacaaaattggaggaatgtggaaggttgcattatcccattacctggtccacgggatcagtcaattcagagaatgcgtttgccatttcacgaccacagatgaacagctcaaatctttcagtcaaaccggcattgctgttgcagaaaaaaaaaaactatttacacttggtaaagttttcttaacatacgatgtatgatctagaagatggtgacagtgttggggaaaaaggtaaaaatcgagtcaatgctaggaaacagagttctagaaacaactctacccgcgatgtggcttggccaaaggagatatctcgattgggtagtccaagacaaatgtgggctgcacaagctttggctctacaacaacttcaaaaatctgaaaatacaaattgatttcagcacataaattcatagagttgatagtaaagtgtcaaccgaagaagcttcacctcattaagaagatggcctagggaagagcaagctctaattccagatttgtccttgggctcaagcacgtcctggagtgcgagcagaactgtgtctttggcatttccgagatcttcccctagctcactgaaattgattcctgttatctctttaacgagattatgcatggtttctcttctccaaggccgctcaaggcagatctctgttccctgcacagagcaatcacagctcaataactcaaaaattacaaccaacatagaatttagataagtttatctctacacactagccgtgacgtcgagcatattcacctggtaatcaattgttagcttcccattaactgccattgaacattgagtgacaattaattctgccatgtccatcatgctatggtagtccgaataagcttcatacatctaaacaacgctaaaagtgttatagatcaggtaaccattaaagagtatggaagcccaagtgatgcaaatgattgagcagaggcatatcttgaactacctcgatggtcgtgaattcaggattgtgacgtgttgaaatgccttcgtttctaaatatacgaccaatttcatacactttctcaaacccaccaacctgtgatcacaaagtggattttattcagagaaaaacatttaccttccaatacacttctaaggtaaattctcagccaaaagaaagataagaagaacggcagaaatgccaatatattatgaaaatagaagatgattctcactagcattctcttcaagtgaagctcagttgcaatcctcaggtagagatccctcccaagtgagttatgaaacgttacaaaaggtcttgcttcagctccaccagctgctccctagttttcacaacttcatgaaaccgactcctatacattcaatattaagtggctatttgagaatgaaggtggccacaaacctgaagaactggagtttcaacctccaaatatccaaaagactcaactgtcttgcgtatctctgaaacgatctactacaacaaaacagaagaagagcattgttgatttgttgtgaaacaaaaataactctaacaatcttatatgagtgtcactgaaagatgtaaatctaactctaactagcattttgtttagggatcatgcacaaaagaaactagatgctcaaatgggagtttaaagattttgataacctacttttgcccttctccggaacacatcagccacttcaggattagcaatcatatcaacatacctagtaagaacaacagcaagcggaacacaaataaaacttatgagctttctttaagaattagaaacagggatttacatagacagaagatagagctcaccgttggcggtaacgtttatcaatatcagttagaccatgatatttgtctggaagtggaaggagagactttgtgagaattgaaaaagaattcacacatatagaaagctcccctggaaaattagagaacaaacagttacaaaacaaaccccaaaaaaaaaagattctccatcgagtataatcatcttagtcaagctcacctttctcagtcctcttcatcgagccactagcacccaaaatatcaccaatgtcgataaattgcttcaactgttcaaactgatcatctgaaagtctttccttctcacagtaaagctgcaaagatcagcagatgaaaacaaaaggggaaataaacgattgtatcgacaaggaaatgtcacagccagctactaatgaagtgtgatcaaagccatctaaatgatctaaacaaaatagaacaagactgaaacctgaatagttccagagtcatccctgagagtcaagaatgcaagttttccaaaggctctacgagcaacgactctaccagctatagaaacacaatcaatctcattgtctgattcttcaccgttagctaaatgcttatatatctcttgaagctgatttgcactgtgggatttttcccacttataagcataaggttcaagaccttggcctctcaattcttcaacctatgaaccaaaaacattgatcagcacccaacatatttccaaagggaaatttaagtaaagctcacattttgaaagtaaaaatcaaacctttttaaggcgaatggagcggatagcttcacgatcagaggtggaattggaagatgacgcagaccggcgattgcggccggagggtttagaagtttcagccgtcgtggcactggaagaagaagaagaagctgcggaggcacatcgtagcgcaggtgataagtggtaggatcttcgtccatatattgtggtggcgagacgtgtagaagaagaggatagacggagtaattgtttcagtggcgtcgccgttagactccataccttaagtgcctccatctctctatctctctctgtttctcagagtcgtgctgctgtggataggtggaagaagaatgcaagtgggtttgggctttgcatttttggaccctaaaccctaaacattttgggcttctgattttctgaaatttataagtcggttcttactctttttttcttataatagtagtcagtttttgactttctttaagagaagtgagattgtgagaaacatgattttcttatatacgattgcttacagaaataatgttcaaaatattattatttttgttaatatagtatccaatagttattataaaaaaaaatatggacatttttatataagtaaatatttaagaaaaaaaaacatttagagagacaaatgtattaaatgttttgagcttttggctaatacttttcatttttgtaaatttttaaataaaaatattatatacactaactatttttcttttctttgtaattctttttcagacttgtgtgatccattcaacggatcaaattctctctataaattgtcccaaaaagcatggaggcaaaaacttaaatgatatcataggctttacgacttgcaaagtcaacgacaaaagtcaaaaagtcaaaaccataaaccagttccgtgaagaagaaggaaaagagagaatttgttggctatggtttttagcagctcggtgatggcgacggtggcgaaattttccaccgacaagtggcagcggatgaggagggttccgtcgtcggagttgatgaatacgcaacagcttatggaggtggcttgttgcctccctcttagtcatctctttatctgtctttgggagtttctgtgtttctccgtatccgattatgattctgatgatgattatgattatgttgatgatgatgatgatgatgatgatgttgatgatgacgatgtggttgcttttgatcataatagtaacggcgattttgatgatcatgggtcttcttccttggattttgatgactattaccattactcggactccgactaataaatagctgacctcttcttttttctagtttctaattcttttgggattattgttgtctttaggtgtattgtcctaattattaatctggtattcttggatactgtaaatttactcttggatattcaataacataatcagacattacgaattataacatatcctttatccattgactgtatgtttaaatttccatctttgaacaaaagtaacttgtggtgatcttaatgttctgttatgcagaagtacatcttcattgtccaaattgttaattacttctcttgtttttgtggttggactacacatatcaagaccctcaattcttatgtgtgtagcttctggagacttgctgaaacagtttttgcctcttttgctacttcaaagcttggatctgctgagtataggttgtgatcacaaatcagttggtttatgatttgtcaatatatatcagcttctagattttatttggtggacactgggtttggtctctctatttaaaaactaaaacagccagcataagtcatgttgattttctttatagataaattctctcatatgtttttttttgtttcattggtttggatgtgtagtgaatctactgatgtcgctatagttacgttgtccatgacatatgaagaagtcagaaattggatgaaaggcctctatctatgtaatgattcaactaagaacgaataaaatgaaaaagtcacatgtgatatgtatcaccccgaagacaatatgcatacatctattcacacgatcaggtcaaggatacattagtaccgtgtctatatatataattatttatacagccattgacgaacgaatcattttgtactctccaacaatccacccaattaactcttggattagaaacgttcaaaatcacataaccaccgcgatttttatgtgacttccacatattttgaaatacttaagaattttggtatgcacaccaagagattatgaagaagatattcctccattattcaaatttaacatttattttattcaaaacaaatttaacatttatttggtatgaatcatatcatatgtgatgtgttatcatcgtatattcataagtttgtacatgaagagggattttcaaaaagattctcattatgttaccaataatggagtaacattaaacaaaaaataatatagatgatacgataagaaaagcttgtggctccacctcctttcgtatggtcataaccatcatatcactattatcatacttacttttctccatgcctaaatttatatcgctccataaaatcaaatcttttacttgcttttctccctcctttaatcataccctatcacaacgtggctttttattgcaattatataagttttggatagcctttcactttaccgaaattccggactagtcttagcccatgtgtagtagtcgaatttagataagtcatgtagacacatattcggggatagtttcattgttctaactatatgagaaaagaaaagaaatagtgttttgcctaataaatttgattacaaagttcggttctctaacttacatcccaaaatcacaaataaagacgaatccattagaaccaaaagatagctacaccattgcaaatgcataacttctccccaaacttcctgatttaccgatttgtttctacttacatgaatgttttggagtaaaactaaagtagctctgagctaaaccgacttgaatttaaacttcaactctacaattcccgacttcggccgtaactaccggcacatacatttttacttagatttcggtgatacaccacacacacacattttgtcggcgtatccaaaaaactccaagtattatattatgttttctctctcttaatttcaaacatcttccttgtcatttgtcaatacgatgctacacgttaataattcttctcaaagacatgcccaacatgttttcataaatcatgcatgtacttccacgtaattatattagatgttaatgcgacaccgtgtgatgtaataattgcatacataatgtatgtttgcggtgttttaacatgtatatgaatctaactacgtagccttccaatgctgctaatcaccaatcatattgctatctaatttaattggttcattatttatttataagtctcttatactaataaaacgttttgatggaagttaaacttttattattgagcaactgatggaagttaaactaagaatgtcaatttatgaaaacaaagcatcactgcaaaaattgtatgaacaaaaggaccaataaatctccacaatcatttatgattttgccctaaagagatactataataattaggtagagagagagagagagaaactcggctttctttaagacaactatatgggttccaactaatttcacattggattctacgattttatgaccgttcgctagacttccatttcccattgttcttgttcatgttcagtggccataacctgacacgtgtacggtggaagatgcaacttcacgcacgtgtgtgagctttgcctaaacacagacagattacgtgcgatctctcgtgtgcgatgctactagagtagtagttactagctgtcacatatacaaaaaagcgtggctcatccatggttggctgacgtggatttaacgacggtactcaagattttaacgcctcaccgtttaagttccccattcaaagaagacaaaaacatccttgttcccaagggggaaaataacatttttgctttcatcgagaggggtaaaacagggaaatttgggagattaatgtggaagagatccccaaggttgtcttcaaaccataaacaccacgtgacagagagaccaattatactcaaaaaggtaaagaccaatttgaaaaacattacaattttaataatgctcatagactcatagttaaagattacaagaaccaactaactaattgacattatcattatcaaaataaaaaccacctaattgcgaatttatagttttacagtgggattggtaagacgtttctaatatgctttcttttcaactttagaccttcttctctcatttctcacaaagcaaatcaaaagtaaactataaattgctaatcatgcatattagtatataattaactaactaaaaaagggaatggggtggggccattggagcgagaaagtgagcaaaaaaaagagagagcctccactatctctcaaagcagaggaagagagagagagagacagagacagagacagattgagagaaagtttggattttgatatgtgtggttggatttttgttacaaggcaaaaccagacccaccttcaaacttgtccccacgaactacattatcattgttttgttcgaacttcttcttcttctcgttagggttttctttcattggctctgagctactctttattgcttaggccttagtgtgtgtgtgtgaatcttctcagcgaaagccaagttcttttctttgttggtgtttctgggtttattgcgacaatgggagctgagcattttagcctggtgaagttcaatagaggtttctttgtgtgtttatgggtgatgctctcgctatcttgcgcagcagcgagctatggctcttcaaggcaaaagtttgaggtgaagaagcatttgaataggctcaacaaacctcctgttaagactattcaggttctaactctctttcttctttactactttgtgttttctcgttttgagtttgatgggaaactgatgatttctgctctctctcctgttactttttgtatgttaattggcacagtaatgaagttttcactcattcttagtctacaccagtgttttagtaactgttcatagttaattctggataaatcagtagtcctgaagtttttgaattagtgagttcttatgttcttctttgtggttaaacagagtccagatggagatataatcgactgtattcctatttcaaagcagccagcttttgaccaccccttcctcaaagaccacaagattcaggttcaaagaaataaaaaaatactaatgatttagtactttcttgatatgtttggttctaaatctggttttttggtttcttggtgtgttcagatgaggcctagttaccacccagaagggctctttgatgacaataaggtatctgctgaaccaaaggggaaagaaactcatatccctcagttgtggcaccggtatggcaaatgtactgaaggaaccattcccatgaggaggacaagggaggatgatgtgttgagagcaagttcagttaaaagatatggcaagaagaagcataggtctgttcctattcctaaatctgcggaacccgacctcatcaaccaaaatggtcatcaagtgagggatatcaagaaatgcttcattttttaattacttttgtagttgctttgttaagtatgagtcattttgatctaagctttggtttcttgaactcttcaatgagattagcacgccatagcttatgtggaaggagataagtactacggagctaaggcgactttgaatgtgtgggagccaaagatacagaacacaaacgaattcagcttgtcgcagatatggcttttggggggttcctttggacaagatcttaacagtattgaagctggctggcaggtaagacattttcatcatttggagatgtaaagatgacttgtgcaatttattgtgtgttttgattgtgtggtgcttacaacaggtgagtccggatctatatggagacaataacacaagactcttcacttactggactgtaagattttaaaactccctttgaattgaatatttgtggtgtatgtgtaatatagcatgatgttcttacgttgctcaatctttcttcttccagagtgatgcctatcaagctaccggttgctacaatcttctttgctcaggtttcattcaaatcaacagtgacatagcaatgggagcaagcatctcaccagtctctggataccgcaattcccagtatgatatcagtattctaatctggaaggtacttgtgtcagaactgaaatcttttgtttctctaaagaaaaactgaaaccttgaggctgaatgtgttatgttgaacatgtcataggatccaaaggagggacattggtggatgcaatttgggaatgggtatgttttggggtactggccatcatttctgttctcctacctaacagaaagtgcatcgatgatcgaatggggaggagaagttgtgaactcacagtcagaaggccaccacacttggacacagatgggaagtggtcactttccagaagaaggtttcagtaaagcaagttactttcggaacattcaagtcgtagatggatccaacaacctcaaagcaccaaaaggacttggtacattcaccgagaagtccaactgttatgatgttcaaacgggaagcaatgatgactggggacattacttctactacggtggtcccggtaagaacaagaactgcccataaacccgggcatgtgtagtgtttactcagcttgtatctctctttcagtcttgtgaatttcctccttcttgggtagtattaggctgtagtaagaaagtgaagtagtgatatgtatgtgtaagctctctcagtgatgggaagttttgtaggtttgtgtggttttaacttaatgataaggtgtttgtttgtagtagtagtctccatgtaactagatgggggaaaagtaggtgtgactttaagtttcttaaaagctcaaagaaactttagcccttagtatcagtgtatcacattgatgtctcctttgtatgtctcctctttgatcactcattccttcaccagattattaaatcgcctcttaatgctttgtgttgcttccaaatcctctttgtctcgcaacattgaaagacaaaagcaccactggagatttaaggttaaatagcaagttcactttccacattatcatttggtctctatttacgttggatgaatattaacaatctcaactcattgacagaaacataactcaaaaattcagtcacttaagcctccaccgtaacagaacccaattttccaacctgaggattaatggacggtgttggttttcacaaatcatatgggctaagatttatttataaatgggcttacaaaagcacaatgttatgttatcctccaaattcgggcctcttaacacttgtacacaactacacatgatatgaatacaagcatatcttcgttcacatttattgcatcattgcatatgtgtacacaaatagtgaagggcaaatttatcctcgatcgtggtccacgaataacgcggacatgtaaactaaaacttgcatagtagatgttgtcaaaagaaaatatccaaaatttggtactcgtttgatgatttataaacattactttttctaaaatttaactttccaggtaatgctgcaaattaatttcttctggtatagtgtatatgagatcacgttagatatttttcagccacatcgatctgaaatatttatacaacttttcagcaaattatatatatatatatatatattttattttttttaaatctataatattatctcatttacagaaatttttggtgataaagaaaatgcttgacagtagcatactagttttttattttattttttggtttaacagtagcaaactactttccatataattatttctcaaaatgtaaaaaggaacataacaataaagttcacttagcaaaaatacaaaatcaaatggaagatgttttcaaagaatataagatagtcgaaaatgcaattaatttcaaattccaacaacgttacattttcaaattaaaaaagaaagtgaacgttaacattgttaaagtttgtcatcatcatgcactggttgttaaactgttataatttataagaagaaaatgaaagagacttaaaaaaaaaaaaaaaaaaaaaaatcttgtaaaaaatttaatcaaagaaaaatttcgaggtcacttcttctattcaaactaaaaatacaactatgtaaatatatcaatgtattaatataaatttcatgaatattataaagtatataaatataaaaagcaaaatgaaaagaaaggagctattcattttgttttggaacttggaaaacaacaacaattagtttcattggttggggccacatttgtagtgaaaccccatgcttataataatgcatgttttggtattcaagctttccggctagtttctttactgtttaatgaaaacaaatatataagccgttgcaatattgaatactaatgattttaagcaaataaatggccgacatataaactatagaaaaattaacagatgtgaaaaaggatcttgggaaaggaggtggttggtcattttcatagtttggtatgacatgaaaatgtgaacgttggagaaaagcattaacattaatttcaactaaaccctaaaggctaaaacggcgaattgatcctttagttacgcaatcaactttagaactacaaatccacaaaggaattaaaaacaaaagcaaaaaattaaaaccaagtccttgaatccctgaatttcatataaaactaggtattgagtgttcataccctattctttagattcacgaatcatgagtcaacataaggataccaaatcttataaaactactattttccaggaaaagaaattatttttaaacgtggagatcatacatatataaagctcgatacaatgtatacgaaaggttatagaagtattaaaaaatggaacacgcattgcataatttattttgaacgtagactttaccatctgtatttttaaccatattaggagaaaaaaaaaattgaatcttgaatgtcaaagacatttctagaatctaaaaccccactgaatagcaaaacccatacgaaggctacacgcaatttacgtatattcaaagcaatactttcgtctaatctaccgtatgaattatattagaacaagatgtcaatactaaagctacaattagaaaaaaaaagaataaaacattttagtaatgaatgagtggtgaggttgtaaagagagaacagagtggttgagaaagacaacaatgtagtttgggccaagagacagccaatctctgccagctgtttaaactatttggacaacctgttttgtttcattcttattcaagaataacatccaatttccaatcacattttccatatcaacaaatgtttttgaaaaattattcattccctaagtgctttgtttagttggatccttaaatattctgaagctactcatcaataattcaatatcatgatgcaattcggtagctaattcaccctacaatttaattagaacaaatgtatcaatgtagtgcaaaaaaaaaaaaaaaaacagattttaggtattttcgttcctataatctcattaacaccagttgaaattccattattttcaaaagtaattgcatttttaaaaatttaaatagaaaaagttcattaaaatacatgatattaaccgtttaaattaaaagttttttgagtttttttttttaatatgtgtgaaaacacttcaaaaaggacattagatttgaaacagaaatatatctttataaagaaatggtttctgtttcttgttttttatcttctgtattattgtgctgtaattcggatgccttttcctttactaaaaagttaagtaaattactaagcgaaatattttatagagacgtctctggaaaaaacattcccaaaattggcttataaatactttcaaaaccacaaggccacaactcatcattcgcaccaaagagaagaacaaaacatcatcatatattctattgactagattaatttcttctaagtgcaaaagaggagaaatggagtcaatgaagatgaagctcatagtggtgttgatggtggctattgtggctttctccgccgtaggaaacgtggctgcgcagacagaggctccggctccaagtcctacttccgatgctgctatgtttgtcccggcattgtttgcatctgttgctgctttggcatcagggtttctcttctaaaccaatctccacatttcattgagttaggttctaaattgttttgccttttactttcgtttatgtcttatggcatgagctttttgttatttgtttctaatatttggactactatgtgttgtgtgtatatgattcataattaatactatatttatggattgatttctttctatcaatgtttttccgagtcttggttaatctacagtaaccataagaaaaacatcacatgcaagatatctaatctaagtccacacaaacgatgtaaacctcacatcttcgaggggtatgatcaatgatgcgatgagctgtgaaattttggaaggttgtgatatctttgaaagatgtgtggtaattatcatgatgatgatgctatggcttcgagattttctcaataaaattctagtgaaactacttttcactaaaaataaaacaaataaaagtaaaactgtgggcacaacaataaagctccaaaatgagacaagaaggatatgaggaatatattgcacttgcatcaaacatgcttcaaaactcaaaaggatcaaatatattcataaagcattccattttacattgtaaaggctagagaatttagtcatagaaaaaattcatagccaataatgtttttggtatagttagagttgaaacatagcttgaatatcggtgccaagggcctatgagattaactttacactagctaagtttcagaccaaccgaacacaaaaccacccactaatcaagtaagagaataaacaaaaggttttaatatttggagcatgggatgctatcagacaacaacatgttaagccatgtgagatgcatagaggaaaagtggtcagcagcaagaatgggcccataaccttagcttcgttttcctccctctctatttgaggaagcgatcgaaaagcttttgtaagtggccgccagttttattttttagtttgattgattcctttttatttctagaaagttcactaacaaaaatttaaattaataaaaacttgttggcatgcgaatcaaaagaacaatggatgatgacacacaatcttgatggaaaccaatccctttaagacaacgctaaagattgaatacaacttttcttttgattggctgttgtatatataactttgcacataagatattgagaacagctctctaccttctaggcctcaattctttttttttcttactgaaatgcgaatcctggtctctgtccaatgaaaatggtaatgcagaagcaaaagaacaataaggcacaaaacaatatgagaaaatgggttgattctgaataatatccgttagtttgactctgaattttgcatattttcttaagtttaggtatgaagttcaaataaagatgcggtttgggtatgaaaataccttacaaattttcattgtcctcttggtaatgcagaagcaagaatacactgaaaaatgacgtcgttttgaacacgtcattatccacgtgtttgctgactcagaatttttacggtgttgactaacatccgttaatttgactctaaattttgcatattttcttaagtttaggtatgaaattcaaataaaaatgcggtttgggtatacaaataccttacaaattagtttgggtataaaaatacattacgaaaaaaatacagaaaatactattttcccaaaaaaaaatagtccgtaacagcgtggtgggtaatctctcaggtattataggagacatcaaacaataatgggccaacacaaaaggcccaaggcccatactaaagagtcaacgacatgaaaacctagaacgagacttataaataaggtgtgttcctctcgaaccctaattagtcgtcacctttcttcttccttcgattcagttgattttctcaaaagtgtttttttctttcattttttcggaacgatgatggtgcagtgatgatgggtataaatctcgttaatctgaatttttgttaatgaagatacttacttcccaaccattcattaatatctgagcaccttcgtctttattcagttttatgtttttttgatgatcgcacatagttcttcttcgaagcctttagattcgctctaaaagtggttttgaggattttatttgtgcgtaaagtaaatgatcctatctgcttgagtaatctctgttatgtgttaaccatagagttatgctccaatgttataggatcacatttattttatgattcaaaaactttgctaggattcatataatcaatggctagtgtttctttgaaaacgagattgaactgaattggactataacaatacgaatgagcttgcaatgggacttaattaaggcaccaatgaatttggagatgcgaaattttggattgatgaacaaaaactgtcactgacaatcacagattccgactcatgaattaaggaaccgatgattataaatttataacagtctcaattaagaatcgatcacataaatacaactcccctaaagaaggctagcaagagcagtatatatattacaaaaaccacaagtgttggcatctctcgagggactaaaaacacaagagaagccacaactaaacaattacaaatcttttaagtttcacattttgtaaatggaagggaagaagaacaggcactttcttcttggaaaaatgggagtaaatgtacagtcccccaagggatattatcgttttggtggactcacaatattgtgttgatgtgaagtgctttgaggagagatgttgccatttgtttcaccagaacttggcctcctgaacgttgtccatctcgtcgttcttctattagattctgcagtttttgaggaaggtcgttctctacgatcagctgtttcggccgtggatgatgttcataaacagcctgttgtttcaatgatccccaaaaccaaacagtcaaacactagcaaaaaacttattagataatatttggctatagaatgattcattaccttgatgagttttaggaggttaagtcgagcaatcgcatcttgatggtctagccttgaaataagcagtggagtcaatccatttacagctaatgtcttattgatccgatatgatttcctagattcaagaatgagacaggattagactaaagaagcggcaacttcacttctacttctaagtttagctgtaattgtctcgtattacaacgctttggaaagatagatattagaaaggggagagatacatacgtgataatctttaagaatggctccaatatgtgcacgaagtgtctctctgggcagctctggaagaagtcaactaatttctgaattgcatcttgcttgagcaatgcctgctctaccttgcggttgtcattgtcttgcgccaagcaaacagcgattgaatctaaggctatcacggaccagtattcatcatcgagtaaactcaggtaaacatcaagaccaccgtgggcccttaactgttctcttgaatttcgagatgcatgagccatatcgcagagtagtggcaatgcatactgtttcagaggagaatctgacataatgaaaagcatcagatgcggaatgattccgttttcagccgcttgttcctgcctcctcttgtttatcttgcacaggttgaatagtgcactaagcacctacataaataaacgtttaagaaattttaaacttcaatatttcagataccatactggacaagaggttgtaaccaacaagccaatgatatctatatgaaagtcaagaaggtaacctcatgatggatctgataaacaagatgcccatccttaagctcaaggttggggatcaaatgcttaattgcatctgcacgctgcagattctccaagcaatttggatcagttgataaatgatttgtgcactccagtatctggaaatgaaaggcattgtaagcatgcgtcctgaagatcctctagaagaaacatccaagctcggccagagagaaataaagaaacttctgagtatatgcaagtacctttaacagaataggaggttctacacggttgaacatctgaaaaagacgactgagtaagctttggctgcacatatatgactttactgtcgtatcagctcgagcaaattcaagaagcaggtcagcaactttctccaagtattcccttgcaacatctgcactcagcgtagagaccatatgggcaagtaaaccagatgatgtggcacttccaggtctagcgtttagaacacccgaacctgacagtactccagatgctgtctgagatgcaatcccagatgttgaagcaactccttcaatagccagaaccttctttgtcattgttttactgggatatctagtcgtagtatcaagacttccattttcctttccacgtccagagacctctgatgaaacaatgtaatgataaggtgtaaacaaaaaaatcatatatgaacactcttgctaaacatacaactttaaaacctacctgcaaattcagccatcagaaaatctaggtctccgttgtttttcttttcatttgatccatgcaaaagaggaagtctactttcatgtctctctatgccagtgatatgcttaacataatccagttgaccagaataatgtcttgaagggggttctttatccaacaagctaagcaaaggtcgaacttgttctgtctgagtaacaggaaaaccattagaggcgccctctgccagcttctgaagcttatctgtcgatgtcctattggcggaaagagatattcgatgctgttgtctaacatcttctgtgccagaggttgaggcatctggtgcaacactgcttactctaggcttatcaccatctgggtgcaaagcatctggttgatggacatctgatctttgagaatttgaggttgaagcatgagaaggctcttcaccacccccatgcctagttttcaatacatcaggctgatcaatcatactgagtgaagaagtctcattttgaccaaaaataggattgttagggtcaagttgaccagagcgcactcgtggagcttgaccatccaggccccctgatatagaagccagccgggttgcctcattcaagctataaagagtgttgattagcctcagaagaattccattctttgcagctatacggcagaaatcatttcttggggtggatcttttgagtttaaatacctgccacatcccatcaatagccaagtgaaccatctccctgaacagaaaagcccagattagtaagatctagtaccacatagagctaaaggaaccagaattgattaaagagagaagagctaattaagataattgtcagctaacgttaaaagtatctgcggttttcaattgaacaaatacaccacatacattaacttctgcacttaatatgttcaatagtccagacaccatatgaagatgataaacagtacccacctgtatttggcataatctgcttcaagaaatcccaccaaaacgggtattccacggcaagctatgaacatttgcaacgtcaaggggctgccaagaagctaccatatcaactttatgacttacagaaagaaaaaagaagcagcaaaattataaatatttgatgactaaccttgactgacaaagctgctgcaagaagtaagctgcttctttacgaatttcgcgagaacgatccctctcaggaccagcaaaactcattacaacaggaatctgccaattcacttggaataatcaattttcatgggttattttgccacatcaatgaaaacacaaacttgactatttgaaaacaccatgaaaaaatgagtgttgagataacgaaaccatgataaactatctacgtttttccccaaaaatggtgttagctttccaaattgaagtttgaaatagaaattggagacacgcctttgataaaacaaattggccatattctccggactataccaatgatcccctgagtcagcaagcatatggaaggtgaaacttacaaggccaacaagacaagcattttcctggaagtcagtgttatctttaataatttcgtttatcagctgcagcacagcacatattacctgaaaacaccataaaatattcacaaacacaagccagtcagtattcacagcaaactaataactacttatcatgaaggacaacaacaaaaatcctgctagattacaaaagaagcatactcgagatttaggaatatcgagtagatccattagaggcaggaaaccatgctgtgtcacaaatactactttctgctcaggtctctgacgaaacatggcaacaagtttctgacaagaagatactattgcatcttctgactcatctggcctcaaggagctgaccagtctgctgaactcgactgcctacaaaaacttaaccaataaatactaagatttggaatcactaaaaacagtgttgagaagtaacaattctcttttcaaaacttgattaacattatcattctcagaggatgaagtgaatcggtcaagtagcattagcaacatataaaacgccgaaagattgccaaaacaataggatatagatttgcagaatacctgcagaggaaaaagattctccgcgggcactttttcatcaaatacctgagaaacaagatatggaaatattatagcagtatactacttgaaatatcaaacgtccaaacttgagacagaacataccaagccatcaatgtcaataacatcatctttcaaaacacccatcatcaagcgaaaaagatcaccaccatcatttgagtgccctgtttccccctccatttgcttctgagcaattgtagccctcaattttgtagccagatcattctttccaccatctgcaacaggagaatcaccttggttgacatttgacgtaggcatggatgttgaggcttcatttggttttccctcagacactttatccaatgggtgaaataaatcatgcaaagaagcatccccaggaggatcactaaacctagccagttcattcccactaacactagatggagtcttcacagccttttaagagagaaataccaatcaaaacaaatctagtcagtttacaggtttccaactcagtaaatagagcactaggtctgaacacgtcattcaacaaagaaagggaaagtattgcagtaagaacataatcttgtaaaaaagcaagaccaaggcccaacaacaaacaaaaccagtctcactatacaagcctctatgcatgtaggtgtgaaatttgcaaaacaaataaagaagtatataatacagtacaagtcggtgacctgttttgtttttatcggtaaggaacttattaatcaacttaacacaaaagcacgactcgtgatttaccatattatctaagaaaatgctaggacagtaatgacgtaacagcacaactaacctttcgaatcccacgttcttcacctttgcggccaaaactatgtgatgtctggtccactgggatggataattctttgccaacgtgctttattgctgaagtattttttctagcttcagaagtttccgttacaagattttcaggtgtttcaccacgttcagatttcccatgaaagtctgatacatcttgaggtgtccccttagcatccgaagatttctcatggatcgacagtgtaggaacttgatctgacataatatcatcttctgaattatctgttccttcttcaccaagatcactgggtgtcgactgatctttctcagacctaaaactcgacacccctaccagaggtaatttgcttttcgagtcctggacaagaaaagtactatcattagctttagaaagttcatctctagctttaatgcgttctcctgttcatttatcaactctttatctgcatattcaaaacattgaatgatggtaaattagagccgaggattgagtcaggaatcttacagtttttgatattcccacattttctcctgaaaggctttctgctgcatcttgactaccttcatcatccttctctgaacttgcagtggcttccttcatatatctgcaaaggatgaagtacccaaggacattacaggttcagtggatgcaaggaacactattgcgtgttctttaagatgggatatataatacattttgtaatattcttccaaaaaataaagttaaatacataggttctcacttgatggtgccactatgccgaagtgatgactgcaaagctcgtctagagtttcgtatccaagggtgagagagcagtgtctttgcatcaggcctctgcctggaatcctgtaaaacacaagatacaaatcagatgtacatactggatattaaataaatcattgtctaggttctggtacagaggtaggtgaataaaccctatagcagaaaattataccttcttgaagcactgtcgtagaaagtccgtaatatctggagaaagactatcaggaataggagggttgtcatcctgaaacgaaaccataagaaatagtttgtcacttctggctaacagcttttgcatttttcaggagagaagtgtttacgacatggagaaggggacggaagagacacctaaatttgattgacttaaatgcaaactcataaaatgttgtcaaatacctgaacaatacgaaagagggctggcatgggttgcagatcatagtaaggaggtacacatgtcagaagttcgataacagtgcatccaacgctccaaatgtcagaagcagcacaaactcctgacatttcaataacctgaaacagaagttgggcttctgtcaatacgtacataatcaggtaaaagttctctaaaggagcaaacaaaagcatctttcaaacaacaacaaatattgtttcaaaactgcgtacgaaagctatacagaatatggagatggaaaatatataatcaaaggtgtacctcaggagccatccagtaaggagttccaaccaccgagtgagtattaacatcagcctcgttaagtttagtggcaactccaaagtcagcaagcttcacaagaccctgaagtgtgatgtagtcaagtatctttctaaggaaaaagcctagaagaatcttatccagcagatctcaaaacaaaaacacactgaagacatgtctgagaatagataatatagaaaacacacctcctttgtcgtcaaaatatttgcacccttaatatcacggtgtataacaccctgctcatgcagatataccaaaccttccaagacctgtattcactagttagtacacaatgcataacgaaacttaactcaacttgaaagatgtatacagacctgagcaatgtaaacagccaccaaagattctgggaaaggtccaaatttatttggtttaataatgtttgcaagagagccattctcaacgtacctgcaaacacataattgaacttgagtttcccgtccatagtccagagtggaccaaaataaacaaaaaaagctacttactccaaaataatgtgaaggtgagtctttgtcttcgacgacccaagatacttcacaatgtttttatggttcaagttctgcaatgaaatattatctcagaatacatagagaagaactgcatcttaaccagcatcataaccattcatgagaagaagccaaaattcagaaggtgattgatttgacataaacttagtatcaggatcccaactctgtaaacagtacaaaattcagaaaactaccttcaaaagatcaatttcttgctggagaaattcatcccaacagcacaagaatcatccacatgtaaaaaccaggattagtcagcatagcagtggtaaggaacaaataaggaagatagatataaggaaaataacaaaccataatggtgttaagatcctcttgaacaatattttccaaagagacttgtttaatggccacaaagtcaccattctccaagtctaatcctttataaactcgaccataagctcctttaccaatttcatctcccagcatctaccctcaacatatcaaggatcaaccattgaaattaatcaaaattgaagagaaaacagcaaaaagcaccagacttaagcttaaaatcaataaaattactaaagctaaaatcttaaggagacccattagaaaacccaaatcccagaaattacggagaagaagaaagctcacatatttgttgtcgagagtctttgatttgtgaaactgagatgacgtcatttgccgcgccatctcttctcgtttcttcttcctccgtcagcagaacaaaaaaaatgcagcgaacagaacacaattgctcctcaaggaaacagaatccaataagaattagggttttaattttttgagaaaattgaaagaaaagatttcgagattggtggagttgaaagatcagagatgccagctctattacagtagtgaaaatacatgaccaaattttaataaaatcaaaattaagaaaaaggaaagaacaaaacaaaagttttgggttagaaattgactaactgtaataaaggagaggtaattatgttaatttctcatgcgcctgtattcttctttattatgtggcccatactttttatttatttacgatttcacccctttatttcccgatttgtaaaaatactagcattttgtccaattactgattaatcatctatttaaaaggtggtccaaatatttaatgctttttcactggtgtcaattttaattaaggtggttagtattcattaatgtattatcaaccattttgttataactttctcaattgtaggagctggtataatcggatgtttatagccaatcaaattataattcatagtagtatcaaatctttaatataaataactagaagcaactaacctatgcattgtaataacattagccatttggatttcaatatgattgttactgcaaaatctttaaaatgaaaggaaaaaaaaaccacgcaggtgaaataaaaaccaaatgaagattattaccaaacgccgaagctagcgcgtgagagaaaaggtcggtaggttcattggtaacatcagcagactaatggagagagagaaactttgagaaaagaaaaaaacaaccaatcgaagaactcatagagatcacgaaaccctagtggaaagagagaaagctttgttgaagacggcggagatgatgtcatgtggtgggaagaagccagtgtctaagaaaacaacgccgtgttgcacgaagatggggatgaagagaggaccatggacggtggaggaagacgagattcttgtgagcttcattaagaaagaaggtgaaggacggtggcgatcgcttcctaagagagctggtttactcagatgtggaaagagctgtcgtctacggtggatgaactatctccgaccctcggttaaacgtggaggaattacgtcggacgaggaagatctcatcctccgtcttcaccgcctcctcggcaacaggtatatatatagatattaaaaaaaaatctcgtcaagtattcaactatacaagatcgtttagtttatatgcatacgtatgtgtgtgtctctctctacccatacactagagttatttttttgtttaagctagctagggttttatttcttccacataaacatgaaggttctgattttagcttgatcccattttttcttatagctatataaaacaattatactttgattcttgattcgatatttatatagaacaaaaggttaatcccttctctagtttctttagagtataattttaattaagttgattctggttctagagcaaattaatagttctagagatcattcattcttttttcaaattgtttatgattactaggataaaaatgcaagcttgttttgtaaccatattagtaattaaccgctcttgttcttcatggaaattctaatgtgtgatgcaggtggtcattgatcgcgggaaggataccgggaaggactgataatgaaattaagaactattggaacactcatcttcgtaagaaacttttaaggcaaggaattgatcctcaaacccacaagcctcttgatgcaaacaacatccataaaccagaagaagaagtttccggtggacaaaagtaccctctagagcctatttctagttctcatactgatgataccactgttaatggcggggatggagatagcaagaacagtatcaatgtctttggtggtgaacacggctacgaagactttggtttctgctacgacgacaagttctcatcgtttcttaattcgctcatcaacgatgttggtgatccttttggtaatattatcccaatatctcaacctttgcagatggatgattgtaaggatgggattgttggagcgtcgtcttctagcttaggacatgactagatacaggaagatatatagttgatcgaatcttgatgtcttctatatctaccatgcttcaagaaggggtcacagatgcgatctagaaggttggcatatatgtgtactaagttgttttgtggtgatttgtgtgattattataaaaccataaattgtgagtgtaactgagtacacaaacctctatttatatatatggatatatctattgcgaataaatgaatcatcactatcgttaaataagactcgtggtaagcttttgtcaaatacagataactaataagcatgttcacaatcttaaattatggtactagatatgtttctaagtttaatttcttcaagaagtttatttaatgtaaacaatacaggctagctaagtgctaacgttaaacttcatatccttgaaaacaaaaatacactaaactttataagctattaaacatattccggacagtttacatactaaagtacgataataacatatatgttgtttgaaaaaaaaaacatatatgttgcctataggtttattatgtgtttgcgtcaccacacgagttgaggttataaaactctattttcatgtaatactaaattaaaactcaaaaatgtttgttttaagtatttcagacacaattcatgagttgtatatataagttgaaacttataggttctttttatcgatgaggatatactataagttcgaaaatcaaagtttgttgcgtagttcacatttacgtatcttatagtaagaccaatgttggtcgaagatatagttttttacctatgcatgcagatttattgtttaacacagttttatgtatatatatgcttacttcatcacagtctctcgtccgtgcgttctccctctagaattcgttacttaaaaccaaaaagaacaccatgccgttttcacattgactcttcacacgttcccacatttacgccatataaactacccttagttaaagcctaggaaaattgaattatagaccaacattagcggttagaataattgacgtttaatttacataagtttttactttttacttaaaacgaacttcgcatgcgactatgctgctccgacctaaccttctctttgacccttcggttcacatcacagcagcaaaaataattaactaaccgatagtctctggctcaaccaaatttagacgaaaatgatttattgccaaaaaattcgtaaacctaagactctgattaacaaaattttagtgttagatacatagtcatcataagattggatactatatatagtcgatatactggatatatcttccaacatctctagaggttttactcaaaacttcaagagaaatatatatgatgccaacgaaggggaacattaaataaaaaaataagataaacaaattgagtatatacatgtgatgcataaaatgacatattcatctgcatatacactaacacatctaacacacgtataattaacggataaatattacaacgtaccgatatgaagatattagtcgcagagactcaaaatatgttactcttttttaacactgctgttctacatattctctatatataccatgcgtagatagatatgtactgaccatttgtgataattatgttaaacagagttaggttaaaagaacgaaaagaattgaccggtagatttggtctctcaagtctcacttgtgtcttcaatagaaagtttgatctttctttttggagataatcaatcaataaagattatggaacatgttaggtaccaactaatactcttcagtttaattatctcatctgtaatcgcttttctctagaagttatggcctactattcttgtttcaaaacaaaatgctcttgttttcttataaaagaaacaattcctcagttatattcagaccatatatgatctttggttttcgagtccttgacgaaaagatttgacactaaattgtataaccttcaataaattggagttgttgaggattggtcctacctcacattgttgcctattatctgagcaaacaattttcttggccatctaacattgtggttccacttttatgaatgtacattgatgaccattaactaaccaaagaactaggtgtatttataatacatcagttgtcttttcctcgtattgaagatctcacttggcaaatcgcaatgtccattctttggctacctcgtcatgcttttctctatctgtcaagtagagccgtgcaatcaccggtaaagctggactatctggtcgatgaagaagaagcaaaaagaataagaacaatagagatttactatggaagttaaatacagtagttagatgcggacatctattatgtttgttggccaaaactcatcacaaacttttttttaaaaacgttctcttaggtagatctgacatgagctggtcatttcatcagaggacttgaaatggtctgatctgaagcctgagagtagaatagaaacttacagggttcaggttttaagaagatagatctgatggcttgtaagactttagtgattgtaagggctggactccaactatctcttagaatgttcacacttaaatctcccgcagtatcaacattgcaatggtaaatccgagtcttgaacaccaactgcaaatcaacctcaccaacttaaccaaaaagacagatgtaataaaagtgcaagctctagattagtacctatagcttgactatcactagacccaaaacttcaagaaatttgctacaaaatgtatcctaagactatgttgaaagcaataaaactacataatatgctagacactgagagtctgagacactagatgatctctgtttcaatgtgatgcagttgaagactcattgatattcactaaatagttcttcctaaagagatcatcattagaaatcaaaacttctaaaccttaaatcattaccagctaaatcagtaaagctcccaaaatgtgttaaccaaagaatccatgatcataccttaggtggcttgaatggataatcagatgggaaaattatatccaggaaaaagatccctccttcatagggagttcctgcaaaagttccataaacaccaaattcaaagacttgaaaacctaacaaattttcaatcggattatctacaaatattcaaagagagtatcagaattaaacccgaaggaccaatgatggtggcgatccaatggtagagattatctccttttggaccagctgagcaatcaggaggtggatcaatgttaagctcagccatctccctctgtatcctcttccctgacgcagaaactgaagtcttcgctacccaagacgacgccgttcctgaatatccggcgtacatcgccgtcggtaacggtctcaacctcccgcttccgccaggtgtcatcatctcccgtcgtcgtcgtcttccgatactctctgcttatccaatccaccacttgatcgtttcgctcgcactccatcgggaaaagatttcgaaacgccgcgtttttgtccgatcaattaaacaaataaagtaatcgctgacgtggagattaattttgtaacatgtattttttatttttattttctctcactaatcactatcaataaatttgtaatcattttgacaaccaaatttatttaagttgaattatcgaatattcttgtccttttgtgtaatgtgatcatgttataaccacgtgaatccttaataatttgataaatgattattcaaagttcttgaaaaaggcacacattttggaaagaaaattgaaattatccaaaatcaatttaatttttgtttaaacataatcaaatttactctgtcaatttttatgaataacatgatttacgtaaactctcctacaatgcactgattcatttgaatatgaaatttaaatcactctaattcgaatattttagttcaaagatgaagacaaaaaaaagaatgggaacttgtgagccctctttagtctctagttacacttacactaaaaacaaagtacacagtaactaccggtaaccgtaagaaatccaatccaagccacaggtagacttccccggttactacaaaaccgctttttggcaaacgttctacaaaaggcggtcatgctgaagcaacagttgtagtagagtgagagctaacggtgccaatatgggaagatggtagctaaagatgatacgtgcgtttgcgtttcctcccaatggacttgcgggtcctaacgcatccggaggaaagtttccattagtagcgtttgcgtttaagctgagataaatggaaaatgatttcaaagagttaggagcagatttcattttcaaaacttaacaagacataaatttagtatcgttaccttcccgtatatgcacatgttctatagcctgcaaacacacaagccatcgaatttgagatttactctgaggaaacaacttgaaaacatagaattattgcaacacatagatcagaggaaatgagaaaaacttactaggatctctagtcgtagtgatagccgtaccatcaaagtcacaagttccacctgcacttttcatcttctggtaatagtcattgaaagcaaaagaagcatggctcttaacatcgttagggaggtagcaaggttggcccggttgaatggcagcgcagttagctcggccttgaccacacgcccaattcaaaccgtcaaccaacttatcatcatcagcatctgctttagccacgcagaacatcgatgaaccgtttagagctgcggagctagagccaccactcaaactcagagggtaaaccgaggtcccatttggaaacaaaatcccccagtttctttcagagactggtcctgaccgcttgtcttcattgtacagctcgtagatgtaagtgtttatcggtatgtctggttgactaggaggacctgagttgttcagcactctcttgatcaagttagtgttgaatgtctccgcattagcgactgttgcagccgcttcatcgcttccaccagacgaaggccagcctgtttccgtgactacaacaggaatcttggagaaattcaaagcttccatggagtagtaagcagcatcaaccatagcatcaaacatgctgttgtaatgtaaaagcgtgttgggatcaacaatctgcttcaccggagaaagctgcttgaacaaagcgtaatcaagcgggaaaatcccattagcggttgtgtaaccgtagtaaggatacgcgtttaacatgaaaaaggaaccagtgttcttcaaaaactgaagaagctggtaaaccgtggtgttccacgacgggctaaaggtagatgtagatggaggaaacggtttaggcattatatccatagacatagggctggagactttgaccttaaagttgagattggaagccacaagagccttgtgaatgttgttaagagcagaggcgagaatcggcgccacgtgaggaatcgtggtgagaacctcactaccaacagcaatggcggttatattagttgaaggaatataagcagcgacgtttttgttaacccaagcagctgcagctgaaggaaaccgtccgattttgaggatttcttcattggttacaccgaccataacttcgatgctagtgttggcaaatgctttgagcatatggctattagcatcatagagacggacgtgtgtgatttgttgtgatttgagaagtgttacaatgtctgaaggcggtggcatgttggtgagatcagtgccaatgtttacaccgataaatgcagctgtataaagaatcagattaacattgagagtctatgaacttcaccaagtaataaaaaagtaaacttagagatagatataacatgtgaaatttaccgtttgaacaggcaagaattgaaagtaggagcaacaacgcttctgcaaaccatctcggaagcagcattggaaacagagtgcttgaaaaccttaaacctacaaaaactctgaaaaggttcaaaattgagccatatgctaatgattttaacagaaatttgaaacctaatataacaatggattgtagatttctcactctgaagtcagaaaaaactgttgtttttttttaatcttttcaggagagttataattggtcaaatatggtaagaaccctaaaaataagtaagcaacttttttttttggtgaattcaagaaagcaattttagataactatctcatggctattaagaaaacagaggatttccgacagaagtaaactaatggggtctggaaactaagcaacgttctgagaacagaaggggagaaacagtaaacaaactcatcgagcattcgaaaagacacaatttttaatctttaactcttttgtcgttttcgttctttcagacatgtgctctagaaactggatttgcagagcaaggaagaatgtggaagatacaatgaaaagctagcgaagacagcaatgtgagacaatgaaacacccagatgcaaaatcaagaaattatatacaaaagtacctaattggagcttgcctggttctagattcactcggcgagaattcagatcagagagaagaaattgagagaatgaaagaaaaagaagcctcgaggttttgctgctgagagacagagaacaggttcagagatgttactagtgtagtgaacccaccgaagaggaacccaaaaagtaaacacttttttttcttgtctttcggcgaatattatttgtcgaaattgaaaggaaatggaaaagaaaaaacaaaaacaaattaagagattgatttgctctcagtaaactttggtttcatctttccttatatataatgcgtgggaaaccagagaggtgtgtttgtggaatagaaggtgaggggaggcttcaaagttcaaagaagctctaaataaattattaattacctcaatgtgtcacactaattattaattagctcaacttgtcatccaaacccaaaaacaaaaaggaaatgaaaacatcatttaactacatataatttggccaatagtaaaagacatggcatatactatagctcacaaaacatcaaatacaactaagttttgcattatactttttaagaaaatcaaataaaacagttcaaaaatattaacaaatattttaaagtccgttaacaactaataatacggcaatattccaccttcataataaaagaatactaaattaacaaataaacaagaaaacaagattgtaagaggctcgattaccacgctcttctcattttctttcgttttataccaatttttatttaaatataatcttgaatcaaaagaaagattcgtgagtttgctaatttcatgtgcatgactcccaaatgttttcttggaaatgtttcttgcatgctcaaattgttcttgatttggcagtttctttcatcaccgttaaaaatgattcagaaatatatatattcaccattattcggaaattgatagtcttttagaattgcctaattaagttttcgtatatatttattttatgggatcattaaaatagcaaacaattgtttccaaatttctccaaaacgaagaaagaattgattatcgacattatcgccgtgcatttcgatccaagcttaagtgctctacgggaaaactgaaaattcaaaaacctgcgacgaccaagacttttgtcggatcgagagactcagacaagtcaacagaagaaaaaatttctggctaaaagaacagaatcgttagtaacactcatataccatatgaccacttgtaattaataacttgacttgtctcagggtttggattttggaataaaacttccaatgttaagagaaaaaactaaaaagtaagaaaccgttaatcttggcattttgtttgaaagaaagaaacaaagttttttttttcttagatgctttttggaaaaagaaagcagaagaaaatagctggaaagtgttcaaatgccgattcaaaacaaaaggagccttacgtcaaaaagctcccataataggaccatctttttcaccataacaatgttagatgagatc

SEQ ID NO: 414 - DNA, 84294 bp, Arabidopsis thaliana
gatcttcttttcaatacatagctcctcagggacaagaaatcccgccgtattttttcccgtcgttgtcgaatctacagagctcactcatttcgcgccctaacgacactgcttcgctccaggaactcaacgaacgtggatttctttacccttctggtcttccttcactcgaattcttcttgccagaaggtactttcactctttgactctattttgattgtatctgtcagtagctagattagtaatttgttcacactctcctgaagctggattttcttggcttatgaatatgatttatagtgtatgcaatgcagtcactagatgctcgagtatcaatcaaatgttgagaggtgttctgtttcttttgtggattgtgtgtcaatggttgatgaaatcagaaactttgcttgcttgctcatgtgcttacacagtagtaacaatgtttaggtcgttttatcgagtcctgttaccggccattttgctgatagtgttctgttcttgagtggagatcatagcgaattataaagtattgggaagcacatttatttaacttatgtctcaacttataggagggttaagaatctggctgtgttgtgctttgagtttgatatagttcaagagtgttatgtgtcctaaaggagagttcagccttgtattgttcattggccttgaggcttttagtctctgcaaagttgtatatttttgctgctcgttggtacctgtctaatgtctttgtatttggtaatgtagttgatccttcaagtgagccattgcttctgtttcctaagaggacattccaaccaagcactataaggcgtaaacggaaccatggattctttgctcggtatgtcactttgtgttcaacctcttagtttagtccaaaaataggggttcacttgtatttctcaacaaaatctagtaaattctaaagctcttttaattcttctaatcattgctcattctcattcacgttagaggaattcgttgtttagcactaatagaaagtaggaacaagattctacatctgtacatggtgtttgaatgaccaattctggttactcatacggctactgaatgtctaaatatgagcaggaaggcaaccaaaggtggacggagagtcatagctcggagaatagcaaaagggcgtcacagagtcacagcctagaatctctctaatctttccattgatgaatctccggttattcaggctagaaaacctgaaacttccatctcctaaataacttgtcttcttatccatgttctcatgtgttgttgatctcagaattgatctgaagttaaaattttaacgatctcagctcttttgtaatggatagtttatatcaatgaatccttttttcctcatgatgttaagttgttaacacattacgattaaattttaataacgaagcaagactttaaggatacaaatcgtgttttttttgtcaaaaattttaaaattatcaaaagagaatctcacagttgactaaaaatattgtacattgaacttgcattgaagtatgacagtccacatatttgaccccacgaaatatcatagagagagagaagcaataagcgacaaagaaaaaacaaagatgaagacaataatttccaatacagaggcaaaacaaactgaccatatacaaacacatgtgtacgtagatgacgagagacagagatcgtacttccttcacatatacgtccttacatacatatgtatgtttgtacgtgttcattaaactgtgtttaaggaccaactttatgcatatgtagtaacatttttccacaactcacacgactataacttgaatagttaagaagaacttatcaacatttatgttttcctccattattcaaaatcaatgcaatatatatgaaaagtaatccatgtaacatatcacaaatccttatactatatggaaaaaaacttataaacacatatgggtgattatttatgttcactcgttccttcttatatatagatatcaaacgtatataggtatttattacgtacccatgtcaaggaatcccatgttgattgagtatgaatagggtttgcttaagttatgacgtactgtccacaagagattggcgacgatgaggatgatgatggtatgatcatgtgattgatgtatgagtccactcgatgatgatgttgatgatcactcgtagaagtcatttgaaagttgtacgtggtgggaagaaaaaggccgtgatcttgtgaaattggtgaggaggaagatagtactttgccttcgagaacttctccacataataactttttggcattatcgttgaatggtgtcacaaacacgttgagtttattagcatcatcataatcttgaagggtttcttggaaaccagaaatggtactcgctgggaaatctggtaacgctggccattggagattattatcatgaggacaagaagaaagtgaaggttgatgatgattgtttatagttggtgtgggtgacaaaatgtcgaggttgttgtaatggttattatcatggtgatgagattggtttgggttgtttgtggttagaaacttgaaatctccttctctagaggttgggaacatcaatggggtcataacatgaggagaaggaagagagagatggcttggagtgatgaaattagggttagtgtttgtgatgatattggacatgaatcttgaactttcatcgtcgactgtagtagggttgaatccattgtgataaggaaggtttgtgagcaaactcgccatggaagagagatgatgatgatgatgaccgtgatgatggtgagacatgagcttctttttaatgctcgagttccagaaattcttgacctcgttatctgttcttccaggtagatgtttagcaatttgagcccatctgtcaaaaaccataacatgattaaaaaaagtaagtcaaagtcttgaagaaatgttagttttgtatttcacatgtataaatgttaatgaactgacaaacctgttaccaagaatgctgtgaagctcaatgataagagcagcttcttgaggagagaagcttccacgtttaagatcaggtcttagataatttatccatcttaatctacaactctttccacatctctgcaaacctaattaaacacaagcaaaaccacaaagaaattaaaacctaaatacaaagacttcttattagtatagataattcaagaaacaaaacccatgtatatgtgtataagtgcctgcatgtttaggaacagagctccaacatccatggccatatgaattgatgtagttgatgagcttttcgtcttcttcaggtgaccaaagccctctcttcaccttttgcttgttgcagcatgagtgatgacccatcctctctctctctctagatctctatcgctctcttagtctctctctaagaatgtttgtacgatgttgaagtgttataacttataatattgtatcgagaattggtgaggttaatacacacaattaaaatgagaaacggctgcagaaactttccattagtttattacaaaagtaatagataataatatactacctaatgatgtggacccagtttcttcttttgtgaatttctttccgaaacaacatatgtacagtgtaatttaaactacaataatttggaacgtaaaacatacaaaatttgtcggggaactgagataagtgtaacaagttgcaagaaaaatgatctcacaaaaaataattataggtgggtttttagcacactgaagacgagagtggcccagtgtatttttttagggttttgtgttataaaaggttaaaatgctaaaagctgaagtttctgctcagtgagagcctgtgtggcttattacagaatcatggccattgtcttcttctacacagacacgtgttgcccatgcagacactgtgaggcctactcctcagttataatttgagttttctagttgtcttgattaaatttaattaagtatgaatgagttattttcaataatcaagtcgaaagaaatttatataaagtataaacggatcaccaccggataaaataaaaaataaggattgccaacaaaggaagcaaagtttttttgacataaagggctcgaattgtactttagattagattcttattttgacttttaagaaaaacgttttttctgcgtaaacgtataggagctaaagcagatggtgtacatatgtaaacagtttttaacccgatttttttttaaaaaaaatcggatacatgttcccgaagggacaacttgaatatgtttctttctaatgtttaagtctggactatggagtatttgtttattgtggaattgtttgtgttgttatatcatcattagactcattaatttatttgatagatgtgggttcatcgatatactgtaatatattaatgatggggttgattactaaactaaacctaaatttgttggcttattatgatttagttaaatttttacctcttttggcttattgtacattatctcgatctcaagacagattttggtcgtaaccagctgagtttttatagtcatatggttagggtattgtcggtaacattgtgatttcagcatctacatatacatttttgcagccattttatgaaataaatcttgtagttggaacttatttacaatggctgccactgaattttaatgtttgtttttgataattagaaaaaaatattcgaattaaatatttgatatttaacaaccttgcctaaatctctccacattaactacacaattagttattaaaataaaacttctaaaatatttaatatcatttaattactacaaaattatcatttttaatattgcttttctccatgactataacaattcgattataatcatcaaatcgcagagatatttgatagcatttaattactacaaaattacaatatatttagacaataattcataaacatatcataaataagatcaacattaatttatagatagatacaatttgcaaacttttatgtatactaacttttaaaaaaaaattgttccgcggtataccgcgggttaaaatctattatgtgatattatgcgaccgtactgttagaacaatttggctagacgttcatatattgttgatattcggtcgataatgtacattatacgcaattgagataaatgcgctttgtcgtatataagtagttaatgtttaattagttgtttatcaagagagatcatgactgatttgcacgttataaatgttttgaaggctaaacctgctatcacacatgccaacaatgttatgatcaatgataatggtatctatttcatatgtgttgtctagtttactaaacatatactttcttcgtatataatttacttattagccaatttatgaacaaagattactcctccgtataacttcatgtataaatctaccgacaaatgaaatatagaaatagaacatatatcacactatttatgtttcatagaacatacttcttatgattataccaataacctaacaataaccaaattgacattaatattgttcaggatataaacaatttattaaaagtaatttattattagggataaatttaatgcttgtgaccgaagcactaggcccaaacataagattcttttgattttgccttcgatgccacatgcaactattaaagagctttcacacttttctttctatttttgatgagccatcaaaggacactaactttctatacattttggctttttgcttcgagaaaaaataatttggattcctacaaaataaagtataaaccatattatttcagagcatattttccataattattcctaacacacaaaaaagtaaacttttccaattttcccgtttgaaattccaaaattatgtttttttatgatttgtgtgggtctatgatgttacttttttctgtagaatagttttgttcatgatcaacaatattatataggactctacatacgtacgttcgagattttcataagtttttttttcactaataatttgtattttctagaaatcaaaccgcaaatatggtataaaacatcaaactattggatcaatgaacttaaattcaaaaaaaaaaggttaggataatgtctttcagtctattttttcgtttccatgtatactaatattatgaattatattagaattatatatcaaaattcatacatatatatcaagtatagctgtgtgtgaattataaaaagtgaacaaggaaaaggcaaaagaaatgagagaaggccccgatttgcctccattctctcctcaaagtaaaagtcccacgaaacgaaaaacaaaattgattctctcattttagtgtcatcatcaaatgtttaagtagacttgtatgcattcgtagtttagagaagcagacttgaagataactaaacagtataaaattgcaatatatttaagtcttttgaagtgaaatttggttatatgctgttaaaagaagtcaaagctcaacggactcgagattctgtcggaggcttcccttattttcttaatttgacatatatcttcttggtggttctgaaactgacctcttaaccattttctctatctccattgatagactcttaacattatcaaactaaacgtatgtttgtgcaaaataccctggaaaaaaactggatagttttgatatgttttgagagaactacgtcctcacaacgcatcgaggtataatgtcacaaatataatagaacatgatgatgtgatatacattagatgtggtgacctacgtactattaatttttagtaatataattatcttgaacgtcagtgaactattatcatttgcatgtatcagtgaattgtttagttcgattcatgggtaggtccatttttcatatatatatacattatgggaaaatacactgtattagaacatgaaagtttgttggacatagtataaaagtctccacacggacaagaaggaagctctcgtcacatttccaccataatttggttcaacgttcactttcatagttcctatggagatacagatagtaactgcatgattctctatagaatacaaaatgacccttatatgttataacagtatgattcattatcagaagatttttataaacgagctcaaaataagctgtgggaattgatttcgaatacataaagagaattaactcccgcgttctaggcatatcatgatcaaacatattgatatactccacaagaaatcatgttatagtccacaaattaagggatgtttgtgttcccatatatatgcttaaaccgtagctgtttatctttgtctgataatatattacagattctgcattagaagtagttgtcttttattttgtttaaatttttgaattcataacgttttcccgataccatgaaggaatgaaaggatattaaatgttatatataaaatccactaatttcctggctatgactaatcaaatcacaatgacattaacacagctcttttcaggtgctatccagcacttgacaattcatagccgatcagttttttttgtttttttttgctttatatcacataattcttttatagtctatatatgaaaaatatgaagccagaggccgagtcaaacgtgagtaatttatttttgtcaaagtcaactgtgagtatttttaaacaattccttttattcattttacttcttggaatatattcaaatctggaagatgccttttaaattcatttttacgttggaaaacaaatttttgtagaaagtaggaaaaaaaagtaggaggaatatttaatttacttgatgtaaagaaatagctaaaactgtgaaatcataatttgaccgatacgattcctttttggagtaatattcacactccgtgtgagcttggcgtttactaaaactagaaactaattgatcagtcaattttatgaaaatgtctcggaccatattctatatatagatatatgatgtgtccatttccagtcatttattccagctgacaccatcaagccttcccgcctacgcctagtgcatgaaaataacactctcactgaactcgtatattttaataaatagcacgagtcctttttgttaatgatgttaaacatatcaaatttgatcaacatgaaaataggtaatttgattgatatgaaaaattggacggtccaaattcagtgaagggcatgcatggtttgtctccatgagatcaaagttgacattcttccaaattaaatgtcatgatttgatacgaaatgaatcggtatcaatacaaaagatcattatctcaatgcatgtaacattcatgtaacaatacatctaaaaatgtaatgtaaaatatatgtggataaaaagggtgaccttttcataaatgagacccttgtacaagtttaattcttttattactcctaaaggaaaaaaaccattgagctgtggaatggctctgcagtcaatgcagaaataaaaaaagagtaataataatgtaatttgtaatatcatttttgtttttctttcgttaattatataaaagcatttctcttctgatgaatggaccatctcgtacatagattctttatttactagactgatctctctctctctctctctcgtgttcttatctgttttcttctgattttctgattcgaatatttactttcatgtactgagacatgtcagaaaatatattcattaattaatgagctgtaaaatcccaaaatattcaaatttcttaaaagagaaacttgctcataggttaatcagtttgctttttgatcaaaagaaaaaggcaaaacttcatagattggtaagaaaattactacttcacttgtcccataagcaacacccttcctatatcttattaggcattaggccttaaaccccacaagcttcttctttcttctccttcttcttctttttctcttcttcaagcctcgatatacatcattgcagccaccatcatgagagtgaaagaaacaggaaagggttttgtggttatattaatggtgatgataccaatagtgagctgggttgatgcaacaagcaggcctattgcttccagtcacgtttctttttatccaggtttaatttcttatttcttcagagtctaatatattagaccattactatgtctgtatctatatatattgaaagggagacgtgtagatttgtaagtatgaacaaaaagacttctctgtttagtttctgtttgcaaagaaggttaggttcaatttcttacttgtttatactaattttatgagcaaatcaatgacttgtaatagtggctattttagactctaaaccgtggtcccaaatatttgcatgattaacggttaaacccaaacaaactatggttttagaaattactgttatagattagtcagtaaaaagaatcatagaaaatggaatacatgttcttattaatgtctaaattctttttcgttttcccaataataatttatattgggcctgcagagataataaagccgcaggctgcagaagaaaactctaggagacgcattttgaaccccaatgagaataaagaagagatagtgaaaagaagaagaagaataggatcaaagccaccaagttgtgagaaaaaatgctatggatgtgagccatgtgaagcaatccaattccctaccatttcttcaatccctcacctatctcctcattatgctaattaccaacctgagggttggagatgccattgtcctcctccttaactaatcattctctctttttgtattccttacttagacacagtaacatattatatgttcacaacatgtatctgtttttaaactattatcatcactcatatcagtaatgtagacttgtagtaaactataacgtcaaagattttttatcaaactcaagtaattttttcacagtgaaatagttttttttttctttttcttttgggtaaggtttggtatactagaaggggcgggccatttgtttgtagccataagggcgagtaatatttattttattgggccgggcctgacttttttgcgcttttactctcccggctcgtgtacttgtgtacggaatagtacataatataatatgttgttatattatttcataaaaattgtggaaaataaatttccaacaatttgtattccacaaatgttatcactcatctatatatacatttttgcatccactttgtaaaataatcctcaagttggatttatttacagtggctgccattggcatttaataattattttttataattagaaagtaaatcttcgaattaaatatttgacatttaactatcttcccaaaatctcttcacattaactacacaattagttactaaaataaaacttccaaaatatttaatatcatctaaacactacaaaattatcatttttgatattgcttttttcatgactataacaattcgattataagcatcaaaccgtagaaatatttgatagcagttaattactacaaaattacaaaatatttatacaatgatttataaacatatcataaataaaatcaacattaataaaataaataggtttttttacgggacgggtttgacaggatgttacttaataacaattgtaaactttaaaataaaaatattttatatatagatacaatttgcaaacttttttatatattaaaaaattaattgtcccgcggtgtaccgcaggttaaaatctagtggttctgaattttgatgaaaaaaataaaattaaaaatcgctataaattgttgtgtgatctttaatagtgatagtctgatagatagattgttagtaattataaacttgtgtgatagacaaagacaaagaaaatgaaagaaagtaacaaaaccattaaaacattgtggcagttaacaagaaaaaaacttggtgccaactaataataataccatttgttagtcaatacaaatcagtaattaaatagtttaatttctgatttggttttaagttttaactaaaaacacactaataatgagaaagaaaatcgctaataattaattaaaaggaatataaaaataggagtcagctgaaggagtagacagagagaacggaaattgctgcgttgggtttgagagttgcagtcggagagagtgtggaagacagacaaagagagagagaaagaaagagatccagagatattattttcccttttgatctttcttgtccaaagggaagacacagagagagaaaaagcgagcccttttctccttcttcctcaaattctcatctattcgaattttgcattcattagctttctttgtctgattgatctccgtcggaatcggtgttctttatgaacgaccctcccgattctaggtttttctcgctttctcccccttttttgttgattgggattttcgtcacattctagggattttaccttgtcttgtgccgcaagtttttgggttttctggggaatgttggtgattttgatgccaccaatctttcaaggagtctttgaatcaccggagctgatctcacatcgttgtcgaaaggatatctttctgtttcttgagctgaaactttgagagattatggggcgtcgtagaataagatcaaggatccggaaaagccatttctacacctttaaatgtctcagaccaaaaaccctagaagatcaaggacctcatatcattaatggacctggatacacgagaattgttcattgtaaccaacctcatttgcatttggctaaagtccttaggtacacttcaaattatgtgtccaccactaggtataatctcattactttcttgcccaaatgcttgtatgagcagttccaccgtgttgccaatttctacttcctcgttgctgctattctctctgtctttcctctctccccattcaacaaatggagtatgatcgctcctttgatttttgtggttgggcttagtatgggtaaagaggcgttggaggattggcggaggtttatgcaggatgtgaaggtgaattcgaggaaagctactgttcacagaggggatggtgattttggtcgtaggaagtggaagaagttacgtgtaggggatgttgtaaaggtggaaaaggatcaatttttccctgctgatttgctcttattgtcatctagttatgaggatgggatctgttatgtggagacgatgaacttagatggtgaaaccaacttgaaagtgaaaagatgtttggatgttactttgcctttggaacgggatgatactttccagagtttctccggaactatcaaatgtgaagatcccaatcctaacctctatacctttgttggaaatcttgaatatgacggtcaggtttatccgcttgatcctagccagattctcttgagagactcaaagctcaggaacacgtcttatgtctatggggtggtggtttttactggccatgacaccaaagtcatgcagaattcaacaaaatccccttcaaagagaagcagaatcgagaagagaatggactacattatatatactctctttgccctccttgtgcttgtctccttcatcagctcattgggttttgcagtgatgacaaaaatgcatatgggagattggtggtacttacgaccggataagcctgagcggttaacaaatccaagaaatccttttcacgcttgggtcgtccatctgatcactgctgtcttgctttatgggtacttgattcccatctcattgtatgtttccatcgagctcgtaaaagttttgcaggcaactttcataaaccaagacttgcagatgtatgacagcgagagtgggactccagctcaagcacgtacatcgaatttaaatgaagagctgggacaagttgacacaatcctttccgataaaactggaactttgacttgtaaccagatggattttctgaaatgctccattgcgggtacttcttatggtgttcgagccagtgaagtggaactagctgctgcaaaacaaatggcgatagatctcgacgaggagcaaggtgaggaagtgacccaccttccaaggactagaggaaggatgcatggatatgctaaaatgcccagcaagacatcatcagatattgagttggagactgtaatcactgctactgacgaaggggatcagacccagtccactggtatcaagggttttagttttgaggatcaacgtctcatgggtggaaactggttaaatgaacctaattcagatgacattttgatgtttctgcgtatacttgcggtttgtcacactgctatccccgaggtggatgaagatactggaaagtgtacttatgaagcagagtctcctgacgaagttgctttccttgttgccgctggggagtttggttttgagtttactaaaagaactcaatcaagtgtgtttatcagtgaacgacattcaggccaaccagttgaaaggtgagactgtaactgtagatctttcccttgtttctatcggccccagtgaacgtatatctaactacttgcaggatattttacagagaatataaatttttaaatgttttggacttcactagcaaaagaaaaagaatgtctgttatcgtccgtgatgaaaaaggacagattcttctactctgtaaaggtgctgacaggttggcctcataacttgaagcagttccatatagtgtctcagttcttcttaagtaaatatcaatgcgttatcttaaacttttgcagcataatatttgaacggttatccaagaatggaaaaaattatctggaagccacttcaaagcatttgaatggatacggtgaagctggtttacgcacattggcactcagttatagaaagctggatgagaccgagtattcgatatggaacagtgaatttcacaaagccaaaacttcagtcggagctgacagagatgaaatgctcgaaaaggtatctgacatgatggagaaggaattgattcttgtcggtgctactgcagtggaagacaaactgcagaaaggggtatgtagtggaagtttatttgggattactaccaaaactctaatttttgaaatttcctttcaccttactgtttattgttcgtttcaggtgcctcaatgcatagataaacttgcccaagctggtcttaagatatgggttttgacaggagataagatggagacagcaattaacatagggtgtgctgtccttctatgttgctgataataccacaactccaaatcttggaaattttaaaatagatggtaagtggactaagttctttgttttcttgaaatgcagatatgcctgcagtttgctgagacagggtatgaagcagatatacatagctctaagaaatgaagagggatcatcccaagacccagaagcagtatgtattaggctgatactataaaatcctacattactgtttacgtttacaaacttgttttgatgtgagaacttgtttgttgtttctaatggccaggctgcgagagagaacattttgatgcaaatcataaatgcttcacagatgatcaaactagagaaggatccacatgcagcgtttgctttgatcattgatggaaagacacttacatatgctttggaggatgatattaagtatcagtttcttgccctggcagttgactgtgcttcagtgatatgctgtcgtgtctctcccaagcagaaagcgcttgtaagattgatataccacaagtcctagttaaatcttcttattgtagatgggaatcacttatttctatctcggttttctaggtaacaagactagcaaaagaaggaacaggaaagacgaccttggcaattggtgatggtgcaaatgatgttggaatgattcaagaagccgatataggtgtaggcatcagtggcgtggaaggcatgcaggtaatcaaatttgttttcaatgtaatgcgactttcacattggtctatttctgattgcacatacatttctcattttttgtttgcaggctgtaatggcaagcgacttctccatagcccaatttcggtttctagagagactacttgttgtccatgggcactggtgctacaaaagaatagcccagatggtaaatatctgtgaattatacttgatatttagacaggcgcatcatttacacaccgaacaacacacaacctgaccttgattcatattctttttgccagatctgttacttcttctacaagaacataacatttggtctgactctcttctacttcgaggctttcaccgggttttctggtcaagccatatacaacgactcctacttgttgctgtttaacgttattctcacatctctccctgtcatcgcccttggagtttttgagcaagacgtgtcttcagaagtctgcttacaggtttacacctctcttgctcagttatatctcttcaatctaaacccctaaaacccttcttctaatataactttctctctctctagttcccagcactgtaccagcaaggccccaagaacctgttctttgactggtacagaatcatcgggtggatggcaaatggagtctatgcatccgtagtcatattttccctcaacattggcatctttcatgtccaatctttctgttctggtggccaaacagcagacatggacgcaatgggaactgcaatgttcacgtgcatcatctgggcagtgaacgtacagatagctttaaccatgagccatttcacatggatccaacacgtcttgatctggggaagtatcgtcacctggtacatcttccttgccctatttggcatgttacctccaaaagtctcaggaaacatcttccacatgctctcggaaaccctagcacctgcaccaatcttctggcttacctcactgctggtcatagccgccacaacactcccctacttggcttacatttcgttccagagatcgttaaaccctctggaccatcacatcatccaagagatcaagcatttcagaatcgacgtccaggacgaatgtatgtggacgagggaaagatcaaaggctagagagaagaccaagattggagtgacagctcgtgttgatgccaagatccgccagctgagaggaaggctccagagaaaacactccatattgagcgttatgagcggtctgagtggcgtctcagcatcaactgatacaacttccaccacacaacatagttgaactcatccagtaagtttcctctttctcgagaaaaaaaatccattaattggaactggaaggaagcagaccaaagaagaaaattgggattgaagataataggcaacaaagaaagggacagagaatgttgtattgtgtgagtttgtgtgtgtatactaaagaaaatgaaaagaaagaaagaatttgaatagagtttcttataaatagattctttttctttctgaagaaagaattggttttgattgtaactgaagaagtatggtcatattcacatgtagatatgaaaactgatttcattcattatctgtctcattcaagttcaaagactcttcttctacatatagttgcaagagaaagaaaatactatcaattttttgttcgttacagatatatttaactctcacagcacaaagaagagattttaagaaagttgagagaaggtatatcaagaaataccgataatgtctttgaaccatttgaagctctttcgaatggatcccttcatcttctgttcaacggaataaactttgtagccagcgactcttctcttcctccgcgattctggatcgctgaaactccagcttcttgacgccgcacgatccgcgtttggaacgcttttgcttttctttatctttaactggtaatcgttcgtttgactctgatcgccggctgaatcgtcgaagctcccgctgttgtaacctttcactgcgtctcgacggtttccagaagctggcggttcgtaataattcgccatggctgagtttgagagttttggtctgaacgaagaagagtcgtcgtcgactctgtttttaatagattttgattgtctttttaaaagttataaaaggaaattttaataaaacaatatgtttattttccaaataattaaaggtatcttttttagaaatcaatttacaattgtcatgtggagttggtcaaggacctacttgtgttttttttccctctttttttcttcaaacgaattaagttattcaacttagaaatagaaagaaaatgaatacgtaaaattggtatgaatcactagacttttcatgtgtttttcttttcttatgatttataatgatggttaggtttgtgtggatgtgatgatttcccaactatttcaaaataggcacgtggatttgtccaaacctgtaatttctcacaggaaataaaatttctttcatagtttcgtgaagaaactttgcagaagttcagaccaataatttcactttgatattataaaagtgaaaaacccttgtcggtggtaggcttgactcggaatcattgaatccacatccataaaattttgaatatacttcttttgagaaaaaaaggaaatagtacatcaaaactattagatataatatttattttccataaggctagaaatataaagaagatgcatgaaaaacgaaagataaagcgagttcgtcgctgtgtccaaacagacttttgatcagtagatttgtcgttaaagcagcgcctgagagagtgtgccaatgcttcatccttgattgatgcaatggaaaaaaagtaaccccgactattcaattaatttgtgagccaagcattttaaccagtttgacataaacatataaaataagtttaatgctgagatatagatttgaaaaagcttaaaaccaaactttgatgaaaagatttgattgatacaaaaatcaaagacaaacaacaaagccgaatattaaaatagtgaagaaataaatactccatatgacttaaacttaaaaatggtcaagaagagagagatatgttcgtagctgggagagagaggagagaacaacaactaagaaaatttaagaaatgtaaatcgctgatagacgacgggtcaaaatcagatcaaagagtgccttgcaaaacaagaaaacctttcttctccggtgatactagtacggcagagcaaacacagcaacagaaccgacttcttttctcccttcacagcagatcggccacgttcgaaggcagctcttcgacaaccacattgtagaatttctgaatatcaaacagcatcctctcatcatcacgggtcacgaaattgatcgcaacaccctttctcccgaaccttccacttcttccgatacggtgaaggtagttctctggctgagttgggagatcgaagttgataaccagggagacttgttggacatcaataccacgagctaagaggtcagtggtgatgagaacacgggaggaaccagacctgaactctctcatgatgatgtccctggtgttctggtccatgtctccgtgagttgcagagactgtgtggtcacggcttctcattttgtctgtgagccaatcaaccttacgcctggtgttcacgaagatgacactctgagtgatggcaagagtctcgtagagatcacagagtgtctcgagcttccactcttctttctcaacgttgacgtagaactgcttgataccttcaagggtaagctcatcacgcttcaccaagattctcactggcttgctcatgaacttccttgtgatctcaagagcttctggtggcattgttgcggagaacacaccaacttggatctttggtggaagaagctggaatatgtcatagatctgaaaaaacccagaaaccagtgagattcaagttaaactataacgagaatggaattgaaacactgagaaatatttgcatacctggtccttgaaaccacgggagagcatttcatcagcttcatcgagaacaaacatcttgatgttgtcagcacgaagagactgcctcttcaacatgtcaaagacacgccctggagttccaacaacaacatggacaccagcttggaggatgcgctgatcctcacggacactggttccaccaacacaggcgtgaaccttgacaccaaggtaatcaccaagggccctcatgaccttctcaatttgctgagcaagctctctagttggagctagaaccaaagcctgacactggataagggagaagtccagctgctgcaagacaccagagcagaaagttgctgttttcccagtaccagactgagcctgttgaatcacatcaagacccttacagaaggggacgattcctctttgctgaatagcagaaggcttctcaaaacctaagaaaaaacagaagcacgcatgagataatgttctaatctaagacataaatcacaaaagatagctttttcaagttcctacacacataccataagcataaatacccctgagaaggttctcttgaagacccatggcatcaaagctctcatgaacatcatcataggatgtgaagaactcatcttgtccctcaagtctgtatcaatacagtacaattagcagctagagcatgcggagagaacacactcaagaatgaaaaaacagaagtaaaaagactcacacttcattgagtttctggtcaaactgacgtgcatcaaactgtgtgccttctggtgcagatcctgccatgctacataaaaagaacaaaaacaatcagatttcatatcaaaaggaagagagacaacacctattttgatatcgttaataatatgattgcaaaggaggaaatgtgacaagaaagccaaactcgaagtccataaagagaggaaaacaagcattaatatctgcctcagatgatgtgcggagaaaatgtataaaggcacatatggttatctattaaacatagacaccactcaacctatttctccaaattacaaaaaaaaacattcaatcagacaaaaccaagtgagtgttaagacaagaacatctgagctttgaagacgattcatttcattctattgagagactaacctagccgtaacaaaatctacaaacccatcaacaaatctacagatgtgtagatcctaaatttaataatcgtcatcatcagcagctcagaatctaataaagagaacaaaaacgaaagcacttccacagcaaaaaaaacgatcttgaagtaacgaaaaatcaaaacttccaaatcaactcaacaaagttgaaaccaaatctatcggaaaacacaaaaaaacaaatcagaacaatccaaaagtaaagaaacaatcatgaatcgtaaaagttacatcgagataatagatagacaatccgataggatgcgaacctggagcaaagttggtaagcgagagtaaagggcttttttcagggagcttgaatctcccaaactcggatctgaaccgcgttgagagagagagagcaaagagaagagcgaagattgcgagagactggtggaatatccgaaagaggctgagagaaaacgcgttaccttgtttatatactccgtctttagggttttctcctttggaaatcttctccttttctttttcggatttccggttttacccctttattccctttctttttactcttttggctcggacaaggttttccaacacttagctcattgtcttaacttgattttggcaaaaataaataaacaaatatctagtgggaaattaggaacataaattcttcatttattttgtgactagcaaagaaaatattcttcatttattttattttcttttccaaagctttctttctcctgcaacttttattgctttttgacgttacaaagcattttcccgattacaacgaggatattagaagaataaagtgactgataagaacgttttatctgaaaatgtctttacttattaacacatctatctctctatgttgaatgtttaatcatgtaattgttccacaagtgatatgaagaatccttgaaacgaagcaaaacacattgagtaagaagaaggtaactagctagtatgaagaagcagcaagttgctatctatcttcaacaaaaaatgctttgattttagcctcaagagactttcttagaatctgttgccattgaagaaaaagctggagagggcaaaacataatcatgatgcttaggataagcaaaaaatatgtatttagcttgtgtaggtagaggaagagctaggagttttttgtgtgacaggaatcgagggaaaacgatgggccaaagattaggcccattaataagtttgactaatccctgccgttcattagatgcctacgtaatcactaacgcacctgatgatctctgtcttttggtgagacgcaaaagctcagagaataataatagggcccaatataataaagtacaaaccgaaatttgtgaagcttaattagtcggtttaaatacttttatatcggttatggtagaattggtgttggtacgatacaatctggtacatgtaaggcagcattttgccatttctgaaaaacctaaacacaaaactatcttcatcatcatcatcaaatcccagctttcttccaagtgatccttcactctctatactgcgatttaccgttcttctgactcttggtgagttctagatcgaatcctatcttccatccacatatttactgtttcaaaattggattgagtacaagtcaaattcatcgatctcgatctctgatatagttgccgagggaaaaaggagaaaccccctaacaaacattcccaccattttttttgttatttgcagttgcgaattcggatcggctgacgcagctccgattgcacaacaatggcttctcgtatcatcaatcattccaaaaaggtttctctttctctatttttcatttttttctgtggtttgactaccatttttgatcttgtaaaactgagtttatgcattcgttcttatgtgttttgctctgccaatcatttttttctgaactgaggttcgttttccgggtttgacttaatctaatcatgaatttggtatttttaatttgatcatgggcaattctgcattttgctattgagagctttagtaacctccttgtaatctgaattgtgattaatgtagtagcttcgctttatgattcaattgtggtattagctattcattttattagtacaagaagactctacttttacagcagagtaattgtatgttgctctttgtaaacactattttgacgattgttgtgttatctgaccagttgaaacatgtttccgctttactgcggcgtgaccatgctgtggcagtccgctgtttctccaacagtacccacccctctctcgttggaagagaaggtaatccagtcagctttcttagtgtcctcttcattgctatccttaagttcattttatgtagaaatgtgtggtggtttcttttatttgatacggtaacaagcaccacacagtactctgggatgaatagtccaagtttgactttcacatcgttttcaacatgaagaacataacaacgttccaactttaattaattgaaagttggtatgttttgagtatatattatgcttctcgcttaagcatttatttttctatttttatttggtcttcagatatcttcaaggcccgcctgaattattcctctgtagagagaatttcaaaatgtggtactggcaatgtaagtccctgctgttcagtttcctttctcgtctttgctttgtcacgtaatcgtctgtgtttttttggtcgtaatgtcattagctgcattatataggtaacaatgcttagtggtatttcaacaacgagcacaaaactaagcagcccaatggcaggaccaaaactatttaaagaatttataaggtatgtaatccatttaccgatgagaatacaacttgctaccttcctgtatgaatacttctatcctaactgtaagcttcttttcttgcttttagctcccagatgcgatcagtgagaggattttcatccagttcaggtatttagttctttattgtaacttcccgcttgttctaacatatattttcacttgaattgtacttttttttgtgagcatctgacttggtttttgtgccttttgcggccatcatatttctgtcactgtgtatatgcagcatacatggtttgttttactgataactttttaaaatatgtttcagatcttcctcctcatcaagagattggaatgccttctctttcgccaacaatgactgaggcatgtacctctgaatacctcttacgaaaattaacatggtttattgttttatcattctactaaagatatctgttgaaacttcagggtaacattgccaggtggctgaagaaagaaggtgataaagttgctcctggtgaagtgctttgtgaagttgaaactgtaatgataatcctgattgaatctcttcctgtattgattcttatgccaggaataaaacacttatctcaatcttaatattttaggacaaagcaacagtcgaaatggaatgcatggaagagggttttctcgccaagatagtaaaggaggagggggcaaaagaaattcaagttggggaggtatgagagtttctgacttttggagacttgttaattataatgggttctcatgaagtatttgattgtgagccctatgctccctttagttgaagatcaatgaatattcaataaaaatgacaaagatctttatcttcatttgtagaatcacatataaatggtcccttttttttttgtccaactaggtgattgctatcacagttgaagatgaagatgatattcaaaagtttaaagattacacaccctcatccgatactggtcccgctgcgcctgaagcaaaaccagctccttccctaccaaaggaagagaaggtagagaagccagccagtgctcctgaagccaagatctctaagccaagctcagctccttcagaagatcgtatttttgccagtcctcttgcaagaaagttggctgaagataataatgtcagtttccagacgaaaaatattagttaagctcgtgttagatctccatctctaatttgtttttcctacttttcctttgaaaaacattaggtacctctctcaagcattaaaggcacaggtcctgaaggacggatagtgaaggctgatgtcgaagatttcttaggtatcagaaatccttggctcttccctcttcttacattttcccctctcgttacagaatttacctcatccctatgttctaaatttctaatacatcttcctatggtacagcttcaggcagtaaagaaactactgccaaaccttccaagcaagtggattcaaaggttccagctcttgactatgttgacatccctcacactcagatacgaaaggcaaatacctatacaaccttatatcttgattgcttgtggtatttctagattacctcgaccatatatctctctgttttgtactataagccaagaattccgaagttttgttaattgtataaatttgacaggtcacagcctcacgtttggcattctcaaagcaaactattcctcactactacttgaccgtggatacatgtgttgacaaaatgatggggtaagtattaagttttagatcatatattttgattaggtaagtggatgctaaacatagctatttttatatgcagtcttaggagtcaactcaattcatttcaagaggcttccggtgggaaaaggatatctgtaaatgatcttgttattaaggtgcatcttacttcttttcttgcaagtctaattaaatctcattttgttctccattatgaaaccttttctttttcgaaattgcaggctgctgcactggctcttcgaaaagttcctcagtgcaatagttcatggacagatgaatacatccgccagtaagtacatattctgtttcagaggttcatgaaaactttgcaaatcatctagtttcttggttcttattttcctccttttatgtacagatttaaaaatgtgaacatcaatgtcgctgtacaaacagaaaatgggctctacgttcctgtggtcaaggttagggagctcttgatacagttattaaccttcctctgcagaaacttgagatttctgaaaaactcagttcatctaattgcttgatttcaggacgcggacaagaaaggactgtctacaattggagaagaggttcgattcttggctcaaaaagcaaaagaaaacagcttgaagccggaagattatgaggttggtttagaattcggtcaatctcactagcataatactgctgtgaaagcaaatcagctcaaactgtttcttctgacagggaggaacattcacagtctccaacctggggggaccttttggcatcaaacagttctgtgccgtcatcaatccacctcaagcagccattctagcaatcggatctggtaagtccttagcatactcatccactttatccgttgaagtttcttccgcgtaacttattatagtgttggtgtctgaatctcaaaacagctgaaaagagagttgttcccggtactggtccagaccaatacaacgttgcttcatacatgtctgtaacactaagctgtgaccaccgcgtaatagatggtacagaatccgcctctcattcctattgtcattattaatcatcacctcatcgaaaacgtctaataagtcatcttcctgtgcaggtgcaattggagccgagtggctgaaagcattcaagggctacatcgagaccccagaatctatgttgctctaaaattcagacgcacacacacatcaaaagctaaactcataagagtcttctgacctcaaatttctttcccacaacatattctaccagatttgatcagcagtaggcaatggcctttaaagttgagtgttttgctattctttaaatcattgagttgacagatttttgtctcaaaataaaatcaggaatccaacaatttcactgtgcacttgttttttggcttaatgcttgttcatcatgggttggcaaaataaaacccatttacttaattttattaatcaactccaataaatatctctttcttctaataaaatgtcacttagttcactatcatggacttagagcagtttgcttgcttaaatgccaaaacatcatatatcattaaacccaagaaacagatgtcttaggaactaaaacaatttataatatctcaacagaccgtcaaagaaatatcattaaaatagcagaaaatatgtaaagatagaacaaaatcttctcctagatcgtcatcactttcgtgccctgcgcctccggttaacctccgggaaattgagaggggtcggtaaggtagcaaccgtagtagaattctgcttcaggaatttgcagccaagctgtagaaaatgtttcctcagctcaactgtgcttatcctcagatcttttgctatgtcttctggatcggtcatgaaattatccacgtgaagggatagcacaagaacgtagcttatcagaaggttgatcttgtcaacaggtatcctatctgattcagaatccttgaacatgctgttgaatttttgacggaagatgtctggcatcttgtggtctttagcggaatcgtaaccattcattgagtttctgtccttgaacttaaccagatgggtgagaagcgttgcagcaccacaaaccgtctgctttttcatatcgtcctgcatatgtaacaaaatgacatacatacataaagaatcttctgagcagtagataaaaccatgagaagttcagaatccatttaatcagagcaaaccgcgaaagtggtgcaagctaacataaaatattttgcatccaagaaaatagtcataattttaccttgatatctcgcaatctgtacaatctgttgcggacaaatacagggtaagcctcagttgctgcttcagtttcctgttgcagaagccagtaaatatcttcaagaaaactccaatcccccttttcaatgatcttttctaagggataagcttcatttgcagtcgttgcagcggtattgtaaggaggaatgttgcgtgcaacagtagaactggtgccttcaagagcagctgtgttaacacctaactcacttagtttcccatcaaggaccttctgagtcgcagcatcatctcccatatataaggcacgcttcttcttatcctgcatagagacacacattctcactcagacatataatcctcccaacgaatctcacgacaatcagttctctactagtctggataccaataagacagatactgtaggaaacagtagaattggtgttttcagatgctgtagtaacatacccgagtaacagctttttttgtattataacgatcgcgttctcctgtttttagttcttcaagttctttgacgacagcacttcctgaagcttcttcctcatttgtttcttgagctttaactctaggctccaatctgattatctacaagtaacacaaaaccaaactcaaactctcaaaaatcatttcttttctattcacaaccatacactcaaaacattccaactaattcaaaccaattaatcaccaaaatcaaaacaaggtaacagaatttaaaccttattgtgagcaacaggaagaatcctcaaagttttagcctctctattaaaaacaccaactctataagtattcgtctgcatagcagcttgctcgcctgtgtaattagttccgacgaactcaactcttgcgcctggaggacttacaacaacctgaatcctcttcttagaatcatccttatgcttgtaaacagtaaccttgggagtttcatgaactctcttgcctgtttttggatctactttacaaggatcgtatcctgtagagaaataggcgacgatcggagagattctatcgggtctctcggcgacttgcgtgactttgagagtaactctcttgtcttcttcgttttcatcctctgtttccgttgctatttttttccctttcctttgcttcttttgtagttgttgtggtgtattgaaatcttcttcctcgtttctataatcattcttctcttcgccttccatggctactgaggtttggattcttttagtctatcgaagaagcggcagcgattcagagaagggtttactggaaactcactaaatgcttaaaccctaatttggttatgtttcgggaatttattacataacagacccttgttgtttgtccgagtcgataaagaaatcttcacagtttttttttttgaccccaaacttttaatttgtttagaaagatctacaccgttataacgacgtctacggactacggaatctaaaccctggctttttctcttagctaaaacgacacgtagttcgcctgaaacttagaaaacaaacacacgctgtttgcaaagatcccaatttacattgatctacctccaaagtatctaaactcttctttaaagctttggccacataaccttcttttaagttttttttaactatggattctattatcttctaattttttcatcatttctagaccaagtttctatgctggaacaaatgtaaaattttgatccaagtacaccaaattcttagttcgtttttaatatagatatttcaggttaagtgtatattggactgatatcatcacaactagttttcacttttgacagtggactactatcggatcggttattctttgattagggttctttaacacgttctctctctttttttcgagtccaaaataaagtcttgtcgtccaactagctagcgtaggatttggtgaacttggatacatatatttttattcgtcgtcaaacttacctagcaacaaaacaagtaatgctgtactattttattttattttgataatcacctgatcaccttacccagatacatatttaagctgacgtatcaaatatttgtgtaatattatatgagtaacatttgcaggtatgtatatctaataaaaaatttaagaaaagagtaaatcgtggtgtgtgatgttgatgtacgaccacagttttcttatgccacttacaacttttgtaatagttgaacataaaagagctagcgttgtggatagatagatgaaaattaatctatacaatcgattaattaacattgccaatattcaaccactagatcatgactctgttacttgttagtagcttaatttatcattatgttgaagattttatatgtactaatgtcactgttcactgttgcgcaattaattaatgttctagtttttttctccgcaattaactaatgttcaacttcaacttaattttggtttgttgaatggtatgcaacgactgttctttatccgctatatatctttatctttttataccacaagtcgtataagtcattagatacaatgacaagatgacaaatgtagtactatgaaagaaaagacacgttgaaagaagagtgacacaaatgagagatatgatctcccagagtcaaatttgaggtcttgcgattctcctataaacctcaaaaactctatttagttagaaatatataaaaaataacgacgacgcttcttccctaatgtcgctatcgttgactgacttgatcagaatcatatagttctcaaagagtaggtttttaattcccgtacgtgatcaacaaacaaatggtttcaaattagacttttgctgatcaaaccagaaatttctatctccctttccttttttaaaaagactcgttcttttttttcctttataatctcgacaaagagagaagttacatatataaattttaagaattataactcttttgtaaagcattcatcgcttcaaatcatggagatcaacggtcaagaaggtcatcgatacgaagaatcatcatcagagtggttcgtaaagtatctaaaacgtcaaggcgattggttagagaaaactagagggaatcttatggttacagctacggttatagccggtatgagctttcaagttatggttaatcctcccggtggcgtatggcaaagtgacaattgttctttcggaaatcaaaccggaaccgcaccgttttgtaaggggagagcgggaactgcggtattggaatatgagagttcaaagcgtatagcgtatattgggatgattattagcagtacagtgtcattttctacctcaatgagtctcattctccttgtcatcagcggtatacgactaaggtaccaataaataaactatatgtgcaactccatataacaaggctacttagtatgtaaattattataacttgtttgtatgttaagtctggaatttttatgtaacgcttgtgtttgacaagatattactgagaactaaaaatagtcatctaaattgagatcttggtgttgactttcggttttaagtataccaactatgtcggcacaatggttgacttaacattagctatttcaacaaaactggtctgattggtaaaaatactaattcgatcgctatttgattggactttaaaactatggaaagttgatgacatatatcatagttatctaatggaattttggtacactcagaataagtagagaaattgtttggtattagaataaactaaaagacacttatatgatgatataattgtgtatatgaaggaaccggatgataatggctatcctcggaacatttatggtggtggcggttctttgtatatcagcggcgttcttcttcgccatcgtgctggttcaatccgacgatcaaataattcgttatatactattgatttatgtgggattttgggttgtatttcctgttttgatacttttaatccaacttgttcgatttataggttggcttatttgtttcatgtgttgttgttgttgtccacgtcggcgacggttccattagggagaggtcccattaagaagagaaggaacccgtgtttcgaacccacgtatgaatttggaacttgatgtaggaaagtgatactagaataaaagtctcccaaggacattgttataacgtttattaattctatgggttatttttaaactgtttaataaatgcatttgattatgtgaatcttggcaattgtgtgggttggtttgttgtaaagttaattaattgcgtgggtttgtactgtttaataaattcgtttgattaaaaattgtatgttcaaataatgtgaatcgtggcaatatcgccttgtgaatcgtgattggtgaacgatcgtggtaatttttttttttgccaatagttattcttaccatgatcttagtccaaatcgctcgtataacacagtaataaataaatacaaaaaaaaagaacaaagaaaacaaactagaatgcggtgcacactagaatgaaacattacaaaaaacgattgtgagcatctcgttaatgggagagattaatatatccggaacaaagcaataaatattttctcaaaaaaaagaagatataatcatctcaaaaaaaaaacaagataattcttttgacgtagaatatatagtaaataaaaaaacgtggaatatagcaatgtttcatatatatattcgtaaatcgttgatttttatgtgattggatggatgatgaagcaaaagtattatattcccttatataaaacgaagaatatcgtaaagaaccctcgaggcctaaaagatggttagggtatagactataggctatagtattaacatgtcaattgtaaatgtcatgaaactgaaaaaagaaatagggaaaagtgagtcaaagggagaaaaggaggtaggtctcttgccctataatatctgcatttacccacccatcatctcctataatataacccatttataactctccattttcttctttttttggtaaaagtttgaattaactcttcattttcattttaattaattcgctaaaaacataataaaaacaagaagagaatagatgatgatgatacagatgagtgactaaaatggaaatttatgcactaaaatggaaatatcccttggtccaaaggtctttccaccttcttcttcatagcttaatcaccatgattatgatcatatatatctttgaccaaccaacaagagtggagctctaactaatatgtgtaggtaccatcttacatatctccatatacgcatgcatatcattttcgaaccaatttagaaggtgatgtatataatcaaaagtatttaggatgatggtttatcgcgtgaacaccattttgtttaagtacgtggtcatcgcaaggtaaccatctttattttcttgggttgatcttcactagctatatattaaccaattacatatgtattattttgtactgaagaaaggatataatttgtaatcgccaaatgattgaattagtatttgctaattacaaaaatttgtagaaatcgcgataattatcaacttttttactatatcccatcattctactattacgcaatgttatcaattgtactagtttgtttcatccactatgtaaaatcattcaaaccctaaagtcgatgctcatcagctcatgtatatgtatgtatcatgtatatgtacataagatataaaacctttatagatgtgcatgtaaaagaatggtagatagtagtagtaggtgtgtaaggagaaagatctagggggcttcaaaaaaaggagagaaaaggacagagcatgtgaaaagagacagagaaacaaacagaggagtgaacagtcttactcttttttttttctatgcacttaatgaacccaaccctctctgtatatttctgattcttcacatgtcttcctcttcttttttattccgaaaacttttcttcagtaaaaaccaatgccgaaaaaaatacataataaaaacgacaaaatatctaacattttttatataaaaaggacaaaagtactttcacttcacttgcaaccaaacaaacctagtccccttctttatccaatggtctctcccctgctctctatttctcatctaaacacccttttctttctttcttatttaccattttgccaacttatgtaaaagatgttaagaagaaaatgtgaaaatttagtaaaaatctctcttttgtattgtcgtcagaaactgtaaaataatcttactctttttcaagtcagcatataagtttggtttcttctcccgagtcagagattcgtgcagtgatgatacaagaagcttattccgaattcttttcataaatactcgtatttccttcttctttttttttttcttttttttaacatctatctgttcttcttgcatctatctgattttcctctgtcttttagacagtaataacagagctcactaaatgtaataaataaaaaaatgagctcaataaaaaggtaaatggcactcatttttaggccatcaagtgttgggatacagctgaaattaaaaaggcgtcagctcaaaggaaaaaataaataaaaaagattcccaaaaatcaatgcacttttatagaaaaaaatacacataatttcaaaaaatacttaaattttgaaaaataagatgaagaaaggattgagaagagaggaaagagtagtcagagagacaggagcatcaagtgctgcagaagaagcaacaggaacactgggcctgagtctcttcagatttgccagtctttataggaccacactcttcttcttcatcccccttacatacattttatctatttttacattttacaatattggatattttaatgttgttttgattttacactacatggcaaaactccttaaaagctcttgtcctgatgtgattcttttttcttttcaacactgtctaaatatctctctcttctttgtgatcactctttgatttattaactttctgattaccattccccccaaaataaaccctactagagtgtgactaattgtatagtaatctctattgtgtaataatcttttatctttcctcaatacaaaaaagtagggtatatatataaaagagggagtggcctcgtgtagagaaagaacctagctagtgttcatgcaatttgcatctgaggaatatatgcttagaaagagagagagagagagagagagagagagagagagagagagagatatcaaaccagaggaaaagagtgacagagaaagtggtcatctttgtctgtctctgtccgaaactcaggagccctaatctctgaatccatcaagaaagctctttctcttccttcttttatgcttctgaatttgctacatatataaactatctgaagaaagctagagaataagatgatgagtctaagtggaagtagcgggagaacaataggaaggcctccatttacaccaacacaatgggaagaactggaacatcaagccctaatctacaagtacatggtctctggtgttcctgtcccacctgagctcatcttctccattagaagaagcttggacacttccttggtctctagactccttcctcaccaatcccgtaagccctatacctatacttaattttctttctttcatgttttcttttcttgcataaagtttcaatcttttgttgattctcatgcccccaaagttttcagctttatgtgttttagagtgatttggtttctggttaaagtctctagctttttttttcaacgaccacttttaaaaactcagtttccacagtcttacttttaatgattttggaacttaaggtcctaattagggttttacatcatgattaattttagggtttcgttttaattaaatgatgcagttggatgggggtgttaccagatgggatttgggagaaaaccagatccagagccaggaagatgcagaagaacagatggtaagaaatggagatgctcaagagaagcttacccagattcgaagtactgtgaaaaacacatgcacagaggaagaaaccgtgccagaaaatctcttgatcagaatcagacaacaacaactcctttaacatcaccatctctctcattcaccaacaacaacaacccaagtcccaccttgtcttcttcttcttcctctaattcctcttctactacttattctgcttcttcttcttcaatggatgcctacagtaacagtaataggtttgggcttggtggaagtagtagtaacactagaggttatttcaacagccattctcttgattatccttatccttctacttcacccaaacaacaacaacaaactcttcatcatgcttccgctttgtcacttcatcaaaatactaattctacttctcagttcaatgtcttagcctctgctactgaccacaaagacttcaggttctgtgatcttatctttagtttctcttgttgatcttttatggaaacttttattgatggattgttttttgaattcaggtactttcaagggattggggagagagttggaggagttggggagagaacgttctttccagaagcatctagaagctttcaagattctccataccatcatcaccaacaaccgttagcaacagtgatgaatgatccgtaccaccactgtagtactgatcataataagattgatcatcatcacacatactcatcctcatcatcatctcaacatcttcatcatgatcatgatcatagacagcaacagtgttttgttttgggcgccgacatgttcaacaaacctacaagaagtgtccttgcaaactcatcaagacaagatcaaaatcaagaagaagatgagaaagattcatcagagtcgtccaagaagtctctacatcacttctttggtgaggactgggcacagaacaagaacagttcagattcttggcttgacctttcttcccactcaagactcgacactggtaattaattaatctgcagacgtaatcttatgatctatgctaattattgatagtttcaaaattagtttaaatttattttctcaggtagctaattaagtagagctggcatcaatgatggatctgcaccaacacacacaactgtgaaatgttgaagaagagtcacatttcacatctatttccgtggaacaatgagacaagacactgtttgcagaatcctatatgtattttttctatctttttctatgtgtgttaggtccaacaagaaaaagtgatccgacagatatatctgtatgtgttctcttgctttctcaagaaatcagattttattttactgtcgctgatagcaacaaaagaaaacatgacttgatttgtgaggggtatcgttatatataatttatttgtttcttaggatgcaagcatctatatagtttcacacatataatctagattttttctaaggccatgttctgattaacttactttaaatgtaaaacattcatgcagaggaataatagtagactaggttgcaaattctgtagggcaaaggatacgattatccgcaattagttaaagttttatatgtaaacacagacacaaataatcaattactatctaaatggctgtatgttgagattatccgcaggttatgaaatgacgttacataggcccaagtcttgaatcacgcatttacgaaacgagagtatggtcaaaactctacataatatggcaaaacattaaacttattattataagaagaagaaccataaattttgttgtcgtttatagaaaacaaacaatcatatacaacttttggtgtatgcttccttccatgtatgtgctcctttagcaaaaggaaagatgggagagttaaaagacaaaacgtcatgactcttgatccattaatccttttacgtgcgtatgagtacttggaatcattggtcattaccaacattaatcttatatttttaatataaatctcatacgtataaaatatgtatgctgagaatttttaaaagcatgttgccaccgaagattctgtgaacggaataaggtccagattaaaaccagctcatctttggtcataccaaacaaaaacgcgtcctaaacactttcatagtagggaacaacaaaatcaatattatcattcttcaaccatgtcaaactatcctaaccagaccggtttccattaaccgaatcaggtcaaggaactttcagaccaccggaaatttcaaaaactctgattaatcggtgtcatccttggctctcaaatacgccctaccaccagttctaaactaaaccagaggccagttttcactttgcaacattaacactaaagattccgacattttctgactacaagagctatcaaacatgaaagattcgatactttctgattccaagagctatcagacacgaaagaatgacattttctgattccaacagctagtctaagcagttcctatctgaaaaatgtctcaagcgtcaaaatcaaaccaaagagaactgacaaagaatctattgtctacgaaaagcataacatgaaaaaagaaacttgatcttcctaccaccttactgtgccttgaacctcactcctaataacaacattacacaagcaaaccgaaatatcggaaaacacaaataaacagaggatttgtgtacaaccatgaatcattaagagaggtagagaacgtaacacacatttgcgaactcacaaaatgaaattagatatcggtttcatcatctcacagaatccctaaaacaattttacatgacttgagccattcttttttttttactttcccccaactctctcggttccctctctctagttagcatcgttaggcatgtaaatgaaaaactacactcccttaaaagaacaaaaaaattcagaatacaaagaagaagaaaaagaaggaaagtgtcaaatccagaatgtacccatttacagaggaaaaaggctgatgaagactttgaggaaacatcattgcagcaatcaatctttcttagatcctcgtctcaaaagtgtgtgtttcccggtttgatgaaaattcaataaaatgtgtcttccaaattcaataagtatgtgtcatccttagaagctgctttcttttgaaaaccaagaaggcaacaacgcatatctgcaacattgctgcaaacccagcgaatacaagacccactgttttccctgtgtttaatccacttttctctgactgtttgaagacccgagaaggaggaggaggaggtggaggagatgggggacgtaaccgccgtggtggtggttggtttctatgggattctctgttattagaatgcggaggagaagcttgagcacgcggaggaggagggggttttgaaatcggtggcggaggtggagaaggagtaggtggaggaggaggcggcggaggtgatggtaatggtggtggcggaggactcataacgttaatagtggattttgacggaggaggaggcgtgttgaactgaggcggagtcagaggaggaggttgcgtattaccagattcagggggaaatgggggagattgcataaactgctgctgcggcggcggtgataaattctgaagcggagacggcggaggaggtggtgattgtaattgaggttggggtagaacttgttgttgtgattggacaagaaggaagccatgaaaggtgagaatcatgccgagaaataataaaacaaaacccattaatcaccagagattgaccaaagagactcggatccagataaacaataacgacggcttcttccttttatcttccgtcagcagcgcatagtggaattcgattgtggcatctggagaaagattccggtcaacgaagatattgatcaggaggaggaggaggagagaaatctgaggaaataggtcttcttcctctccctatttccagattttatattccgacagaggatgatgatgatggagtcgagaagaagcaagaatcaaggaatcacgaatctgacaactaatgaatcccccaaaattgacgaatcaaattcggagaatttccggagaaaaagtcgattaagaagaacaattgactatacgaagaaaaaaccttggcggaaattttccgggaaaatggaaagacaggggagagaacagtaacggtttagggctaaatctgggggaaacagagattacggagaaattttgggaaaacgttcattttagatttcgattttacaatctgtaaataacaactccgttttgtttttttggtttcttcttattaagggagagacgaagagaaaaatagttgaatgttccgttgtgaaactctacgggatccaatgtcaatctccatcatcctaatccatcgtggcatcatcacacacaccatcatcgactatcaatcacatctcctttgaccatattcacttagtgggcctaagcccatgtgtttaatgttcatattgcccattttgcaaaaaaatgtttatatatgattcaaccattttgttatgtattccactattcaggttacaaaaaaatgaaggatgtacaacaagtttcttctacaattggattctcctagcaaagtaaagtagcagcttgtatcatctagcatatccataattggactttatactcagagattgatgacgaagttttaaccccatgccatggaacaagcatagttcaccaccagtttaccatcaaacccaaagttctgcaatcatcgaaaacaagcacaatcttaagaaatacatagagaacaagtccgaaaagataatcaagcttaaagatcaaacaagccatgcttgacgatgtatatctagtttcaggagcatggtacgaatgaaatagtgaaaatacttgcattgtatagatcaattactgattcatccgggtttggcgagaaagcgctgttcacataaacaaactaacacagtggagagatatcagcacacttgcggcaaaaccaatgttacacaagagataaacacagaagatatcgataaatgattaccaatgagtcagagtgaagctgccgtcttagaaaatcaatcacgttagcaaacttgtcactccctgaaacctgaactcaccaaagcagagcacatatataacaaagctaataatcaaaagattataactaattacaaagctaatgattatgatgttgcctaatgcctagttctagttgatccagagacaatgctaacgaagtttcctatcaaccaacaaaatccaaagaagaacaaactggtggatttctcgtaaataaaatatcgtggttaaacaaacacacatacattgtatcaactgaagatctcagtaaaaaaatcatctaatcatatccttgacagtgttctatatcgctaatggaaggttccaatacacataagaaccctaatttcatctcatagattaagtttggtgattcgcgaaaggaaggaatgattgattacaaaagaagatataccttgaatttagattgtttcagtatcggagcaccaccagtagctcgcagatgaacaacaactgcgacgaaattaaggaaaagaaaaccatagacacgatcagattagactcgtacaagagagaaatcatcaaaaattctcatcagatttaaaaccatcttaagtgaataacaggttgatcgaggttatggtatagtaatcaaatgcaagagattcaatggaagaagaaagtcaaagaatcaatggctcacttttctgaacagaattcggagattcggtcgccattgttgcgactttggaagtagaaaaaacttgagaagaacgattttggaggaagttaaagatttctttggaattttggattatagaagcccaaattattttaagcccataatttgtaagcccaacctggcccttccgatttttaaaaggccttgttttgttttgttttggaaacaaaaatcttgaaaactgatatctcagtgaagaggagaaactataaaattaccaaacattcaagttcatactcttcaaaattgacgaaaacggagatacaaaaagatcacaaaatggtatgctctgtaacttaaaatgttaaaatgtgaaaaacattttaaattatattcataaataaaactttttaatttatgtaaccaaaagatcataaaattgtgaatgagatgcgattttataaaattgattatatataaaagaaaatattcatcctattattatatattagtcatctgttggttaacaatcaaaaccgtacgtactgttgtatttcatatagatattacatgatgagaaggactagacatatattgaaaacaagacgatgacattgacccattttgagatagatcaatcgttatcgctataaagttttgtcgaataattatgatatatagggatatggtccaaaagatggatagaagacaagctcatgcattaggcatcatgcatgggcactcgatattaatgatttggagttatgtttatgacgaatccaaaggcaatagttatatgttcatcttctctacagtcattttcattgtatcctttcctttttatacaaaacttgtatatatatatatatatatagcagttggaaaaagataatcaaatattaatgtgtatttttttatttttttattttggtgatcccaacagttgtgctatatattaatttgtctcctaacaaaatcacaagttcacaaccaacaaatcacgcaaaatatagcaacttctaataatgagtaatactaatgagcctcaaaaaaaaattgaattgaagaagtgcatatatacgccaatatgccaccgcaaatggtgaaagttacatgtatttcatcatttcatcgatgttcaaacaaaaagatgcaaccacgacataacttggaatcaaacaaaaatattcttcctctcttttaaaaatttgggggtttagcttccaacattctcttcccttttgttttccttctcgtgtcttaagtcttgaccaataaacaaaattagcctaagaacacagtacaattaagatgtgtgtgaaatgatatgactagaaagcaatttcaattcactttcagtacccatttctaaagtatatttatcaacggtctaaattgtgcaatgtcatataattaatgtggaacggaaaaaaatatacaaaactgctatacttatcccacaacaggttgaattcgtccagcaaattgatgatcattataatcatgagagaataagctaaacaacaatcaattttcttatttaaaacgatatatgtatttttgttggcatcgtaaattttaaaaacaaaataaaggaacacagtgtttgctactttatatctggtccagtgtgtgggatctacaaattttgatgtggagtgtgaagattttttcatagggatcagaaaaaaacgatcaggagttaacacgtctgcacgtgggagagttacgacacataagtggccacccccgtcacgtgcgggctacatttatatccactcgtttcttccttttggtccgacttcattggtccatctcgtcgtctcttctcggcttctccaaacattttctgattacttgatcgttttctcaaattaattaacactttcatctgaattattgcctttcagcaatatatcattcatcgctatatataatatatatacattcataaatagaaacttgattaatattgaattcgacgtagatttattagaactagccagttgttgacacatgcacacacaagaaagctttacaatagtgttgagagtgacccaccatttgcaccatatgtaccgttttactacgacatgtacacgtccgcgtgcacactcacaaatagagagtgagtactgtcgaattaaatatatatatagtggatggagactagtgcgtgtgtgtcttagcttgtgtgatttgaaatggtgtaagccctagctagctacttaatatatagaaatagctggtaatgcatgcgaatgacgagttgtgcatggttgatatgggacattgtatgccccttaattattcttttatctttgtaacatatcaatcttatatggtgtacatataagatatgtagctgtccaaaataaatgctttttattgatttgttgtctcacgacgaaaattcttcgttaaatacgtttatatacacccatatattctatatagtcgcggtactctattattaatgatctagagaaaatcatagtgttaaataagatatatacaaaaaataatagagtgtttctatatcctacaaatacaaccgctgatttaacaggtgtttctatatcctacaatttttgttgttgtcaaattcgtctttaccgccattttggtttatactataaaagagtaattagttacttgtttaattgattagatttgattgttgcagtcaaacttttgaaattaattggctaaatcagcacgttactctcatgattatattttcactttcataactcccccacttcacccaccacaaatggggacaaatccacatatattatacttaccgacgtaagtatccgtttgtacactaaactttttctttagttatgtcatcaattcaaagtcgcatatatttgattctttagtattttgataatatatacaataccgtaaatatcagttgttttttttttgttttttttttcttttctttttgacagcattgaattatatatgatacatttatttacttttttcttattgaaactattaaaaggattgattctcgattatgcgggaattgcaagctaagctacaaattgaatagtaaaacaaccgttttattaaagtgatctaaaacaaatgtaaagaaaataaaagtgggaagttggggttactagagtatgcgatctttcctttgtatcggatacttttgaccacatagccatattagcctttttttttgtttgtataggcaataaatctaatcgtgtttatactttacttattatataaatacatatatttcaagctaagcagcatgtttgtgttagctttaatagcttatcataacgctatgattcggtggtccaattagttgctttgaaccaaatttaattttgggcatgctctttttttgttttggtcatgtaagcttatgcaaacaaattttcgaaatatgaatatattattatgattttacaacgttacatgtgtggattccttatctttctatcagtgcaatcaaatcgaaggttgacatgacaagctgacataatgtacgtaaaacattaacaacacatgcttcgttatattaatatagtgttttaaaacgaaactcttaccattctagtatgaatttgcatgccgtatttagagtattaagaaatagttaatcacagacaaaatttgttctaacaacatctacaaaaaataaattgatcaacttaacagaatcttgacaattgatagatatcaaagactatactgacgtacgtccatgatcatcttgtggtttaatcatccgtgataggtcagtgaaaggaatgtatatagttataagaaacagacgagactgataatgcataatccaacattataatcttaagccatgcttagaacaagacaagccaatccaatcacgttcaggcaacagaaaagaagaagtactcgaaaaagaatcaaatattggatactattgtccatgacatttgagaccatgtctctttcacttttttccccatcttagcgatcattgttagtagcatcaaatcaaatcttctttactttttagttaattaatatatttttttgttatcaactcaatctttttctaattatagttttaatttgacctaaaacagagtaagaaacaaagaaaagacaacgactctctgctagctgttctaattgacgacagagaatagaacacttgactttctttttttcttcggtcacctctacgattctaaaacttgctaattaagctgcttacttatgaacttatgactaaaatatataagtttaggatgatcatattaattaaaatagatatctttataaacaagttacttaacaaagagaccagcacaaaaaaaaccgtttataggaagcggtaaaacattagtaaaaaaaagaaaatccccatggggaaaaacgttgatctaaaaattaatgacccccaaaccattatggatctaataataattatacaattaaaccagtagcaatgactcgattcatattatcaagacgagtggtttcgtaaaccggaagctcttctctatacctctcgatcccaatagccgacagattctccaactcgaatagatcagagcttgcacaactcgcagcatcgtcttcatcatcttcttctacgttattgatgttcgtagttgtaactttgttcttgttatggtaagttctaagaagatctttggctgcttggatgacacggcgatgctcttccacgcgtttagcttcgttgttatcgtagagtctttcgttgttataagcgtaaggcatggtaaaggaggaatcttcgtcaaggatcacattgactggacagaaccgtacggatctttttgatttgccgctagacgatggagttttgctcaagcaagacctagagaaggacgacgcggaggagcatgtggaggaggagtgtggttcttccacgacggcgacggtggtagttttcttgtgcttcttagggttagtggcggcgttggtgaaaagagagttaaggaaagtagcgagtctgccgcccggagagataggttgtttgacttttttcaagtcggagtagatctttaacgcttttgatttcgttctcaagaagccaccgagttctttaggtttctggacggcggaggagtggtcgacggatgatgttcgaatcggtttcggttgttgacgagaagaagaaggaggagaagcggaagatttggagcgtccgtggaatgaatctgactcggaagaggagaatccgcttgaatcagaagagctagagttggaatgtctgagaaagtctgtcttcctcctagatctctcgaaatcagcggcgattgagcggcggtgatagataggagagatttcacgatcttcgtgtagagaagcgttacgttgttggtggtgatgcttcttcttcttgatggattcgaggggaggagggggggaggaatcgtcgatggagcggtagatttggtcgaggagagtggaggagaaagaagggttacggtggtgagatgaagatttaggtttctcccaagtgatctccattagagggaagaagaggaaatggaggaggaaggatatgtgagagagagcagaggaagacagaaagagtgtgttgtttataacaaggcagacaagtggtaatcattgccacgtgtctttctcgacaactctctgcctcgtcccccacaaaactaaaccaccaatcatctttttaccctctcttttaaaaatatttttatactcatggtaaaaatacatatatacatgatcaaacagaactgatgtttctttcatgttattattgggagaaaagttgtttaaaatgtttataggattacggtatgcaagacgaatatcggaaagatcaaaaatcaaagcttagtaaaatgatctaagatctatatgtatgaaaatggtaaggtttaagaattaagaattttgtcttgaaccaaaagaattatgggatatcactgctgggttacagaacagcttagactttattcacatgacacgacccaaagattcacttatatgtgttccctacttataaagtaaaagattaaagttgttccttcctcatcataagtcttatttgtttttctttaagtactagaaaaataaaaatatgtgagttatttcagcaaacccaatattgatttcttgggtccattaaaactttttttgtttggttatttatcttccaaactcactaattaaacagtgcaaaactacaagcattctaatggtttcatacacattttttatactaattacacaacattaatagtattgataatttatttgtgaagctttttggacaacaaacctattagaaaactatatcggtgcgatactttttgatcatggtttcaagaaaaaaccacgaggcattaagaaagtttgagaaactctaaatctaggaaaaggatcgaaactcgagagatacactaatcaaagaaaaaaaaactttaagtgaagacataaatagtcacaaatataaaagtgaattaaggatatatggtttggttaacaaaataccgaatatacttaatttggtataaaaaggaacacgtctgtactgaggtttaactcaattttcattcgactaaataatcactgaatttgtgaaacatcgaaatacgagatacaaaagaaatttgctttagacaataatagaatctatgaatttacaaattataaatttgaagagaatttatcaaatattaaagaaagaaaataggcgataagaaaacattaaagcgatggcgattttgcaaaagcctacaaacgctataggcttagctttaaaaaacagaaacaaaactaagaagcaattttgtatttgtgaagtgtaaagactggttaaaagaaagaactattggatgatgaagaaacagagtcaagtaatgcggctaaagaggctctcatcactcattaacctaacacccaactagcatttctcattaacaaccataattttgcaacccactttatttggtacttgagttcctaatcctagctcatatttatcttccatctacgtaagaaattattgggattgattattggaaacaccctatatagctagtttacatcttagctatgtgaccatcactcgaacttaaagctcaaatttcagtttagtccaatgtatgtaacaatctatatatactaagaaaatggtataagagaataatgtcgaggacttttggggcatggttatatagtgtgttaaaatagcgttaatttttttgacatactgaaatcttcaaacaacacaaattatcttataaattagtcaaagatagcgtttgttttaggatatgtcataagaagaaactaacttttacatgatattaatttctgtaagttgtctttaatcaaattcacttagatttgaatctaaaataaatgaggttaactgtagacgaaatcaaatcaaataatcaaacaatatatttatgattataaatttacaaaatgtgttatatataggtttgtgacaaaattgcaaggaaggagggcaaaacagcagggagacaacagtataatggaaatgattagacatagacagcgggattaagacaatatcatctatctgattaacaaaatcaggctttattagcaactagaggagttttaattatgaagaattactgtgaacgtcgctttcttttaccatgtaaaactgacccatgacagttataatatcgattatcatctttttgtttttcttaacaacttcaaactttcatctttattctatactcaagtttttttttttttcaaacaacaataacatagcattatttgaatgaaatattttattaaaaaacaaaaaagtttctaattcaaaaatttaactcagttatgatgattacattatgttaacattctatactgtcttttcaggtttgatctcttacatttacagcttcattttaattttgaatcattgagatgatgaacgtatgtctacaattcttttgaacaattgtatattgaagaaaaaaaacatgtcttaatatttaattaaacgcaatatcaaattctccgaagtaagtttcaaattaaatattcttacgcacaccatgggacaaaattagtataattagtctccacatgtaatgatatgtaaagctaattgcttatacggtttagctaacggaaagcgcttttgatacacaaagaaggaatataaatactaatgactttttagccgcaagatctttggaaaattatatagtttcgttatctcatatttttattttaatggtgttcttaaatcttaagagaaattccaataatagaatgatgctaataatgcataagcatgcggtgcctagttatattgtttttttttttttgagtggtgtcgtttgtgtaatatagacaggagatctaaagtattttagtaaatttaaaatgtaaatctcccttgccaaattaaatttgggtttgagatttatgtctgaataatacaatgtttaatactttaattagagaatgtgtgccaggaagaagaattcatgttaaaaagatgatggcgctcatttgcaaaatgattactcccgtggcctaagggaaactccatttctttttactatagtacatatgttcatgaatcaattgaaaaacaattgaaacgagttatttttgtaaagtaactagttttttctataaaaaaaaggaatatgggaaattcgactattgaatgcacacaacacaggcatgttatttttaatgaacgccccttcgattccacgaaacttcacattcgtggagctcttcattaaacggacccatcttctacaattaatatcgatcctctgtgtgtgtggaaccgtgaatgggtatatatatatatttggaaccttatatcaaaatgatttaaatgaaaagtgcgttatagttcaagacttcaagtaatgttaagtcttaataattactacatttcattgggtaaattttacatgttgtataaaaatcgtccatgtcaatcttacaatctctcaagttttgtaaatatatcgcatatcatatatgctgttgcgcaacaaaaaacaaatggttttttttttatatacatatgatatcatcttataacgcacaccataggcagaaacaaagagataaataaagagaaaagatcaaaagagctactatgtacaaatgaacagaagttgcaggggattccacgcatgtgtggatatgataaacaaaagaaagacaaaagattccgatcacatcataattgagttggtgcatgcaatagcaaaagcagattccatttcaatcaaatagctaaagagcacactcgtccaaactctttatgagaaacgtttgattttaatattttccctctaacagcccaacaaacaagaatatatacttactattatgataccatacaacaatgttgttggtgtatatatcagtcagtgtatggatatctataaatcactccattatctctgatttgacatgtcaggttcacagtgacatacaacgtttcaaacttttcatcgttcatagaaaacaatttcctactataaaaattacgtgtcgaatttacgcaaaatttagatgatttgtagggagaaattcaaatctttatgattcaatattaacaaaccagccttgatttaacagaagtagtaaggagttaggggtcatgcttgtaaatctctaaaaccgatcatgggaccttttgacttattgaggataagtaaacataattgattttcaattaaattttgctaattcttcttattttcttataatctttctacgagatatatagaatagggtcaaaaagagctaacatttcacatcattatccctctaacatgcgggttatcttaagttatgaagtatgaaccctaagcctctactctactctagctatagtctcaatcaaaaattacttttttaattacaaaatctcctcaatcattttcagtaccattttaaatcacaaagaacaaatttatagaattttcagagaatctcaagccaatccttacttgtgcggtaggtgttatcaatagtgaaattacgtttaataaaacctagaccggtcaaaatgggacaaattaatagagtattagtgactcaacatcatggagtctcaagagattcgtagagagtaatcatttctcaataaggtaggacttaggaggcctattaaatcagagaaggaatcaaagtccgtaccaattaggctctaagtaaactctagttggctccttgattaagacccacctccccaaactaagtatatttacttttctaaatatgtcaacaaaacgatcaattagattcttttgttatgatgacacagtgtgctatgacacctaaaaactaaagtaatcaaggagataatcaaaacctataggcctgagcttcaactagttctccgattaagaatatttgtaatctattctaaaggctagaggaaagttaggtcaagctcaacaactaatgattctctatcaagaatttaataaggaatatgaggaaatggagagagaagacacataactcaaagaagaacattgaacagctaaacaaaacacacaattctctttaatacttgtagaacattgacaatgggaaacactagcaccaagcaacaatgtttcactcacagggttccacacttaaaaaccttcacatgcattgtagggttcttgaagtcgaccgaaactataatagcagtaaatgattaagaagcacggacaggactttaccttgacaatttgacgccatgggagaataacaccatacctgcagctgtaaataatgaggggctatggaagcagacaaagcatttatagacaaattgttgagagctgggaacattttatgcattgaataaataaagattaattaaaacagagtttggcgtttcataaggagaatcaaaatatttgcttttggctattatataatccattagacaagaagacaaaggttagattttcttcagaagtttgatggccaattcggatgaccaagttgtgattgctgataggtaccaatttgagacggaggaggagagggaacgacaccgactccaacattaccactgaggccaggtcccatgtggtgcggattcgccatcgtaccaggctgtgacgggtggaagagaccctggaactgcatgtgagatgattgcgcagttgggttgaacgattggtgtgctgtatgggatgataaataagcaccatgaggcgattgtccagctacgttgtaatatggagactgaaggcttgaaagatctcttggattttgcatccatatctcagaagtctcagcctgtagtgttagataaggagacatgaatcagaataaaaaataattggtaaaaacataaagttcgggcacaactaccatacttatcaattatcattacctgaggatttggaacgtaaatatttccatgtttatttatcatgcgagatggatcttcaagtcccgtagcgtttccaactacattgggaggattagttggatacccattaggattgttgtaagtcccaaaacccgcaggtccaccagttggaactggtttatattgctgatggattccatacttgacaccatttgaaccgagatgagaaccgcctccaggcatcagcacatagctattgccatttgaagggtgtgcatatgctgctgggttacctgagtagcctggcatgggcatttggggaacatagactggggaaaggaattgacgataaggcatgagattgggaaaatgcgaaacatggacctgcggatacatctgttgcattgatgcctgctgttgttgctgtaacatgggaatagtggatggtggggcattatttaacatgtgagcacttaatccctgctgcattatcaaaaggatacttgatcagtttttcctagttaataaaacaaaaaagataactatgacacatgcacaaaccaactgctcaaacaggagctaactagactcttacgcatcaactcatgctggcaaactagtaacaactaacaacagaaacataaattacctcgtgtggagatggtaatccttgaactcgtacagtttcatccattgcaggactaaagtacggaaattcataactaccatgattgtcataagcctgctggaaaggaagagcatgtcatttttgaatgaatttatctttccttgatttttaagagttaaaattgcaagaacccttacagaaaatttttgcaactccggaggatcttgctgctgttcaaactccaaaggagtataaggtggaccattcctattgagtaattcaatccccgagtacgcatccaaattgtcagatctatgagtttctttctgttcgggtaactgtggctcagatactgccgagacgggtgagtcagatctagaaactctgacatgatcatcaatagtgataggcagaacgcccggaccatctgctgaagcctcaggacaagtaactggcgaactgtcaacaatatcaccaagttaattggggaagatgcatgtgatctcaaactatattcaaatgtacaaaaaaaaacccaccaactgtcagaacttacctacgatcagattctctaacttcttctgaagagtgtgattcttcgaaagcagattctgaattccttgaggaattaaactcttgaacaaagctaccaaaagttagctgacagcggtcagtctccgggacacgaatatgatctgcgatgatgacattctgactttcacttatatgaacatgtgaaagcttattctgcaacttgacggcttctgtttccacatttatggaattatcagcaggacgacgagcttgagactttgtaggtgttccaattactccagggttatgtccaacaggtttctgattagatttaggcttccactccttgttctgtgaggctcctgcaataagtacaggttgatcaagaatatcagaagtcatgacaggaaatggcttctcaccaggaattcccaatagattgaaagaagggattatattactcaaagcagaagctacacagaaaataaagtgtcgcctagcagaaatcaaataagaaattgcacaacatccattcggttaataaatatttgcatataagttaccctttgtatggccaccaacttgttgtgttctagcatattggcttcctctattcccacgctgtctgttcaaatatgacctattcttttccactccactgggcataacagactcacgtgcagtagttcgactgtgatcaatctttgaagttggggaagatggtcgatgtgcatttggaggtccattttttctaatagaggaccctgaaaaagagggcacagatggatctttaccaacattttcagaaggttttccacctaaacctccaccccttacttcacgtttaatagctcccacgggtgatgatctagaaacaggagaaggtacatgaactggatctttggaagacgaatatacaccaagaactgaattggttgatggcaaagtaactccaccgagttctttattgacaggacaatgcaaaggacgaatttcagcctgtctgagcctggcatctgctggagcattacactcgtcagttgaatcttgagccccagaagagttacgattgcccaaaccacctcttgagctggcaaacagttaaaatagagcgaaaattttattttcttatttaaattcagcatagttttcttgaaattatgagacaagaagtccttgttgggctagcaaaggaatgcctaccaagtgaacatacacactcctatctccgtctaccaaaacccaatggcagtatggcacaaaactaatctatgcttcttattgtcttaaagagttcattgacaaaaaaaaaaaaaaaaaaaaagagtcctactttactattttttggaaaagtacagctaaagcaaattaactcccttaaaatatttttacaagagtaacaaatcattctatttcacatgtataaaagaaggcaagttagtgataaaaatgctagaataagaacaataggataaattacaactgatgatacataccccaatttgttcacagtggcaaccactttgttaatatttgatccagaggactgggcagaagaatgcttcaactcttcatcaacatttggattagacctgttgtccctaacaacgcgaaactctttgttggatcctgcactaacatgaaacgaacaaattacaaacagacagaaaaacatttctaggtgaatatggtcaatacattacataaaacttgaaggcctcacgccaatggccaataacaaagattaaaaaaaaaaaacaaatcaacgcaaaacaatttcttctacgtttcctttgcttgcctgcatatatttttctggatttaaccaagttcatttgatactgccgttatatagattatgtttacgaaccattcaaaagacagcttaaaacaaattaaagatttttagtacaactgtacaagcatgcgaaagaaactggcaagtatatcatcatcaaattgatttaccagtagcaggatttctaggagatgcatttcgttgagcagcgttcctggggaagaaattcctactgtagcctcctctccgaacattatgttcaggctgtgtacgaactttcacttcactggtaacattttcaagaggtttctttatgttggcaggctcaacaaatactgtatcctgaaaccaaaggaacgccctaaaaatcagaggttatacaagaggtgtcttgatgatctctacaaattcatcaaactatttgaatggctagaaaagttgaaattttttttgacgatcaattaaattagaaggcacacaaaatactaaacaaaacaaaaaaaaaatatagcttgccacagcagacatccgatgagatataatagtcacacaagcacaactaacattatgaaaaatctagtcaccttcttcaaatgcagtttcgaaaagactaaggagagtcaaacaaaaaaactacaatgtggttgcattggcaaaaatgttaaaaaggagaagaactgggaacaagataccataacagttatatgtaacctcacctcttttttcctgtctctttttctcttcacctcgtgaaatggatctgaacaaaacaaaagctttttagcgaaccaaaactatgatggcaacaataacacacatattagtcacccaacgaaacgagagccaagaaaagaagaccaataatatttcaagtatatagtaattgaagtattctgaagagaattgacaaattatcgaaatgaaaacaagagttatccatctatcgaattatcaacagaactccatcaaacgaaatttgcataacctatctacagcattctacatacgcctcaaacaagatgttgtagcattcatcgtgatcaagataatgcggaccagagaacaaacagtaaaaccctaacttccgtcaaactaggaaagcagaaaaagagatgaagagagaagaaaccttgatgaatcagcttctccacagcctcgttagcatccatgttagcttcttttaaggcagtgtaaatatcagcatcggagtgactatccacaacttccttaatcgattgaatcatctttttcgcttcatcatcgagtcctaccccacgattaccgctagttctggacccagtcaccattacggatcaaagacgtatcgaataaaccgaaacacacaaaaaacaaagaaattcaaggatcgagtagcgaaaccaagtgagatcagcgtaatcaaggtagatgctaatgattcgactcttaaaccctaaaatcggatagagcaactactagggtttcgagtacagagaagagggaacggctttaagagaacaaaaaaaaaaaagaagttaggatttattctcacgcgtcgaaaaaattggttccaaattcactaattggataaacctaattgactattttacccttaatataactcaatagaaagattagtcaaaggagaagtgagaaatggaaatttctaaggagatacaagttagctggcaatttaactggtttttactttatacatttcttattcagaacatttaagtacatgccataattattagcaccaatcatggtcaatataattagagaaaaagtaataaagtgcacaaagtgtaattttcaaatccaataatatgaattttcttagtattaaactatatacagtacattaccttaagaaaataacaccaagaaaatccagtaaaactaatacctcctctttatagatagatgtagatgagaaagaagagaaagagatgtactaacaaccaccaactaaaaagcacattcattatctgaatcccaagttatttccatcactctgtagcttttttccaagtaaaacatataaaagaaaagtgttttgttttggtgtgtgtcagattcttctctagagagccttcgaccgtcatcggtcatcacaagtattgttgttgtatccgagctctgttctgctcccaccacaatcttgcattcgtttccccaaacttctctcggctacaaccacaaagacaatgttgttaaagtgcttgcttttgaaagggttttactaaggaacagagaaagtaatgtatctttacctgaagcgaacacgcctaagctcgcgagtcccatctggtaaagctctgattgtgatgtaaacacctgcttcgtcctgttccacccattctgtttcaatgtcacttgcattacttacagatagctcctcccctgaatgatctgcttcttcttcttcccttgagaagctacttcttgcagactcatcaacagatgatgtctcggtttttgtcccacttatgctagagagttttggtgttgtagcaagaccagatgaatcatggtgtcgactttgtgtttgggttgttggttggtgagcgagtgagccagaagaagcgtagccttttcctcgagagcattctttgttcagaggtggagttgcaggaccattcttggtagactgaattcgcgagctctggtataccaaattaaaactagttagacctcaaagtatcaaagacaggttttgatgagtagattcatgtgttcagaagtgaagagggtgcatataccccatcttcagatctaggaggagttggaagtgggacgctctgctgattgaactgctgtacattgtataattccatgaccttgtcgaaattctccgcccaccacttttgagcttgccatttatcgaacatttcacggctgcaagtaatacaaatttgaagaaatcaacaaattaggagctgacttaaccatatacaatacagaaccaaagagctaccaggttaacagtcttaggttcacaaaactcaagggatctgcagtaaattgtcaaaactagaatctagaaatatcaatcctagggagctgaagtgttcctcttgccatgaagaaagttagttagatcatcttgctctcattatatgttccacatacaaaaagaactttacgaaattcacaaacacttccccacacaattgtccttggggaattcatttaagttctccatcggattcaactaccgaaatataacccacatctcaaagacctttcttggcaaaaaggatgtacaagttctcataattataagaaatggtttgggaccacttcaatcgattcaagaaaaatgaaagcagcaacagtttccaacacagaaatctcacataataatatcctaaatatcaactgtactctcacattgcttgtctccaagaaccacacatctctacttccaaaatcaaattaaacaatttcaaaacagtatggattagttcatttgagtatcatcttcaatattcctgattggaaacatattgtaccatcttgattaagtccaatatccaaacttttacttagtgtaaatcctacaaaacagttaaaaattacctgaaccgaatccgcttcatatcattccctccctcaggcaatgatacaaatgtgatgaggacaccaggctccacttgagcaacccattccttgagctcatcttcttcctccatgaacactgtagactctgtcctaccactcatggattcaggtgttccttctccactcaaaaaacctttcaaccttgactccatttccttccccaaaatcttcggtgttgagcttccactccccgctctcttgtacgcataacgaaacctcccagaattcgaagcaacatccgaatcagcgtagcttcggttcttattctgattagacgacccagaacacggtttgcagcttttgtaagcacctgatgcttttactgccatgtctttaatctgaagattcacatacaagaatcacatgttattcacaaaattaaatacacagtgaaaaacattctgaaagtcacggacttaaattgatttgttcttagcttccaaacagaaaccaacaagagcaaaaaatggtccttttctcatttgtgtttttttttcgtgaaagtgacacagaggaagaatgtttatctctacctgtgacgtcagggacttaatctgcttagacctgggtgtttcaataactctgtcttcttcttcttcatcctcttcttgtttcttagatccaccattgttggtgtttagctgcttcgtacaagctatgcatgtcagcatctctatcactcactaaagagtttcaatttcgacctgagaatttagaagaatgaaacccaagtcacttcctccaccaaaaataatcaaatctaagaaatgagaacccaaaaaggctcataatttgtacctttttttgcaacagtagttacgcacttcaacttctaccttccaatatataaactcaacactcactaaagtcgattgcttttctctcaaccacagagattcagatgtaaaaccccaccggtgaaatgacggcgaagggaaggaggagaccgttgcggcaggggaaaattagggtaccaggatctgtagatcagacctagaaacgacttcgcattaaagactcttctttttttttaaactctctgggtcggtttacttgtggcttgaaagctcttatcagagagattgagtgagatacactcttaaatctcaacactttatgaaatccaaagccgaatgcagaagcaaaatgcaaaaaagctacgaatttttggggagagatagagagagagaagagctttgatatttgggctttgagatcgtcggacactgtgaaagtttgcgcacaagtgtggtgttgtgttcctcctccttcctaattcctatattaaacaaaaaagctctactcttttctttttcttcagagaaaaaaaaacagtaatggctattttcagattcgtctttaagtttgatacttatggattattatgaccaaaaccaaaaaaaaacaaaaacgtaacacagtttttactaacatagattaaccaattgaatagttctacagctttattgctattttttaatatccgcattttgtcaacttttgatttattatttatattaaattacttagttttgaatcgtcttgtatttcatttgctaacataactagtagtatattcttcaattttactgctttgagagtgaagaaatcggaccaagaaaatttcaaatgttattctcttctttatttcctagttttttttctttattctcttttcccttttcttgcttttttttaaaaaaaagaacaaataaaactattttcatagaaataatgaagccgtgcaaaatatccatggtgtggccacatattgacacgtgcatttttaaatgattttggctgtctaattttgcacccaaataaaggaaaagaaaaaggaaaccaaataactaatccattttgttatctgtcaattttctcaataacgagtatttcataatttaagacagtgactctgggaaatgtgacagaatgttactagttggtaattactcctaatttattcaaacatttagaggcaactagtcgtttaaattattttaaatcaactgcattcaaatatgaatgcaaaaacctaaaaaggaatatttacgagtctatataatgtcagatttggtcacaggagcgccgtgaagcaacgggcgagaattaactacactctgtggagtttcttaccatacactattttacaattcgtagttaatgtttttagttttttttttggcttgctttctctatttttttcactaatacagctgaaacatttttttaaattaggacaaaagaaaacagtttttatagcaatgaatgatcagatccgatactgcaaaatataaattaatttaatttttaccataccacgtgaatgatctgtgttttcttgtttgatattgttctttctctttccattttaatgttagctcgtatcttatagctataactatgacctatccgttacaaataatactttatgatgatctctctttcaccccatgttaaattgaacataatactcgtatagtcttaagatttctgtcttatctttttcaagtgtatgttccaaccaggtatcgtggtctggtggtaaaggaacctcgactgagacgtccgacacccggattcgatttctggtcaccagagaattaacatgcggatttgctctagcgcctcagaccaccagttccagggagccattaagtagatgtttaaaaattcctggtcgcgggcttaaacccagtggactagtcagatcactgtgtggtctggacactaagttgtcaaaaaaaaaaaaaaaaagtgtatgttccattgctaattagagaggtacaactttgaaaagtgtaatgtttcatacatgtaactcttatactttttattggccacaccagtttttttgtatttcatcattttaataatatttcagaattctccaactaatccatgtttaagtaattttggagtatttttctagtgatgcttttctgattatatatttaatttgatcaattatgatcattagtatttatgcctagctttatggtgacaaatagcatattgcaccttagaaactgaaaaaaggtataaagtgattttatcaaaaataaaaacaagtgatgatgagacatgcaaatgaagcatgtaatatttagattcaagcttgttattattaaataatcatttaaactttatagagttgtttttccaactaagcctattaatgctttttcccccaaccttttctgtctccttcaaggcttaagcactttcattataacccattttgaaagtcaagttaacattatccccatcattaagcaaaccatacccttttaaaagttcatttcgaatttgaagtatcctttgcttcaggttacttgcttttacaaaaactctttattcttgctgatttctttccacaaatgaaataaaggtaaattacaatcgaaggcttgatcctttatgttttatgtgtgttaaaagatttagaagttcttaatggctaaggtaaaatgatcgatcaaagaaaagaaagaaaagacagaaaaagaaaacataaaagcttgacattcaaaagttgaggcctataaagtttctcaaactcagtttatagcccatgttgagcccattaaggcccaaatatagttgtaccatgcacttgcccgtaggtgattggtactctacacaacgatctgtttcgtgtagctagctgttctttcctttcatgattttgcttcctgcggaaaatcaaagagttagctcagctccgatcactctctccgattatctttcgctctttagattcatggtgaatcgtttaccgtcactctctcctcgtaaaccctagctctctccgaaaccctaactcgctgcgttggaaactaatcgagctcgtccctctcctttcggaagcatttctttaatcggtgttgcagaggcgttttggtttctgatcgggttagctttctgaggtaaatatcctcttcttcgattcttatatctggatttttagtttatcttcattgcttctttattcttccgcgttattgggaatttgatgatttagggtttgttttactggaatacctagctctagctcgaatacgttggagatcctatttcatgattgcagatgattgtatctttgattcactgttatgccttcctttttttgcgtctgtttgtgctgaaaactctttgattttgtttccatttcttaattgtttgtgctgcggattaatggttgaaatcaacactatctttctttctttcatccacaacgttttctagactaatcggcatgtttgatgaatgaagccaagcaagtgttgttttatgtttatttttctgtaatggcgatgcgaggctgttcactgattgtattttgctgttagatagtaatcatcggtttcaatggtaaccttctatttatagtttctgcgtcagttgagcaattacgaatgtcatgggtttcaataactgtttttttttacccttgttagttagaacagtctaaggctgcaatgagtattcctcagtcgaaatcttcatcaaatggatttccactcaaaagaggtgaaacagaggaagttttacataagacaaatacatcaaatacaggttagctgttgatattctgtgatttatgtgcaacgtcatattctgagtcctcatgcatgttgatatgtattcagtattcaatggggaagctggaagcttgaagaggctttcacttgatcggttagtgtacttcacaacatgtaagatcgggcatcatgtggaagtgcatctaaggaatggatcagtgtataccggtatatttcatgctgccaatgtagagaaggattttggtgaggctctgaatcagaatttttttccttatagagctgcacatacaaattcacactactttttcttgcaatgtataaaattgcttgaaacttccaggaatcattctaaagatggcatgcttgattaaagacggtactttacgaggacataaatcccgttccgaatttgtcaggaagccgccttccaagacattcattattccggcagatgaacttgtgcaagttatagctaaggtgtgcctgcttttataaactgaagggaaatatttattgttttaagtttatgtcaatgtgttatattgcagagagactactttgagttttgacattgtcattactttatatcattgattttggtgttaggatctctctgtatcctcgaacaacatgtcaaatgcggttcagggtgagaaaccatcggagctgttgacagactcttctatatcacagtcttatcatgttgatcgggaaaggcagctgcaacgctgggtacctgatgagactattccacacggtgcagatttggagaatgtgtttgataacccttggaataggtaatatacgcacacacacacacacacgcacatatatatttaaattttttgtcaaatttatacttattgaatgtttggtatgttgatttgtcagctagattttcagatcacggtttcttagctgaccaatttagatgagagatggtgggaatgaatagattatgtttgtgcttgcactttagaaattccgtatattccttttggaaagcaattctctttctatatctaaagctagaattctactatttagtgaaagcatatattatattgtgaggaacagcccatggtgaatgtctcaaagattaggaagaatattgttttgatagttatgtttcttatatatgagtaatctttgctgtgtggttacctgtcttttctgtccttgatatctctcagctgatccgtttctgcttgtaggaaatggaatcagtttgaggtgaataagtcactgtttggagtaaaaagcactttcgacgaggacctctataccacaagacttgagagaggtcctcagactaaacagttggaagagcatgcccagaagattgcgagagagatcgaggctgagactacccgagatattcatgtagcagaggtaatttgggggtttgatttcaccttgattcctatgtttttttggtgttataagtttaaattcgtaactattcatgcatgcaggaaagaggccttcagcttaatgagaactttgattttgacgaggaagccagatactcatctgtccgtccagtcactggatttggtgatagtgggtttgatttggaggacaacgcattgctggatacttgcaacgatctgacttttggtggctcatctacttctgatggccagaagccagcttctagtggcaagggctgtgaagaattacgggtatcggtgagttcgtctttgatagtagttaatagctgaacgagttggtgatgttgctattcattttctttcagggtgacagtcagtcttctcggaaaaataaaaatgtagatcaaagctgctcaacctctaaacagcaatccaaagattttcctgccgcaggcagcaatatcaggtcttatttttcttgcaattaagctacacatctggaaaatcatctaaaatatatctcacattgggagttcctcttggcataatagtgagagccagctagatgagcaaagaagaaagaataacgaagaggtttcacacaataacagagtaatgacaagtccatgttgattatgccgtttaatcatgattgcattttgcgtttcattgttgttctataatttttaacattggttatttggcttccttctgtattaacatagtcagctgaggaatcaacttctggtcatggaggtatacgctactttcatttttattaacatacgtgttttcttgttgtatacgatgaattacctttcatttttactagcatgactccagtttttcttgatctgacgctataatttattatcacgtttatctcaatggacaatctatggtggattctgttaaggttgctaaatggaatttagaaatgttcttttttacacaaggagtggtgacctgttatgaaacgtccatctaattaggaaactggttgtaggctttatgtaaatatgtattgtggaatgtagatatcaaagaaggtgcaaaatctggtggtggtgcatcctcggtgtctaaggctgttactgagagagaaagagaagccagtcaagtttctagtaaaacaaaatctgaaagctctttcgggcagtctgcttctagaagttcagaaagtcgcccaggtccttcaacatcaagtcgtcctgggctatcaccgagctcgtcaattggttctatggcctcatcagaaaagtccacactgaatccgaatgcaaaggtattttgtttgatgttcaaacttgataaagtgttaactgtgtgtgtgtttttactaattatgggtcgttgggtctgatcaggaattcaaactcaatccaaaggctaagagtttcaaaccattgcagtcagctgctgcaccacctcaatctccaatcgcagatgcctcattctactaccctggtcctagtcatgttcctgttcagcagatgcctggaatgccgcctgttaattacggagtaagttccgtttgttatatattatataaacccaaccgagttatgttttcaaaactcaccatgtgaaaattggcagctcccgccatatcctggcaaccaaccacagatgatgtatcatcctcaagcctattatcatccaaatggacaacctcaggtttgacagtaacacacaagccctattgaattactattcccacacacatacacaaaaaaaaaaaaaaaacatcaaaagtctaatggtgattggaattggaattgtgatgtagtacccacagcagcaaatgatacctggtcagcagcagcagcaaatgatacctggtcagcagcatcctaggccagtttattacatgcatcctcctccttacccgcaggttattatttttgctaatagtagattccctctttttgttctttttttatttttcttttacatagtcgaagagttaaaacttttggatgctgaaatctcatctctgtatgtgtgtgttttgcaggacatgccatatcataataaaggacgagagtaataactactactacccgatggtgatgatgttttttttttttgtgaaggaagtgtacgaacccctctctggttttatccactctcccttacccaatcactgaaaccattttcttctcttttttagattcgcctactgattttggtatttcgtgttgaaaacaaaaagaaagaaaaaaagaaagaaaaaaaacgatctatctgaagtctgtagtactgagtgcactctctccttttttttggctgtatcagagatataaaatttagagtgtaggttgctctcatgcgtcttttacttcgtcgtctgcatatttttttgtgtgtgttgtgctaaatttctgggtgattttgttatctaaaatccaaaaaggatgcggtttagatgaaaagaatagaagagtaacaacgatttcaaagcaggcagaactagtcatttttggtgttgttgtagggcatgcttttttcaataagtcgttaaacgttactataagtagttgtctcgcgattattatcatgatgatcgatatgactcggtgtatatgatttggtgggcaacacattcatgttttaagattccacaagaaaaaaataaaatggaatcaaacctagttttaccagtcgcatatattattaggttaggtgactgcattgagttgtttattttttacttttttacgagtctctctcaacatttattgtttttgctttaaagtggagattttaaccgtggcttgagcttgacacttacgaatgatgttgggtcaccaatcttcatctagaatttaccttataatcacttagttcaattgcgaatcatgttttcgatgtattttcaacaacttttcacgaaaccaactaacatattttacggtcatccgctatgatagaaaaaccgatgaatttgctaagtttgtttctttcttttcagtatggataccgaaatgagacaagaaaacaacgaatattcaactacaataccttacttgtaattgtaatgctctttaagaatctatcaaaactcatcgttatgcaattactgatttatttcatgcgagaaaaaccaaaagtccggtcaaacaaaaaggcaagtgtgtccttatgttgtgacgacgtggtttcatcatccaaacaccggacgtgaatatcacgcgcgcgtggatttcggaacagcgatgtggcggctgtgaatacaaagatatcaagcaaggtacacagaatgtgtgtctctgtttgtttctttaatgggacattttcacttcatcagaatctgatctcaccgtaagcctttatacatagttgtacccactttttctgttttaatcttaaagtttactattttttctagttgataaaatggagtactcattatttgttactagtagtaattaataaggacagaaaaaaaaaaaggaagaagacaagagtggttcacaatcataatgtaaacaacgaataataataattaatgtccaggtaaaaaggtagtgttcatggtgaattagtggtggcaaaaaagttggtactactgggagaaaaaaaaaaaaaggttaggtgaagctttttagccatagccaataatactactcaattttgcagagacagtgaaatgctgaaattgataaagagagaaaaaaagaagaagaaagaagccatgttttgaggaaggagacatgcatcatctcatccttttatgatttttttctacatcttcaccaaatccatagattctctctccctctgattttttggtaaatttggtcgctatatttgactacttgtactctgctttgagaagaaaaataaaaccatttttgggtgataggtgagaaaaaaatctaaatactttttttgtttcttcttttttagttatgttctgttttctcgcttgttgtttggatcaatactgttccaaggttggttttattttcccttctcaagttagtggaattgcatgtttgtgctttctctgttttttttatatctaatttgtaatcaaatccgttaattctcaaagtctgaatctttactttctattttagtatggtaataattggatctgctctatggtttctttctcttagatctgttgtttgttgctttttctttgtggatcaagaatggtttttgattccttccaagtgaataatgcaatatcaatatatcatgactggtttttttacttgattggaattacaggtgactgaataaacatctcttgtctcttgatggatctactatggtctggagattagttcgtttattgaactaatgttttagacaatgcaagagttccatagtagcaaagattcattgccttgtcctgcaacttcttgggataactctgtcttcaccaactcaaatgtccaaggatcatcatccttgaccgataacaacactttaagcttgacaatggagatgaaacaaactggttttcaaatgcagcactatgattcctcctctactcaatccactggaggagaatcatatagtgaagttgctagcttaagtgaacctactaatcgttatggccacaacattgttgtcactcatctctcaggtccaccactttttaacctttttcgcctgagtaagagttcacattgctgcgtcaactgcatttaattttagcttatctatggtttcttgttttggtgcaggttacaaagaaaacccggaaaatcctattggaagtcattcgatatcaaaggtgtctcaagattcagtggttcttcctattgaggttaattattagactatcatctttgaccttattataaaccttgtagtagttcaagatgagactgagtttaaagctgaatactatcttaatgatgtctatatatgctcacaggcggcttcttggcctttacacggcaatgtaacgccacatttcaatggtttcttgtcttttccttatgcatcacaacacacggtaatacacaattgtaacatttcaagataatactgtttcttgtatctttatgaaagtatttgttatggaaatctttgcaggtgcagcatcctcaaatcagagggttggttccgtctagaatgcctttgcctcacaacattccagagaacgaaccaattttcgtcaatgcaaaacagtaccaagccattctccgccgcagagagcgccgtgcaaagcttgaagctcagaacaagctcatcaaagtccgcaaagtatgtttgtttatctatattgcaccactctgataaatagaattatatgcagaaagtttcagttattatgtcaagagtcttgactcaagaccaattttttgtatgaaactatgcagccatatcttcacgagtcgcggcacctccatgcactaaagagagttagaggctctggtggacgtttcctcaacacaaagaagcatcaagaatcaaattcctcactatctcctccattcttgattccacctcatgtcttcaagaactctccaggaaagttccggcaaatggacatttcaaggggtggggttgtgtctagtgtctcgacaacatcttgctcggacataaccgggaacaacaacgacatgttccagcaaaacccacaattcaggttctcaggttatccatcaaaccaccatgtctcagtcctcatgtgagagagctccggcaagtggtggatgagataatgaagggaagtcatccttggctaatttaaatcattgatccattaagtttctatcttataaatctgctttcgttctacaaaagaagaagaaatctttcaactattttttttttccgttggctgtttattttattttatgtgattgttgctgaatattgtttaatacttgatttaagtttattagtttcgattaagtgcatctgcatggatttgtgatttatgtataattatttgcttttagagctcacgtttgttgccttttatagtccattttcaaaagagataagatattagtcccagactatacaacataatcatatctactagtaatcatataaaccataattagtaacaagaccgatcacatggtaatcacttttggctttagtcaaatattgtgtgacatctcataattcaaacgaagttgaccaacgcaaataatcatgttggaacaaaatcatctcatatattatgtcttcacgttatcatttctcaatttctacaaacaccaagtctttacgattacattcattcacctaccattgattggacttggacatctgtctaaatctctgctatccttcagattttagcacaagatcccatagagaaaaaggatcttcatatttttgatattggtgtgtctcacggcatgcaatggcccactttgctggaggctcaaagcaataccacaaggacctcctcctcgtgttcgaataactgtcttatccgatctcaccgaagacatacctttctctgttggtccaccagcgtacatttatggtactcaattcattggttgtgctcagtccctcaacataaacctccaaatcagtgtgcttgacaagttccaactcattcatacctctccgcgcgagaacttaatcgtgtgtgttcattttaggctgcatcagctgaagcatagcatccttgatgagagaagtgaggctttgaaagcactgagaagtttggggccaaaaggagtggttctttgtgagaacaatggagaatgcagtagaagtattgactttgcagcaggattctcgaagaaactggactatctatggatgttttggattcaaaaagctcaggattcaaagaagagaatagtgaagaaaggaagcgaatggaagaagaggcggcaaagttgttgataaatggaaaatatatgaatgaagggaaagaaaaatgttatgagaggatgagaaaagctgtttttgctgcagaagcatttggagaagatgcaattgatggagccaaatctttactgagaaagtatgacaacaattgggaaataagaatggacgatggagatacctttgctggattaatgtggaaaggagaagcaatttccttttgttcagtgtggaagtagctataacctctttgtttgtcttattatttcgttgtaagcttccaaactaaagccttgtgtaaactgatttatctgcaaagttattttattgtgaagaagtagataatgcaacattcataatcacaatctaaccctctcttttactttagcctctgaagacaaaataagtaatttagttcatcattttccaccccaaatctatctaaccttgtcaatatgacacagctatagaagattagtttggtcctaaacataaggtctctgtggttataacagaacatccctcctgaaaacgcatcaagatgtttacagcagcatatagcccaaaactatgaaagcaaagaagaagaaacaatatattgaacgatcacataaacaagaaaatcatgaggcaaaaataagaattgggaaaagtcagaaagaaaatgagggaaaagttattcagagaaaatatctcacaggaaataaatgggaagatgttgatttcaagctgcagataccaatagctgtgtagtctttccctgttggtagaatcttctattgaatgatggatcacatcacacacattatgtatatccaagtgggacacaataaatggaaggagtgtatccaaatatgtcaggtttcccgagattctgtgcttctcggatattcacagatttgaagtatccatcttgtccaatgatgtgagctgtctggtagcggcaagtctcggtctttttacgtccgtctagatcgaaaaccatggcgactttcttctcctcgtcaacaaagaaactcccagcttcaacatgacacttaaagccagtgagtggtctcatatccactttcaaaaacatgctccaagacaccgcactaggctcgatcttggtggtaatccaaatctccaagcatctagcaaagttttgatgtaacacagcgagctgctcctctttgacacagaatagagacacaatctcttcatcatgagagttatcatgagagtgaaacggaagaggaagacgcggtccaaatctctctgctgtaaaatcaaaacagagtagaaaaactggaagatacgttgtatctacgtcgacctcttccattccttctccttccaccgttgctttttcttgagcgtaaaagtaagtatttcccttcaaagatacgccgcgttgattaaacactatctcccagtcgggagtgacatcaagaacactccatgaatcagagctaagatggtagatttcaaacccaaaaactttgtttcgaaagtgaggtaatcattcacaaacctcaagattttgtggttacgaggttgttgtcgtatccaagagcatacgtctagtctatggaaattgtttttgggttggatccatctcgtttgtcccaaacaaggattccatacaactgatgtctttcatgacacataacaataaaaaattcttaaaatacaatttcacacataacttagaacatatgaaggaaatcttaaaatacatgttctaaaaattttagaaattggatattctattttctaagattattaaaacgaaaaatagtctaaatatcgtagaatatgtacaaaatattagaatataaattctaaactaagtagatcactataaatcgttttctaagaaacttagacaaaattttatctatcaaaaaaataactttttcaactaaataacaatttttttttttacaaatcaactatattattgtacatctacatattatcaaggttaaatttttcaaaaatgcttaaaatatagagtatgggtattttagtccaaattggcattctaaaagaaatgtgtatatagacaaaaaaattttaagaactcctttagatttaatttccccaggtaatgtaccaatgtgaaaattaagattccatgtttgccttctacgtattgttcgcctagtgaatctgactccatctactgtgagagacacttcagtgtagttgaaaatgaccactttgtttcttttctacaattgcattaaagaaaagttaggaatatgttttgctaacaataaccatgaaaaacacaagacttacacaaatctattacttaccatggtacgacttctaactcgagtgcctggtgcgatgactatatcccaattgttttggtcaatgtattcatcgcagtcccttcggtatagtcatgtgtgtaactctggcacatgttgttctcccccaccaggaaaatcttcaaagtttataattaatatctcgatctcaactatagtaagaaatctaactctggagatttgtaaaacttgatttactggttgacctcctgtcatgtgattggtttcgtaattaaaagattgtaaacagaagataataatcaaaagaaaatactggttgaccttctgtttacaatcaataaatgtaatctatgcaaaatatcttcaaagtttatcaagataatctcgtaacataatcaatcaacaatcacatagaaatttactcgtaattgcaatgaatgttgggtgcaacaagaattaagcgtttttaccttttcatatatatatatcgagatagaaaatgtaggttacgatgattaattatgctctccgtttcctacgtagctttagttcctttttttaattttaaaaaaatatgtggtagcttaaaccagaggaatagtatcaaaaagatagcaggatccatggatttttttttaaaaataatttacataactctcgcatattgcgaatcacataacattactacccaatcacacaagtcactcttcaggtgataaactccaaccctgaatggactctgttttatctattatataatttatatctcaaaaaaaatattgcaaaatttttcatcgcaccctaatcaaagcgtcttcaccagattggatggatttatggtggacatgcaactttaatttaaggacccggtttagcgacttcagtgcaagccgctggaaccaactttccgctgagaataggcttgatgttagaacatgctgagacagctggtccctctttgccgttgtggaccaagttgatgtcagagagagcaatattggtgcaaggaacgcctttgctgcacattagcttcactgctacctttgttgctgatgttcccttaatgttcttgatagtcacgtctgacaacttcactttcgatggtaccttcatgtatattaattgaagagaggtttaaaagtttgatcgatatatacttgactagatagttttatgtgtagattcgattcggttacataccccagctttgcagtggccataaggacagtactcttggtcgatgagaacgggaaggctaacattgtccattgtgatatcttcgaaaagaatgttggaggcgataccggggggagatcctggccatgtcttgatgcgaacaccattgtcagtgttcttgatgaggcatttcctcacggtgactccttttactggttgttcattagggtatcttccaagacttccaatggaaattccgtgtcctggtccacattctacgttctcaacaatgagattttcggtaccatctccaatggaaacgcagtcatctccggttttaatctttgccccaattaagttgactccattggaccttccgatgtggataccatcggtgttgagactctccggaggtgcatcaataccgatatccgtaagagttatgttcttgcagttaaggatgttcatgtggaaaagcttgctgtttgttgatgtaatactgttaatctttgagtttgttagaccagtgaatcggatgttctgttacaaaaaatatcataatattcatcaagtcatatattccatgaaaataataacgtttttattgtaattatgtaaaattgaatgtgcttacgatagggagagagttgcatttgccggttttggcgcagtcattggccttccaagcgagggacccttgaccgtcaaaaatagctttgtttccattcaaagtgaaatcagcgagattttcgaaatcaatccatccggcatgaggcttagtggtcttgaccgtagccggagccttaaaattgccattcaattccaaagtgactggacctttgcatggacctttgaactctaggctctctaccaaatactcaccttttggcactgtaatcgtgctccctgctgcacaagcttctttccatgcagccgcaaatgcctatacatgcatgcatgaatcaacgtgaaattctttcttaaacaatacaaaatcgaaatataatataaaatatacaacaaacatttggtacataccgcactatcatcagttttgccgtctcctttggctcctgatgctttaacatcaagtgatgcaccgcctggtttggcacctgttactttagcaccaactgatgcagctgcaccgccaactgctgtagctgcattttttgctgtatcttcaactgctgtagctgcattttttgctgtatcgacaacaggtgtcccgtttgctattgtggtggccataaccactagtagcacaagaagcactccgcttgctttgtgagaacccaccattttttattctctttttattgattttgttttaatactttttttttcttcttttgtttattctcttcttcttttgtttttgtgtttattgatgttttgttctgatgattcgaaagtccgttttatagaggagcaaagggagatagaaaaccacaaactcttgcattagctaaaaataattccgaggattgtgctcaaggcagaagaatgaccaattcatggaggccgatcccttttttttggcatcactcaagatatatttatagatttttgaccaaaatcatatattaaagataaggtatggtgaataattcaactacaaattaatacattgatgagagaaatctgcctctttattctactagtttgaagtttaagtctcaatagttttgggtaaatagaaggcgaaaaagaaccggcctcatcaagacaaggtttgatacttcaaaacattttcacactgtgtcagtgtctcaataaaattttagaactcttaatgaaataacgtttattttttttgacaaatttatatagtctaatactaactttttgctttctttttattaagcttacattgaaccaacggagccattgttatgtacaacaaattaatcatatggggactatatatatacatacatacatgatacatggactagttaacaatttgaggacccatcagcttccccatccgaccatggttccggggcgggaaaacgcgagtcctcgatcatacatgcgttgaatctcttctctgtattcagtcagagactcatcaggaattgttggagtcagctccaccacatcacccatcttcagcttccacttgaggtcacttacaggtatttggttcagtcttggccttagttcttcctttgctggtatgccatacatggaccacctcgagctccctggccccgcccggctcagcagatccgagactgttgaactcgctggaaattcttgcacagacatctgcatattccgatttgttcagtataacaatcaagtgtacaactcttttgtactcgacaagataggtttataacaaaccttatcattttcgattacaatgacatagactggtccatcctggctactgttaggcttgtaagaagctgggcagtcctcagagtgagacggaaacttgcaagggggtttgatggaatctgaagaacttatggaagatcggtctttgctcattgcttcgcaatgccaggttacgacccaccgagcccattcaaccatctgaagcacaaacgaagagtatttgcagccaccttccttgtatctccaatgagctgcaaacccaaattctgcttgcaaatgcatctcctgtgtacgtatttggacttcaagtggaactgttccattgtccatcactaccgtgtgcaaagattgatacctaaaatccaaattaccaaagtcagattcattaccttttaacaagccacaaccaaccacaacttaaactatgagatatggagatatgaacttacccgttgaatttgggatgagttatgtaatccttcagctttccaggaacttcagaccataaactatgaactactcctaaggccttgtaacaatctccttcgttgtcaacaatcaaacgtaacccatgaatgtcatgaatttcatccactgttagctttttcctggtacaatcgaatagacaacaacattagtcttctagtttcactcacatcttttgttctgtaaaagggaggaaatataacttactttaacatcttgctgtaaatactatacaagctcttgtgccggccacaaagaacatgataagaaatgcctgctttcttaagagcttgctccaatttctctattgcagaagtaatcatggcttcatcgaatgaatcctcgagcatggttgacatctcattatgctggtttgggtaaagatgtttgaaacaaagattttcaagctgaactttccaggtagagattcccaaacgattagccaaaggtgcaaatatttccaacgtctctttagcaaacctctgctgcttcactggggacaaagcgtaaagcgtcttcatgttgtgtaatcgatcagccagttttataagaacagctcttgcatctgccattgcaagaaacattgtgtgcaaacgatctgcttcaacagttttacacgccgtattgttctctctagcgagtttgctcaattggctaagcttcgaaacctatacaaaacaaacatacacatggaagacaaaggtcaatgaatgctgaaaaactctgcctttacaagtgaccaagcaaccaaacaaatagctccgacataagttaatcaatgagagtacatatttcttaccccttcaaccaaatcagcaactcctgctccgaagtttctgagaatataatcatagctcatgaaagaatcgtcaatggtatcatgaagaaggccagcaacaacaacagttgagttagctccgatattagccaacaacatagcagtctcaacacaatgctgaaggtaaggatcacgactagctctcatctgataaaacacacatgaaacgaaaagttgagtcacactaaaaccaaacaagaatctaaaactagtgattgagaattgtatcttttcctacttacttgtcctctatgagctttctctgcttcataaaaagctttgatcacagattcatcattgaaaatcttgtgtctcaattgtgcacgtcttagcaaatccctagcatatggctttatcgtatcaacctccataggaaacgttagctcatcaacgagaacagaatccgatccgaactcgtaatcaacacatgatccaagagctttcctaacgaaaccattgaacaatccactagctcctaaacgaaacgaaccatctagattccgatcacgagacattctcatcggagggctacaactacacgagaccggaccatgaagcacagagatagggctttggtgatctcgtctaaatgaattcacaaatttcgccggagaataaccaaaggagctgctaaagctcagatctttcaaatcatcactccgatcatagcgtagtgaagagaactcatctactccggttgagtatgagcaagaggaagaagatgaagatttgactgatgcgctggagaaaagtgaagagagacctccaacgattggtttctgcggcgaggaagccatggaagaggatgttgacgaactcctggaggtgagatcgagatcacatgagatctgatgtggcgtggaacaaacgctgcttggtggactcgcgtaaagtgctatagtcgtcgccaccaccattggagctcgttggttctgctttataatcctaaagttcagttttttctctctcagaaatcaaagaattaaaattatccaattcccagaattagctcccaaaaatcgtcaaatttcccgggaatttaaagtcaccgtttttctattgaaacaaacagattaacacaaaacccacaaattctaacacgaaacccagatggattttgagttgtacaaggaactttaatacagaggaagaacagaacaaagcctaaagtatgtacaatttatacgagtttggaaagaaattgaagaaggggaaaaatcgtagaaacgagtctaatggagacaagagggtgtgtgaggaggaagaaggagaagaagaaagttagacgctttgctttaaggacgaaaattaatctttgatttttctcttcgaaattagaaactactactctctctctttttcctctgttcttattcgtctgtttaagttcggccgaccaaaactaaaccgatcaatactactattaccgaaatacccttttacgtaatcggtaattaattactgagttaagtgggtttattacagtctaatcttgttatgtcgttatccattgctgttcgtaaataattattaaaatctttgtattgggtatagaatatataatctaatttttctaatgctttatccacgagccaagatttatgaaatcttccgtgatattatatctaaatttgtggttaaatcaacttgtcctccaaactcaaaacacatatagattaatgctaaaagaataatcaaagctaattcgttgtgtgattaaagagacttgtgtcattaaaaaaatgatgacacactaaaatgattaagaatatatcctatcagatgacatcgatatctcaactccaatttggctataaaatatttaaaagcatagtttatggagtactagtcactaaatggcttttgtgtgctgattaaagacattttaagttaattgtactttaacctaacttgtgtgataaactacaagtctcatacttagatctaatatttcttcttcgaatatttttgtatgtaaattttgaaaacttagtaaaactcaaatcctaataagactctgataaatctaaatatttagcatgtaggttttctatatgaattgaatgtttaggttttataatagaatttcacactaatgagtactccaataagcatatcattctttaaccaaacgaatacatataaaactcaacgacaactttctataattttattcctgtttcaaataagatattcgtaatcactattattcacatatgctttctctagcttcacgccaatgcatgatgacaccgccatttttatttttgtaagttattgaattaatcagatttattttagtatcttcattatccacttgggatttttttttttttttaaaatgaagataggcttatagcacagtgtcaacggcagctgagtcatgccatctgtatcagcgtcaacttgaatcacttgatccacttttaactagtctcaatatggattatggcgactgtttaccaaaaaaacaatctctttattactatttaacatagttgttttactttttggcaaatggaatttgttactttaaacatgaacaaaatatcagcaaattgtacaaaaagggtccaccatgagatttatgtttgtctactacttttcgtttttactttctatcgttttatttcgtttatttcgcgaggtctcgtcattggttattttttgcatcaataagaggaatctgaatcgaacccacattgctggcttggttaataactcttcgaagccgtctactcaaatagtattagcttgatgatactaataaagggtgataaagtttatatctacaaaggtaaatataaatctatttataaatagcatggaatcgatatgcaatttgagactcggttgattactagattattcaacagaaaaaaagaaaactacatgtatagtgaaatcaattccttcaaatggaactaacacagtcaaacatgattggtttattgaggaaaaaaaaagatggatggttaatgatatcaaggcaagggcaacagtgacattttgatgcattgatgttggattcataaaacccttcaaatatattgtaagttaatatgcccgatagtctagaagataggaagggagtgttgataaggacacaccgacgcgttccggagaaaaactttagaaagaagaattgaacttgacacgcgtctaatttggcggccattagaaaaaaaatgggtgtcacgctcatatcacgtgtccataccctagcatcaactccatgacttgtggggatcacggtgtctttttaaacatcaaacggctacggttgagtcttcttcggcttgaactcagttacagccgtaaatctacttctacggttgttgatagtcagctggtcaaagtctgatacattctgtatcacgtgcgtcacgtgtgttagtgtattaatatgatattttcgtttttgtatgtcgacggcggaagaagattcatataattcaattttagttggttagagaatattggatttatatgcagacttggagatatttagtggaatcagatcggttagtttcggtttatgacaagaagatgtggtccctaaataattgggtaatgtgatttgcgtaagaagcaaacgtattatgaggattatgtcagctatgactttaagtctttaaccacgtggaattgttgcgtttgccttcacgcaactagcctccttacacacgcatcctcgttccggttttctcttaaccgagaaaataacacgctcgtgtatattactctggcttagtttgagtaagcttattcattagcccattactctagctcctggactgggctgaaaactaagtattttgggtttataaaacccaatgatttatatcactctttttagtgtttttacaaaaacaattgggaacccaaagaattttgtcaaattcgtaaaacccactgaagtacagcaaagtttgaagcaaagaaaatatgttttttatactaacaaagcataatcatgatttataccttttaatccagggtgatttaggtgagtgatctaattttgaacaaaaatttagtaaatgactacgctaacaacaaactggtgaataacaaaaattaatatcctacacttgtgcgaaatcgtgtgtatatatactcgaatgatataatatcttcatactcataaccggaaaaaaaagaaagagaattgaagtatatattttctttgaagttagggagaacaaaacatctagctaccgcacaaatatgaagtacctgcatatcatgtaagtcaacacataaaaatatgaacagcaatatcttttagccgacaagaatcttacggaccaagtttttctcatggtccaacaattcaaagttccctttgtttttcatatcttgtttctttcatactgtttcatatatagttcatgacatctttttaataaagaagtttttgacatttttgtgacagaattgttatacgcaaattaaatttttacatataattttagacagaaagaaattgaaatatatagtttagacggatatttaaaacacccccaaaattatgaaggtaattaatttgatactcaaaagtgagataatttagttatacaagaaaaaaacgaggttggtcgacgtagccggacatgggacagaaagataagcctaagccaggagcggcaaaagcagccgtttccaccgtcatgcgctgctggatggtggcggctccggcttcctcgaactctttcactatagtacgataatacgctttgatcttcttcacgagcctcacgtagtacagtctcagccacttgagtctcatcctcgtcaccaccttcttgagcgagaaactaccacgtggcgtactgtttttcccgccgagacgcacaacttgtggtttacgacgacggagatagatctttcggcgactcgacggccaccggaatgcgctggaggcggcagtgatgactaaatggggatccatagaaatcccgcgagagaattttttagaaggaagaaagtgaaagatggtttaaggagttagattgatgagaaacttgtatacttatataaagaggtagtaagagccatgaaatttgttatgtggtgactttatgactaaatatgacatattacgtaatttccgtgaagtgaataatgaagaaggccagtaagtagataagcttagacaaaagagtaagccattgtatgtcttgctgtagaagacgacacaaaattacgtagctcaagggacccattttgtctatatattacatagaaagtccactttagttcggtttttataagttgtagtgaaaaccattcacccgaaaatgatatgtttcttgacttctgaatagtttgtgtgtgcgttaattaatggacggcttgtgtttatttcatttatttatttctgctttgatgttgactaatgctatagtacttttttgctcttatatacacaaattttctctcatcaaattttgacattttaattgactgcataattcacctttttgctcttataaacacaaaacgtttatggtaaaaaacaaggtttttcgcatttgataaccatgacatcaacgtggcttcacagtccgcatttaacttatagtgatccaaatatagcatattgtcaaattgaaatcaaacaagaatctaaaagtttacaaatgccaatcggattttctgctcattcacaccccatgcatagtggtctaacccaagagtgagggctcattaatgagtatacagatcggcccattaacaacatggcccttttaacaaacccgacaggacttttttctttttaatgaaaacatacaaccagagcccaatttcaatgatcaatcagaaggactgaactgatccctgaccccattggacggccaccggactcttaacaacgtgttcaccgtctgtccattcgatcgacccgaattcatgacccggcacggatccgactcctccgccgagcacaacgctcttaaatgtgacttcatactccaacacgctcttctccttgctgaacgcaagcttgcttggagaaacatcaatctcaacattcgccggagatttaactccgacttcgtacacagcgtcgacattgcttcccacgtttttgacaacccttttgtatttcacaacttccccggtcgatgcgaaaaccacggagaaagatgggtaattgagatcgccggcggttcttagcttgctcgtttcacatgcgtcgtaaagagttggatcttgaagaaagactagaatccccggaaactcgtatcccacggcgcagaggaaagctacgtactctttgacctcgatgtcgtaaaccaaaccaggattcaaagctttgtttggatcgacgtgtccagctccgtggatgaatgagttcgatgatttaccggtggcgagatc

SEQ ID NO: 415 - DNA, 73859 bp, Arabidopsis thaliana
ctcgattggttcgccggagttttcgacatcgtaagcggtggttacaagggcggatttgattgctgcaggtgaccaatcgggatgagctttacggaggagagcggcgagtccactaacgtgtgggcacgacatcgatgtaccggagatgatgttgaattgaacccgtcttggatcgatatctaaatcggtaggaccaaccatcccggtccaaccggctaaaatgttgactccaggagcaatcacgtccggtttaagaataaccggtgtcaagtgattcggtccacggctggagaaagcggcgactctgggagaaggaggagatggtccgatcaaagtgcctaggaaactgatttttgcagtgggagagtctgatgttttgatgtagtcgcggatttgatctccagctttagctccaaccattgtcgccgggacgagatgcgaatcggcggttaattcttcaccgctttcagctgtgttcgccagaatcataccagcaccaccggctagcttgactgcacttcctttctcaactcttgcgttgcctcctctgtcacagagcacgattttgccttcaaccaatgatgaattcaatttcccagggtaacacaatctgcttccgcaatcgccggaatataccagagaaagttgagaatccggtagagattcgcctgcgtacagtgatgttcccgtgaagactttcccgtctcccgtgattgcgtttgcggcgaattctctatcgacggtggacgcaccaacggttaagatccatggagcgatgttcgtcgcggtttcaggattaggaccagaattcccagcggagcaagaaacgacgatgccgtgccgcgtggctccaaatgctccgatcgctatagagtccgtgtgatactccggggcggaaccgctggctccgacggagagagagataacgtgaacaccgtcggcaaccgcctgatccatggcggcgaggatatcggaatcgtaacatccgccggtccaacagattttgtaagcggcgattctcgcctttgacgccatcccagtagctgttccgcgcgcgtactggtacaaactcgcgttagcaaccaccgatccagctgccgtagatgccgtgtgcgtgccatgaccttctgtatcacgcggcgatctcgattccttggctgcatgcttttttgttccattccgttgcgttaaatatcccctgtaaaacgctcgagctccgataagcttccgattgcaagatgaggcaggaaaatcaggtccgatctcgcactcgcctttccaggtagatggaattggaccgagacctgaatccgagaaacttggatgttccggccagattccagtatctaaaacgccgacgatcacgtcttccccgtaatttgagttgctccagagtccagagttttgggagaaaccgaggaaggcaggcgtgtgagttgtgtggatctcacgcgcttgatcaggtataacggagatgactgaaggatgacggcggagggcggcggtttggataggggagagacgagcggagaagccatgaacggcgcgtgaataagagtagagcagcgttgctggttggggagaagaagggagagagcgaaggagagagacgtgccagttgttgtgggaggagaagagggaaggcttatgagatctctgcacatggacgatgtaggattctaagccatccgatgaagaagaagaaggggaaaagaaacagaggaggagagggaagacgaagaagatggaggaaagagagagcttagccatggcaatggcgatggaagaagaagattcgttgtgggtgataacttttggtgacgtatttattatctctgaatcttgtatttcgtctatatgccacgtctgcaatttatcaataattggtcccaaatgattcttcgaaaagataacagtgaataatggaataatcaaggaggagacgtgggtcacatgactgctttaatgttgacacgaggataataagaaatgtttgcggttatgaaaatgggcaggtatgacaaaaggacaaaccaataacaaacaaacacactaagattcaaaactacgactctcatgtcatgatcaattctttggtatacaataagcctctgattagtttgttggttagagactaaacaaggttatacatagctctttaagcagcccatggtatgaatcccatggcgcagctcagcctgaaagtgacgaatatcagatatattgcaatgagtccaacacctaaggttctgctaggttgcatgtcgttgcgcgggagtatcaccatagcccaaaccaaaccgagtactagaaacccaagtgtgtagaataggcttttgtcttctggtagcatgtatgtgtcaggactcttggaccatgcgccaaaaagcatcgacatacctagcccgacgagtgtgttgaacattggaccggcgtagcatcccgatagagcgatttgtacaccatccccaccgttcattgtcaatgcgatattcgatactaagtcacccattgagtttccccaagcaagtactgttagcgcaagtatcgacgggttgattccgtaaatctcaccaaatgtcaccagaagagcaacgagttcgtttgctatcatgtagaaccatacgatgctcattataaacccaccaagaacccaagggatcaagaatcttcgaggtgggtgatcaggttctgtgtttttgtaagccagaaagccaagagtggagcctataacaacgctgaaaaagtatgcgacaccacaagcttggagactcacatcgtcttggctactccagagagacgccaaaaggacaggcgctaatgagacgctggccacagcatatgtctttgaccatgtatcttcttcgaccgatggaattgttaatctccttggaatggtcagcggaatttccaacaaggaagtgaatttagtacatgaggagctctctacttctgcagtgtcatcaatccatccccaaggtggcctgtcttcatcatgtacactaacttttgcgaaatggtttgaatagatggccacatttgacgcccacatccactgaggaagactctgtagccgaggtggaccatcctcagtctcagtttctatcaagggggtattcattggcatatcctctccaacactcggggaaaacacacttccttgcataggtagcaaaggagtaagagcctctagtttaaacctcttagcatgttttctcagaatcacattcgctgccacaaggaaagcataaaccacatatattgagacaaacgcgatggcaatccggactgtcactctaccaaccatcaaaatcaccagcaaagacacaagcgagaaaaggaagaaactcaagtctctgatgaagcaattcttatcgatcttgacttccttatccgcaacacaaagcgaaacaatccctacaacaacagaagtaacaaacacagcaccacccaagacgctgttaagaccaacttctcctttatctgtaccaacaaaagcagctatactagcaaacacatctggtgctccattcccaagaggaagtaaagtaacaccagcaacagttggaggcagcctcaaaagctttgaaagcttctccagtgaacaacaaaagtaatcagcagcagtattacccaacagataaaacaaagcaacaagccaaacacctaacatcatgtaacccaagatactgaaatctctacaggagcagtaaaagaagctgaggtaatcaaagaatccatcaggggaacaaattgggtttgcttttaagaactcgcattgatcagcataacccatgtgtttgtgtaaccctgagcataaaacagtactactgctactcaagctgctattattaccagaaccattcgtttcaatttgcctcgcatttctacgaattaccataaactgggtgatacctccggaggttgagccactaccaccattgacgaaagacgcgttccttaacaaagggtttctgagtaattcgctccgatcaaagaagaagcaaaacagaaccagagcacaaatcccattgaaaacccctcgaaatttgggggttttcgagctgtaaagaaaactaaccgcgctcattattcaaaactttatattaccaagcaagcatcgatgatcataaaccccaaaacctaaccgaaccagaaaggggcctagggtttcaagcaaacaagatacgatattgaaaaacccaaggatcctcagtttcgatcaggtggtcaccaagattaatcagcgatcgagaaattgtaataaacctgggaatttagagttgggaaaagagaattggcaaaagagaaatggtgtgctacgaaacaatggtgaggaatctgcgccggtcaaaacaatgttcaggttcatttgacacggaatcatatcaaacgatagacgtggcattcttttcatttttctaaaaactgatgattcgttagttgtctagttgatcataataaaatgatcaataaaaaataacatatcacaaattttagactttagggcgtattatttgactatttaaaacgacaatgatactactttactcagtcgtggttactggttcgttagaaagagacattctaatgttcgattcattatgagaatacatatactttcttgtcgattccccatgggaaaagacaatcttctaactcattaaaataacgaaaatagcttttaagtatttctgtacattttgtaaatataaataaacattttcgagtattggactcataaagataaatagataatagtcaataagtagtatttacaacagcaaatacaaattttaccgccaaaaaaggaaggaaagtaagaacaaaagcttcaaggatgttgttccactgttagctcttgtattagccgttcgatctgtcgcctgtaaacaggcatgaaatgatcgcttatcatcctctgcgataacctcaccttactatacaatgacctcggcgtcagaaatattcctactctaccctcctccaccgtctccactgtctcaggcctctcgagggcagaaccatcttcgtcttcttcttcgttaggctctacggcctcgggccgcaccgtgacaatatgcatgattttacccgctgggaggaatctgcgggattctttcatctcggccgtctggctctccggcggggccacaccggcctctgcaatgacggcttcttcttcttcttttatttcttttgccacatcggtttcttcaggttgctccgaagaatcgtggtaaaggtcatgctccagttgctgccatagctcagcttcagtcatccgctcttcccgtgtgtccatttccgctggatcctcacactcgtcaagatcagtggctccaagacgaggtgatgtttcctcgtaattagaacactcggcttctgatttccatttcccggtgatttcttcatccgtaacaagaagaggatccgaagtttcgggtatatcttgggacattgcttcagaagtatctaactgatgttccgagattgactgagtagcagaggctctgcgccggggtcccatacatgaccaagaagatatgcttagtgcaggacgggtcagcatgctttgagctcttctcatcacaacctgcaaaagttttgttttattcacaaaattttagagtctcaagttctatattaagtttataaggatatttcttatattttattcttacctgtgtgccactagaaaccgggcgtaacattgcaccagcgccagcaacttttgctttggcagtggccatcgatggaagtcgtgatcctaaagccgtcgctgagcgataaacagtgctgaggattcgggtgtgttcgatttgatttctcagatcatttagccaagcagatgctgttacctgatgaaaaggtggaagggaagaataaatagtttatctcaagaaaacacaacagacgttttcccaagtatataaatgaagcatagaatttgggtctaggaagctaacctcagcacgtaagtcatctacagctgcagcagaaaatgtaggcaccagatcagctccgtttatgacagatacgatgaagtcattcccagagtcggctaattcccaagtcatacaagcagctgaagaaaataggtaggaacaagcactaagtcttgtatcttaagaagatataaacatatataattgaaaactagattgtatgaaaaacctggcgcaaatgtaacacatgtagctgtagagagcattttctgctcccgcataatatatgttaaaagtgcagccgttccaccacccaaagagtgccctacgatctgccaacaaaatgcaggagaattacaatgtatagggctagagacaatctttggtttctcacacaatgggttttaggaaaagttgaaataaagattagagaacgggctacaaaagtaccttgattttgtaatctggatattgctcaagacccttgagaagacaaggggtggcaagtttagctatacaccgggcagcagcaaccataccacaatgagcataacctaagaccaaattgctgacccctctttcatttacaacagtatgatggaacggtacgattgctccagttgcagcagtcaaggtatctttgatgctatgcgttccacgaatcaataacagaaaatattttgtattgtgatcgacaagaaccgtaaaagctggcttcaatatctacatggtgcaaaattcaaaactaaacttctcaatttctatgttgaaaaagtgcctaagagttgagagttgttaaagtttaccccagctttgggttcatgaataaggacattttcctttgtaaagccggtctcttctaagaaaaacggaaacgacttcttggaaaaatgccaacacaatgtcaacaagtgcaaaagatatttgagttcagtggctacttctgatcctctaagttctacactatctttaccaccaaagacacgatcaacatgtagaagtccctacggttttaggtacacaattacaaaaagttcaattttgaccacaagataattagaaaaaaatccagaacttaagaccgttaaaacgatgaagagatgttatacctgcctcttgatgagaaaattgatcccaaacgcaagatcaccaataggccacttcccaagagtctcagagtaagtaaaacgaagagtctcagaaagagtagaaatagtctccaaccaagttgccggagcttgaataagcctatgcgaaacacggtcaatcctcaaagaaggacgagaagcagaagcttcagaattctcatcgtcaacgtcagatggaccagctattaatttccgattcaacgtgtaatataaaagagcagctgctccagctgctgttgccatagttgcagttgccatgatcaatctatccctaaaatcatcaatgaaacaaattcgctcaatccaagacgaaactcaatctaataagaatacaaaatttaaagacaaaatcgattgaaactacattggatgccacaatttcaatctccagatgcgttcttaagtatctcagacttattccagaaatctccaaaaacatgtaaagctggaaaattggatataatttcgtacaaagaacattcttttcaccaattaaccccaaagaattcgggatacaaaaaaaagaagccattaatagaaaactctcactttcctgaaacttctcgaataccacaacaaaccctactcctgataactatcgcgtcttttaaccgatgcaaatcataaaattgaatgtgatttagcttaaaattgaacaggatcggtgaactatagaaacaaaaccctaaatcctaccccaagaatagcatcgttaaaacacgaagttctttgtgaatcaaacctggaaaaataagacgaaatcgtgaccttaatttgagggttttacagtggagaaggaaggttaaggttgctttagcttatgtacgatatctccgggaaggggaagctgctttctctccgatgatgttgttagctacaagatgctgcaatgcaaaagtgtgaaaacagaattttttgttttgctttaaataaactgcgctacgtttttgtgctaagcgaacgccgcgtagtttcgcgccgccgagatctgatgcttacgtgggaatatattattggatgacttacccataaaagcgttttaacataaatcaagcagtaaataataatagtgttaaatcgacttttttggtccataaattaaaatttattcgaaacagatattttattagcttggaagattagtctcatttatttaagaaacattcagtcacaataattattaggaaatttaacattaaattggaaagtgcttaaagtattaaagtacaacgtcttatctatcgagttaagaaatcgtggacattgcttgaaaataataaaaaagggacagtggacggatttgctcgctagttttctcttcgaattttccacaaacaaattttctcagccaaagttcgatcggatctgggttttatatttttttgaagaacccgtgtccgtcttcgatcaggtgtcgaaagtctcaatcttttttaatcactttatcaatttaaaccctttggtcaaaaccctaatttagatttctctttccgtcttcactttttttttttcctgtcaaagttcgcgttcaatagccaaatcttatctcttcagctggaatctgacgaacattattatcatcggtagtgttctatagaaagaccgaaagttttcttcaatttcaaagtcagtggcgatgtcgtgggctggtcctgaagaaatttatctttcaacatcactcgctagttatctcgatagtaaatccgtctctctttctctctgtttcacatatttgttgaaccgtatgaatgcatgtagttaaaataattggccgtgatggctctgtacgcatttgggagctcaattttgcaaacaattctctgtttttttgacgtttgattttgacttcttattgatatataggctgtactattttgtggctgtatccaaagcttgtcaattttggtgttgaattgtctcaaagagacattcattgattaagatattgattattgaatcaaagctttagtttttttttaattgggtcaaatctaactgttcatcagttattgttgtcaagctaaattttagcatgcgtgagagattagatgtgattgaggttgctggctcactctttattcaacttacgaagtataaactttaacctttgttgaaatttaattcactatcggctttttgatgttggttctttgagtttaaaagtcaatgatcttcttttgctgatgtttttgggctatgagttagttctcaatctcatttggcgtaccgttttcttttttagatatgaatcaatgtgcatcagttacttatgtatgttggctctgctcttgatgatgcaggaaaactacttgtgcttcttagagatggtagaaagctaatgggaacactccgttcctttgatcaattcggtattcacttttctttccatgtttctagatttacgatattgttgatgagcgggagagatttgacttttttttgttcgttgtaaatacacagccaatgcggttctagaaggtgcgtgtgagagggtaattgttggtgaacaatactgtgacattcctttaggcctctatgtaatccgtggagagaatgttgttttgattggtgagctggtaagacttctccttgtttgtcttttcttgctgtgtcacctcgtgttttccaattcactgagtttgaccttaaactatgtattaggacacggagagagaagagcttcctccacatatgattcgcgtctcagaggcagagattaaaagggtaagacatcgcataacatgttcattttgattagccaaatttgattcatttgtgatgctgtgtgcgtgctgatgatttggttttcgggaatctgtctgttgatgcaggcacaaaaggtggagagggaagcgagtgagctgagaggaacaatgaggaagagaatggagtttcttgactttgattaaaccagattgtatccccattcattattggcttgatgctctgctttggctcgcaagttttatgatgagcctttttggtgtgttgacttaggggatcgacgcaattcttgtgtttcattttggatgaatatgacaataaatctgtgtacttttgtctttggatctatttacctttttaagaaaaaaatgttaagcaatttctttctctattttggaacttttaaacaaggagcttgcctatggctactaccaaacggaacaaaaatggagcaaatgagtagaggacgtcgcacattgcaaaatttacatggtacttattggttctgtgatcaatcaggacttttataaatagaagacatatggcacaaacaacaacacacaaatatgttcacctggagattattccaccgggcaggaaacccgtgaataaaaattcaaagaatggttctatttctatgacatcctaatgtgactgaaaaacgaaagaaagaagatagaactctcgggttttcgatcttcttttatcgcctcctcaagtgtggtggtgtggtatatccttcgaagaaatctagaacgatggtctcgatatcttcaaccgaatatttcaaatagttctcagggtgtcttccactctctatatgacccctgaaccttccaagaaacgatctataagcagggattagatgctcggatagcgatattcggagttcttctctaagctgagcatctggaaccgaccatgtggactgagtcctgtgaacctcttcgaacattgtattgaatgccttaaacctctctcttaatgcacttcttgatacacctgaggagaaactcccactcacatgtaatccttcatctctcaaactattcagtactctgacccatgtagctctctggtagtttgtggcagcatgtctaaatatcccagtgagtttccttaaataatggtctccaatcatctctcgtagttctggtgaccttttcactttctgaacaatgtaatggatgttgttcatgatgaatatgtgagctagagatgtgtctctatagtgcttggatttctcttctaagttgaaatgcaagaccacaatcaaccatatcaaatgcaaatccaacggagatttactatccaactccgtgaaatccatatccggtgtgtttggatcagaaccagtagagggattcgacatgatgagatcatccaacgtttgcttataatcagagatcataacaatgtagttcatcacataccttgtcaatggatgaatcgttcctccagggacaggaactatcgaaggttcgcgaagaaccgcattctcaaactccgaaagtatacctctcgctgcttccgctaacctcgattgaatctcaacagcctgagctctaatagcatctgatgaatctgagtcaaagattgcttcaatatccggcaacatatccgttaaagcatcatgtaaatcaagaatcttgaacagcttctcaggtgatcttctactgatacttatagcttcagggaaagtgaaaagtctcagagcagaagccttcactgtctccatgaaacaagtctcatccatggcagtgcaaataccatcaaagagctgctcacatagtctcttctcactagagaaaacaactctaatgcaaactttagcagcacgaatccatttcctgatctttccttcaacaacttcccactcaagcctttgaacatcaccaatgcttatcttcacaatcccaagctgcttaaatattgcttccatggctgatttgcgaacagttccatagacttggatacattcacgagagtaaccggcggcgaccattcgttgaacaatcgatcttagatcagaaactgcttccggcgaaatcagatccatttctcgtatactgctagtggatctgtaactgcttcttctacgagttaaccggcttgaaccggaaccacctggagaatttaattcttcttcttcgggagttacggtggtatcttctccaacttcgacggttaaagacggagagactgatggttcctcgaggaaaagtgaatcaggctcgaaagtagttgtgtgggagagaagaatgttacggaactcgtcttcgagtctagccatagcgatttgaatagctgagttggctttgacctcgtgttcatcgactacggtggcggcggaggtggcggcggaggaggaagaagaagagaaagagacagaagataaggaccgttggatttcatcaacggctcgaagaaaccgatccacctcatcacgatcgctttggaaaatcatcttccctcttgctccatcagtcgctgctgagtcccaccggagtattatcctctccgctgtctctaagttcgaaccatcggaatctaaactattctccggcggttccatctaataaatcaatcagacaacaacaaaaaatcaaaaacagtataaagaaaacttcaaaattcgaaagccaatgaatgattctcacctccaccgattcaaattcttctcagatggaaattcgtgaaggagattggttgattttttggtaagaaaccacttcggtttttttttttttgcttatcggaagaagtcttagcaaaggcaaagctgtctgtttgtattgtttttagttttaatttttggaagtttctgcgagaggtgggaaatcggaaaaaataagtctttggacttttcaactcctctttgtgtgtacgttgccgataaattttaaacttttttattccgaattactcgccggcggcgtaaaatgcccggtaaaaacttttttggtttgtcgaattattgggtgagatctagtcataaatgctattatgcctaaaacaaagtcccactttctcgatataaaaaaaaagacacacatcatgtcttattatgatctttcatttccatagtgggatcacttaagccagtaattttggaaacttttttttttcagttatctaaaaatatatatatatatatatatatgacatatacattttcaaatatacaatactttcaataaactaaaataatgtagttgtttctgtgctactaattcggattttttctttacataatttttgttataaatagtttacctaaaatgttatgacgtggttggcccatgttggcatggcaaggacatcaatttgtatatgtaatcaaattacctgcggataagagagtaccaatttggacatgttttttttttttgtatatttttgaatagtcgagaaaataaatgtagattgtcaaacctcataatgagatgtggttggtggaccatacttgattttaatcgagccgattaagtaaaggagataatacaagttgtagtcatgaatatttaaggttattgaattgtttgaacaattaggttaacttaacaataaattgaaaatttgatatatctcacatacaagatcataataatacaattttctttttcagttctcaatttgtttctctttcacacaaaaaaataatcctcattttatttgagtccttaaataaattcatctaatcagtcacaaagaccggactaatccaatatacacgcttgggtccacagaacaagttagtcagaaatactggtcctcctttgatatctgcaggataaacgacgtcgtctttagatatgggcttgggcctaagactgggctgtcagtaagataaggaacggacaaggagtattattggcagtcactaaaaatggttgtcacagtgccgtgacgttagtttcacctgacttgttctctgaaaattagcaataaaataaatcgtgctataaatagttcacttgtgccgcacggtccctctcatcttctacggacagcttctttctctttcctctctgattttttttttctctttctacctttttctttttttattttctttcttttttttttgttagtttttttttttttctttcttcatctcgtgaacgatatagtacctgaaccctagcggaggaaaatcaaaaattgtctaggagaaacaaacagagatatctttctttctttttatcagtggggaaaaaaaatgcagaatccgagactgaagcaacatcagcagcaacaacaacaacaagctatgatgcagcaacaagctctgatgcagcaacactctctttaccatcctggtgttttggctcctcctcaggtttttattttacctttattacatcttcgatgtgtctaattttggtcgaaattggatttttttttttttgtactgtcgtctctttcgtgagtccttttattccgggtcgggtttagtttgtgttcttcatttgaagataatttttgttcatattctgtgtttctttttctcatttgattgaatggatggctagggtttccagatcctgtaggctagcaattcgttccttttatctgttgtgatgtctttgtgttttagttttgttgcgtcattaccaaattgagctgatatttaccttctcgtgcttttctaatggggatagaaaagaaattgcaatccttttcattttctttctttcttacttttggcaattgcagttagagcctgttccaagtggaaaccttcctcctggttttgatcccagtacttgccgtagcgtgtgagtgaatttttttagcatcgctttgtctgaaaggtgcagttccgagtttatgttttaacttctccaattattctaatattggcaggtatgttggaaacatccatacacaggtcacagagcctttgcttcaagagatttttacaagcactggccctgttgaaagcagtaaactcatcagaaaggataaggtagttagattctaaaatccacctgatttctactttattgtgaaagtgaccctcttatatagtagctttcttgttttggacgagcatacctcaacaattgcacatttttaatactttaaggaaactactctacttgctgcttactaaaaatggactcataaagcatgcatctttttatttatttgcagtcatcatatggatttgttcactactttgatcgaagatccgctgctctggctatactgtctctgaacggaaggcatctgtaaggaacaattttcatagtttccttcctctcctcttcttatcgttcgaatgcttttgtttaggttataatcgtcgagtttacaggtttggacagcctatcaaagtcaattgggcgtatgccactggtcagagggaagatacatcaagtaagttttgactttttttaagtgttgcattttgtttgtatgtttttgaggatactcaatgttttagtttccatgagttgcaggtcatttcaacatttttgttggagatctcagtccagaggtcactgatgcaacattatatcaaagcttttctgtcttttccagttgttcgtaagttctgttgcttgatcagctccttttaactaacttattctacttggttgtaaaacaaatatcataatctctgactgtgtctaatattttgaagggatgcgagagttatgtgggaccaaaaaactgggcgctcgagaggctttgggtttgtttccttccgcaatcaacaggtaatgtacattctttaaatcatgcagtgagtttttgttttagctcaaggattgttcgtggtttacattaatgttaaatgttgatttcatttgcaggatgctcaaactgccattaatgagatgaatggtaaggattatatagtagctgagatctcagtacttcgttctcatgctttcttgttctgaagtgcttagaatttgcatgcaactgaatgatactgtgcctagaaagacctgctgaaagttttcttgatttgttagtcaagagctgctgaaagttgcataacttctgtttcagtgtcatctaaaattgaggttttctctttattcttagcaattaatctttgtttctatcacatcttctcaggtaagtggttaagtagcagacaaatcagatgcaactgggccacgaagggcgctacttctggtgatgataagctcagttctgatggaaaaagtgttgtggaacttacaactggctcatcaggttgtctttctattactgtgcaaattcttatgtttttttctccttctcctcaaatggaatttacgaacctacattgattttccctgagtaatatgaaaaactttaagttaacaaagccatattggtcgtttgattgtgcagaggatggtaaagagacattaaatgaggaaacacctgaaaataattctcagtttaccactgtttatgtgggaaaccttgctccagaggtacattatccactaggaagtgctccttgtaatactatcacaacaaaaacagtttatttgaggttctttgatgaagttttacattagtagatttcgggtacatcgttacagctatctatcttgcaggtaactcagcttgatctacaccgttacttccatgctcttggcgctggagttattgaggaggtccgtgtccaacgagacaaaggctttggtttcgtgagatataacactcatcccgaagctgctcttgctattcagatgggtaacactcagccttacctctttaacagacagataaaggtacttttaagtttggcttaccactctaaaccctctctatttgatcttactgctcccaaaagttacttcatctgaaacttagcatgcaatctgacatttgttatcatgttaattgtagtgctcatggggaaacaagccaactccaccaggtacagcctcaaacccacttcccccacctgccccagctccagttcctggtctatctgcagctgatctcctaaactatgagaggcaattggcacttagcaagatggcaagtgtgaatgcgttaatgcatcaacagggtcaacaccctctaaggcaggctcatggaataaatgccgctggagcaactgcagccatgtatgatggtggctttcagaatgtagccgccgcacagcaactcatgtactatcagtaataaacctcagttcgtggcgccgatctcaagtttcaatctctttgctttttctcttttttttttgtttgtctagaacttgtttgtgtgtgtctgtttgtctctcacttaagttatctatataaagttttatctgcagttgtatgattagttatgtattcccatggattgtaagacaagcgaattacattcaataaaagggatttggatatccattctatgtgattttacatgaacataaacagacaacaaagaaaaaaacattgcggaaggatcagtcagtctctaaccgagcaatgtacgtatcatagaactttccagctttctcgagatctcccagctcggtataacagtctgcaatagctccatatgcttcagtgattccagaatcttcactttccctctttgagatggctagaaccatggagtgatactgtatggcttccctatacttcccttggcgctgcagcgaggcgcctaggcctcttgcagccttcttttcttcggtggggtctttgagactctgggcaagttccaaagctatcttgaactctgtataagctttctctggttcttggttcctaagaaaggtttttcctgttttcaacttggaaatcaactcttgtttctttggttccacaatgatttcactatctgggattcttgctcccactggagcataactcaagcttggtgcataagactcgattttggcttgtctcctaagagctgcgttaatctgtcgtagttgttcattcaacctctgtaactcccctttcctctgccgagcaagcaaccctgatttggtacaccacaaaaaaagtgttgtcaaaaccccaatgagtacagttcatagaagcatagattgaagaaaagactagtcactacctccaacggtggctccaataagagcaacaagcaacaaaataggcatgctgaacatggagctctcaggctcacatatctcagcagccaaagcttcaagaggtgtagccatctgaagggagtttgtcaacaacactgccatcaccggtaatttgagcctcccaattccctgccacatccatatctaaaagcttactatcactaagaaaaaacttgacaacaaaaaataaaccgagtcaaacaatataatgtgttttagctggatatagctagacatcccggaattcatcaccaaactacctcaaaagctgaaaacttgtcaagagatcccacactggcaaatggcgtttgtaagattccctttccttgtcgctccttaggctgtgaagacgaatgtataattttggagaaaggaggatgatccccaggttttctgactactgagtagccaatagatgtagcaaattttccaatctctgagaaaacgttatggagaaagatgacttcagaagcgacaaagaattggctaatgttattgaaatgaaccaacaaactattgatgcctcaaacaatttcgatctagaagttctgatgcctcattaccaaaagaggatcactcatatagcaacagtgactctgaattggaaatctgattcagcgaatgagctatgagctatgagctaacctggagctcgagacttgtcacgcggcggtggttggccaccggaagtatgagagaaggaggagcaacaccggataagcgccgccatcactaaagaaagctctctgagaggataaaacaaacgctttgggaagcttaaaactcgtttccgctggtctgttttttatgaaacttgtacaagactgcccctgtttttctatttaattacagttaaacccttttttactaagcttcaaagatgaaacgcagcgtttaaggagcttttgcttaaactctggtggcgactgttctgtgtcgtcgtcgctgtctttgtctcagcggagtcttctactggagcggaggattttaaaagggttttagatttttgacgactacaaaaccctaatcgagctcaacttgagcattgccgcgctcttctgctattctaagatttgatatttctgcataccacttggggttagctttcgttggtgaagaaatggatatggatatggacacttcccctagctacttcgaccccgaggccctcagtgttagggatcaattccgtcgctatcggtaaaattttcgactacccttttccgattttctgggtcttcttactttaaagtgaatttttcctgggttgtcgtttgtttgttagtacggtctaaattagctgattctagcgagacttgaatgcgatttgaattgttggattttctctaagaactgaatcttattaggggttatggttttagttcatggaatctgggtatagtgttttgatgcccggctatgtcaaataacattgcttgcagaaagagacactctacatcgccacatgaggaaatgttgagttcaaatgtcagcgagaacagattactgtatgacgggcataacattcatagtccaacaaatactgcattgctccttgaaaacattaaggaagaggttgacaactttcacactgatcattacgaaggaacacctacaaacccgatatctgcttccaggagggagagtgttggaattcttaatgatgacgatgaggctttgtttcgtcgagtagaaagtcaatcactcaaggcttgcaagattgagaatgatgagttagcggagagtggagatacaacctttgctttgtttgcttccctgtttgattctgcgcttcaaggtttgtatgatatatcagtcttcgaatataatatgtgtacatacatgaatatgcagatatttgggtttgtttctgcatgcatgtgtgtggttctccttttttttcaaaatctcaactaagcagtgtttctgctttgtgtgtttgtgggattcccgttagttagttgctagagtcccagtattatctggttttctcttattgtaattatgacgtcttggttttgcaggactaatgtccattccaaatctaatgttgaggcttgaagaatcatgcaggaatgtttcacaatcaattaggtatgtcttctggctctgagagttaaaccgtcaaaacttcttcaactttgtgcttggttcatcttttcctgttatctacagatatggatcagatattagacatcgtgctgtggaggataaacttatgagacagaaggctcagcttttgcttggtgaggctgcctcctggtcacttttatggaacctatatggaaaaggttaggaaactcagctccatctttctattacttttggaacagggtaggtgttgtcttcgttttgatcactgatgtctgataaagctcggtgtcgtgtaatattttcatgtctacctggaaaattttcagttaaagtactgggtggtttgtgttagagatgctattattgacgatgtgtatttgttcttgcaggtactgatgaagttcctgagaatttgatcctggtaatgcattctttcgtagtcgtttttcaaatgaatcattcttattgatacatcttacgcatggacttatttgactatgttaatgtcggcagatcccatcaacatctcatttggaggcttgtcagtttgttttaaacgaccatacagctcagctatgccttcggatagtcatgtggcttgaagaacttgcttcaaaatcacttgacttggaaaggaaggtgatgattccagtatattcgttttcaatatattactttcccattgtcattttggtatgctacttgattggtgtatctggtctggtcatttttgtattcctaggtagagatcatgtataggatcgttataaactcgctaattgcagtgcagttcctttaattttcacaaacagaagttgagcaaaacggttgttgcattttcttttctagtagtgttcactctccacctagagagatactagatctcgttgtatatgaatggaaatcttaggaactgtatggaaaacacctccaaaacactattgcttctgaaatcagagtcaggtgtttatgttcctacttttcttgtattgagggtgttggtactgtttcctagactttgttcaacgtacgtaaagtattgtgtgatgaaccctcaaattgatagaggtgattaacactcgattagaatttacttaccagggaatgttaatgatctcaggtgcagggatctcatgtgggtacttatcttcctaatgctggagtgtggcatcacacacaaagatatctcaagaaaaatggctctaacgctgacactttacaccatctggattttgatgctccaacacgtgaacatgctcgtcttcttcctgatgactatgtaagtctgttcagctatggttgaagttaggttcgtttagattgttagtgttgatgagcagattttacgtttcaatatatttgttcattcaatatgaaatacatggtatatgaaacaatgctggtggactgtgcagaaagcaaagcaatgtagatgaacagggttaaagaaattttgtcagaatagccgccaatttcttttcataattaatatttgattctcagatgtttagctatttctcttggtctaaggctatatcatagcaatcgtgactgtttcttttgtctgttctagtttccatgtggatgcctatatctatactttgaaggtcatctttcgttgtcgttattgttgttaaataaaatcaatatttggaccttttttggcagaaacaagatgaatctgttcttgaggatgtatggactttgataagggctgggagaatagaagaggcatgtgatctctgcaggtctgctgggcaggtaatctttataagggatataaattctttataagggtaatgattagaaaggtgtgtactgataatgtcgatttaaattactattttgccagtcatggagagctgcgactttatgccctttttctggaatggacatgtttccttctattgaggcactggtaaagaatggggaaaataggactctccaggccatcgagcaggaaagtggctttggcaatcaactgcgtctttggaaatgggcttcctactgtgcatcagaggtaatacagaatctggatagttttgttgctttttgaatttgaagtttttttccgtctcagagacgtaatttacttatcttttttcatttgtttctgaagaaaattgcagagcaggacggcggcaaacatgaagttgctgtttttgcaactcaatgtagcaacctgaaccgcatgttaccaatttgtactgattgggaggtaatggcatgcacacttgtataatcagattgatatttaattagcatattccaactttgcgtccctggctgccatttttctattaaataacgtactgtttaaaaaaaaaaaaacttggttgtcttgccaaatcttgattctcagaattatattttaagttgcttatctgaaacgtcatacgctatcaccctgcctgtgtgtctctgtcgtattgaattatcactcgtaagattgtttaaagatggttatgaatcattaacatacttgttttcattgctaccattcctatgcattttttttgaaaaactggaaactgctattttccaacttatttcgtagcttactctatgagctgtgtgcattgacattgttttagcgttgacgggattattctgcagtcagcttgctgggcgatggcaaaatcctggcttgatgttcaggttgatcttgaactcgcccaatcaaagcctggtttgacagaaaggtttaaaagctgcattgatgaaagccctgaagctacgcaaaatggttgtcaggcttcatttgggccagaagattggcccctccatgttctaaaccaacaaccccgcgaccttcctgctcttcttcagaaacttcattcagggtatgaataacgactactgggaaaatttctttgtcctttctgtagagagctacagcccaacttactgttttattcctggcgtagggaaatggtgcacgaagctgttgtcagaggatgcaaagagcagcaccgccaaattcaggtattttgattgccaacgattttctgtgaagctattaaatcatttattatgtgcgtagtcatcccgaatactttctttggcagatgaaccttatgttgggggatatatcacatctccttgatatcatatggtcatggatagcgcccttagaagatgatcaaagcaacttcaggcaatcaatagtttttctctagattttgttacttctattaacaattttgggatatagttatctgttgattgtcggatcctagcattttctttcgaattatacaaattttcccaactcagggaggtggtggtaggggtctcgaaatgacaatacctactgcgtagtttctgatgtttcttggttattataaagaagacagatatgtgttttacagcgttgctagatgagtgacttgactcaatacgttttgcatcttgcaggccccatggagatcctcatatgataaagttcggtgcacacatggtacttgttcttaggcttctatttactgatgaaatcaacgactctttcaaggagaagctcaataatgttggtgatcttattcttcatatgtgagtcacttcaagttggttcctctgcgatagcagagttcacttatggaacttattatcctgctagatgatacattacatgcatattatgttcaactggctttttagtgatctgtgaaatgctgccaggtatgcgatgtttctattttcaaaacaacatgaagaattggtaggaatttatgcttctcagcttgctcgccatcgatgcattgaactttttgtacacatgatggagttaaggatgcatagcaggtaataaatatcagatggtagtctttcatattgcattttggagaagcagcccttggaaatatgtgtattgcataaaagttatttctttgacatttttccttctctggaaaacagcgtacatgtgaagtacaaaatcttcctgtccgctatggagtacttgtcattctctcctgtggatgatttacatggaaattttgaagaaatagttgacaggtatttaaatggttgagattttttttcctggcttaaaatatgtaatcttgagataccttttactttagtaatctcaaaagtgaaactttatggaacatcacagggttttgtcaagatctcgggaaatcaaacttgcaaaatatgatccctcaattgatgttgcggagcagcatcgtcagcagagtcttcaaaaagcaatagccattcagtggctctgttttacacctccatctactataaaggatgtgaaggatgttacttccaaattacttttgcgatctttgatgcacaggtacaattgatgcatactgacatatggcctcatgaatatatctgcgtctgagagaaatctcgacatattaggaaaatgtaggctaatttgttcgctgttagcctatttctcaatttcttaatagagacgaaatgaagaaatcagaggacaagagttccttttagtatgcaaaatgtttgtctcatttttttcttcacttttgcctctgtttcatggtatttttgttttttcctctcgtcagcaacatacttttcagagagtttgcattgattgccatgtggagggtgcctgcaactcctgtgggtgcacacacacttcttagttatcttgctgaacctctgaagcaactctcagaaaatccagataccctcgaggattatgtttccgagaatttgcaagagttccaagactgggtatgtttctctgcaattttaactctttattattcctttgatttaaacatccagtgtctagatagctttacgtacctctttgtctttaaacagaatgagtattattcctgtgatgcaaaatatcgcaactggctcaaattccagttagagaatgctgaagtcactgaactgtcagaagaggaaaatcagaaagctgttgtagcagccaaagagactctggattcttctttgtcattgcttctcagtaagtgatgccaaactttataatatatggttgacttgtgtgcacgactttgcagtttttacattgattgaaaatgctgttaactgtgatactattgaacctcgtaatattaggacaagacaacccctggatgacatttctcgaagaccatgtattcgaatcagaagaatatttattccttgaattgcatgcaactgcgatgctctgtttgccttctggtgaatgtctgcgcccagatgccactgtttgtgctgcactaatgagtgcactttactcttctgtcagtgaggaagttgttttagatcgccagttaatggtactcctttcatccaatgttcttggtccatatgttacttttacctgtatccttgctttcacccatggttatatacaacggttatgcaacaaatttggatattttctatggtgtgacaccatctcgaaaggcagtctactacattaatgtttgtgttgatcttcgcgttcaggtaaatgtatcgatttcgtcaagggacagctactgcatcgaggttgtgctccggtgtttagcaattaagggcgatggacttgggccacataatgcaaatgacggtggtattctaagcgcagtggctgcagctggttttaaaggttcggatatctatggaacatatttctcattcacctatgatttacctcctttctccatagaaatttggggatgtttcaccagcattaataaaacaagatgttacaatgaaagcacccgcattataaaaacaatcacaaacttgaaatttgactgcaggtgagcttacacggttccaggcaggtgttacaatggatatatcccgcctagacgcttggtattcaagcaaagaaggctcgcttgaaacacctgcaacttatattgtccggggtctctgtagaagatgctgtcttccagaactcgttcttcgatcaatgcaggtagagcctctgccatattagattataacattgcagacatatgtatctcgatctgcggccatttcatcttaacctataatataagtgtactaagatttttgcagagaaggaaaagtctatggtcgtttacattagtgagaactatagaagactgaacttatacctccatttattgacgtatttgcaggtttctgtttctctaatggagtcgggaaatccacctgaagatcatgatgaactgattgagcttgttgcttctgatgaaactggttttctctctttgttcagtcggcaacaattacaggttaataatacacaattctttactccatgaaaaataaagtcaaagactcatcatctttttatttcattttccactttctttctttccaaattggtaatgcaatttctcagtctgcatcattgttggttactcacctgaataaaatcatttaatcttagtaactgagaaccatctgattgatttggatgcaacacaaatgcaggagttcatgttatttgagagggagtatcgtatgtcccagttggagcttcaagaggaactttcatcaccttgatattgcctcaccttgtatcagcgccagcttcttcctcactgaatgcccagagagacggcttactttggttcgtgtaaattacgctgtaatttgtcttcttttcagaccagggattcactgatcagactgatgtatacattgtgataaattttgtcgaatgctgagatatcaagttccctttactactattggtcagaaagccacttctctcaaaggcttattataagtttataaccagcaaattaatcagaaaaaaaaaaaacagaacaaagtccaaacgtactattgtcttgaaatagagctttttatttatgtgcattgacagtatttcatactgttgtccaactgtctgattaagtctctgagactagatctgttggttttaggatcagagcatagatttaattctctcattctctgtcctaacatggtttctggttacgtcatcaatggttggacagccagaaagggccatagtaatctcaaactcatttttcagcatatcaatcacttttttcactccatcttcacccttagctgcaagcccatagactataggcctccctatctgcatcagccatccaaaaagtgtcattatatcatcaacagagagcaacctgtaaaatgtatgctaagtagcattcaaagcttacaagaacagcttgtgctccgagcgccagcgctttgaaaacatctgttcctcgtcttactcctccatcaagcaaaaccggaatcctacctttcacagcatgaacaacctgcagtttcataagaagaccagtttgttcatcaagaagaatacgcttgttttatagcaagcattgattggtttacctcttctaaaacagttatcgtagccggggaatagtcgagctggcgagccccgtggttggataccactattccatctacaccggcttcaacagccttaagagctgccaacagcatcatacaaagttttcttttatatgccttggaatttctatagagtatatgctatatattagactacgagtctacgagacatggatctttaccgtcttcacgtgtgagtaaccctttgaccagaattggcaactttgtaatagatcttaaccattcgatatcctaagattttgcagtgcaaaagattataaggaatgtattcacatgggaactttgtgtctaatatccaaggaaacaaatagaaccattcacaagattttaccttccagcttaacgaagcatcaaatgcactagaggcaaaggcttcaacccctgaaccttcattctaagagaagttatcatgttaacaactggtaaggtttaactttacatgaatcttaattcaagcttttttactcacaggtcggacttcggttgaaactaagccttcaaaattcttcagctgtggggatatcattctacagaacaaaaaaatggaacaccatttcagaaaaaaaaatttataagatagagatagactaagcaaagtaggaatgcttattcctgcatgaaaatatcagagtattacttgttctttatatctgcttcccttctaccaagtctgggaacatcaacagttagaactatagccttgaatccagctttttcagctcttttcacaatctgagctgttacatcacgtctcttgtacacctatataagatatcaaagcgagttaagaaccgaggcctaaggcccgaaccaaaaaagcatattttggaggaaatgagaaaagcagctaaaaattcagattgtgtatttacatatatttgaagaaaccgaacagcgttacaactggaagcaacctcctcaatagtgcaagtagacatgaatgatactatctgaaatcacacaaccaaacaccataatcatcaccttaaaatccaaacaatgtaaaaatgcattccaacaaacaccgtagtaccatgatagtgttacacgcagctgcagctttcgctgtggcgatttctcctaacatagataggagacaaatcaaatcaatttccaaatccagcaattgtatacagttgacagagctagttatgaacataaaactaaacagacctttaggatgagccaacttatgcattgctgttggagcaatcatgatgggagctgagattgggtaacccaacatacttgtagacatatctatgttgctcacatcaacaagaaccctaggcctaaacctgtacataaagcacacaacacacaaacatatgacacggtgaaatcaagtagatatagcatcatattgatatggattagttacatgattctacggaaagcttggacattttcattgagagtgtgttgatcctctgctcctccattgtagaaatcatagtacatcttagggagggcctgtttggccagctcttgaaactcatccacgttaacgatttgatccatttatctacaatttcatataaaggaaagaaatttagaatcaaagaacacactgctttaataatcaaccatgcaagaatcttgctcctcttgtcctctatcaagattaaacatctttaaaagagaccttatcatcaaactaattatccactaccggacttaattcgtctatgttactgatttgtttgaattagtatgttcaaatcttaatgttacaggaaacgacaaaaaatagatgtattggctgcgatcattaagggactcagaactaaaaccattgtagaagtagaagttgattttagaagtacttacatatctgaaagaacccagtaaaagatacagaaaccagtttaagtctctggtaaacaaagaaattagatatcttttagctttatgaaatctggaaatgacagggaaaaaagaacacgagaacagagtcggtcctgtcggagaccaagacagaaaacgacaaaacacctgctaaccctctaagtcgtctagagtctttgcccacagtaaacgttgactattcaactcaatgaggacgtggcgtaccgagtcatcatcatttcagagagccattttccaacgggagcttttatttcttctcttctgacaccaatgctcagtctcagagaccgaagcgtttcttgaaaagttgcaaatttttacctcagaacatatatgtctataaaaatggcaacgaccaattactcaatggtcatgcctatgttccgcgacgaatcacggggaagcctctaatgtgtatcgtcgtcgtcagagaatagaaagcccggtagttatattatataatgtcatcttttttaagtgtttttgtgtgtttttaaaccctttttttgaatcctttgattattcttacctttgtaactttgttgcgtgctaatgttatggtggtgattagatcttcattggtaatttacaagttgcagttgataggtcttctttgtatgaatcttctgattacagttcatttgtcgctagagaatgtttgaacaaggatagtgctatgaagccttacgacatattgtggaactgaggagtttgataaatttctcgttgtcttgccaggagcatgtgtcttacagcatttttgagaaggatgagcattttagtgttgaagatcattatactgcaggaaactcttcaaatgaaagcaacacgagaccttctgacatcttcctcaagaagaagctggtgggactaaacccctccattctgcaactaaacagagaaaagaggaaagcaactttgaagttttctggagataacaaggatattttacaatctactttgtctagctcaaagaacataaatcttagtggtggtttgtttgtctctagagaatatgagaacaagtatgtgaagtttggcgctagaatgcgttgtgatcttgtgaataggatgaaagatgttacgttggcttggcatgagtctgtgtcttctacaagtgataaaaatgttgagctttctagtgttgagaatcataagatagctccaaaggctgatgggccagggaactcttcaaatgaaagctcctcaagtccttttgatatcttcctcaagaagaaggtgatgagactaaaaccctcctttctggaactgaacagagaaaaaaagaaagcagctaagggtttcagtggaattgttattagacctggaatggtacttctcaagaactacttgtcaatcaataatcaagtaagtactctctctcactatttctgtgtttatgtgtttatctgatcttatatgcatcatttgagctttctctgtttcttaaaaatgcttgtaggtgatgattgtgaacaaatgtcgtcaacttggtttgggtgaaggaggcttctatcaacctggttttcaagatggcgggttgttgcatttgaaaatgatgtgccttggcaaaaactgggactgtcaaacgcgtcgatatggagagattcgaccaattgatggttctgttccgcctcgaattcccgttgaattcagtcagcttgttgagaaagcaattaaagaatcaaagtccctagttgctacaaattcaaatgagacaaagggaggagatgaaataccacttttgttgcctgacatatgtgttgttaacttctacacatccaccgggaaacttggtctccatcaggttagtgtttacgacaaaacaagttttgatttcttaaagtataaaggtggttacctcaatacagtatcgtaagaattgctcttcattgtattattgttcttttaagtttctgcatcatcaacttattgaatccttcatggctcaggacaaaggggagagcaaaaagtccctccggaaaggattgcctattgtatcattttctattggagattcagccgaattcttgtatggtgatcagaaggatgttgacaaggcagacacgttaatcttggagtctggagatgttctaatattcggtgaaagatcaagaaatgtcttccatggcgtcagatcaattcgtaagatactgcccccaaggctcttcttcaggaaacaaatcttcaaccaggtcgtctgaatttaacttttaggcagtactagagataggatcaaactcatgattgatgctgcagctctttcctttatatttatattttatgcactaaccacatcattgtgtcagacaagcattcaatatgtttatcatatgtacttttcaaaagatgagtgttgaattgaatccatgcttcagtccttgttcttctaacatggctgctggttgccacggttcttcagctgtctgattaagtttctcagaccatatctgttggttttttggatcagagcatagagtgaagtctctcattctctgtcctaacatggtttctggttatgtcatcaatggttggacaaccagaaagagccatagtaatctcaaactcattctttaacatatcaatcacttttttcactccatcttcacccttagctgcaagcccatagattataggcctccctatctgcatcagccaaccagaaagtgtcataataccaacagagagcaacctgaaaattgtatgctagatagcattgaaagcttacaagaacagcttgtgctccaagtgccagggctttgaaaacatctgtccctcgtcttactcctccatcaagcaaaaccggaatcctacctctaacaacttgaacaacctgtagtagtgtagtaccataagaagacttgtttgttcattgagaagaataagcttgtttaaaagcaagctttgattggtttacctcttctaaaacagttattgtagcaggggaatagtcgagctggcgacccccatggttagatacaattattccatctacaccagcttcaacagccttaagagctgcattgagaaaagtctcttatatgccttgaagtttcaagattgtttgatacgggcaatatatatcatgagtatgagacaagaatcacaccgtcttctcgggtgagtatccctttgaccagaataggtaactctgtaatagatcttaaccattcaatgtcctaaaattttgcagtgaaaatgttataagaatttccctcacattgtcatggctcatgggaactttttgttaagtaatcaaggaataaagattgatttcagtatttcaccttccagctaaatgaagcatcaaatgcacgagaggcgaaggcttgtacccctgaacctttactctgaaaaaagttatcacgtcaacaactggtaaggtttcacttttacatgaaccttaattcaagctctacttacaggtcggacttcggttgaaaataaaccttcgaaattcttcagctgcggggatatcattctatagaataaaaatgaaacttcatttcataaactacattttataagatagggaagcttattcctgcaagatataagttcccaaaaactcagagtaatggagagtgttacttgttctttatatcagcttcccttctaccaagtctaggaacatcaacagtcagaactatggccttaaacccagctttctcagctcttttcaccacctgagcagttatgtcccgtctcttgtacacctataaaagatatcagagcgaattaagaaccgaggcctaaatcctacaataaggaagtacaatttaaggataagtaaagcaggtgtaaattaaagactgtgtaacttacatatatttgaagaaaccgaacagcgttacaactggaagcaatctcctcaaaagtgcatgaagacatgtatgatactatctgaaattcacagaacaattaaaaagaaactctattcatcaccttaaaaccaaaaaagtgtacaaaacatgtattacactaaacaaccccttagtaccatgatagtattacacgcagctgcagctttcgcagtagcggtttctcctaacataaaagacaatcaaactaatcttctgaatccaacaactgcataccgttaacagaatttatgaagatagactagataaaccttcaggatgagccaacttatgatttcctgttggagcaatcatgattggagcagagatagggtaacccaatattttggtagacatatctattttgctcacatcaacgagaaccctcggcctaaacctgaaaatcaagcacatgtaaaagaggaaatcacaacaaggttatagtgttaccaaaaaggcaatggatatggactagttacatgattctacggaaagcttggacattttcattgagagtgtgttgatcctctgctcctccattgtagaaatcatagtacatcttagggagggcttgtttagccagctcttgaaactcatccacattaacgatttgatccatctaatctatctacagtatcacacataaaggaaagaaattacgaatcaaacaacattactagctctaccagaaactaaaacagaaatctttcaggggcgttgattcgccaactttactaatttgcctgtaatagtgagtttttaaattacaaaaataaatatattggctgcggtcactactaagaggctcagaacaaaaagaagtaaaaacactcactacataagagttgatcgtagaagttactcacttacctgaagaagccagcagaagaaaaccagaagcagaaccaagaatgtcaggctaactttttcaagtctctagtaaatgaaaccgaataagataagggaagtcaaacactgtctgtcggggaaataattcttgatcttgatctttacgggcccggtcgatgacaaaatacgacgaaatctactcttgtcgcttttgtaagatgtaaatatgtaatgacacagtactactctactaactcgcctagcctgtcgttacagaaaaggatttcagcccatgggctttactatgataaattcatcagcccaaaataattcggacacatctgaaccacgtgtcagcttatacaacgatgacatggcatgctgagtcagcaccgccaaagatggtgcacgacgaccggagagtttttactaacttgtacacgaaattgggtcagaaacccaagagtctctcttgcacaaaaaactgtctgtaaaagggagtgggcatcatcgttgacgcttcagttgtagtactttaacctgctaaagttacagtcttttcaaaagagcctgcgagtgaaatcgatgaatcacagcgaagctaggggttccggtggccataagggttatcggggacgttctcaagcatctgagcaatgggttccggtacttatacttgattgtcgtctcgtattcttgtgttaattcatttctgtttttgaaattggagtccctggattagccctttacttgttgcgcgctattggtatggttgataagctgattgtttcctttgtaatgtatacaggttgcagctgatgataagtctttggaagattcttctggtaatagggttaggggatctcaagggaaaggaagaagtagaacatcgtggtctcctagaaatagttatgggcgtggtaacgatgaacacagtccagtgcaagcgtacgttaacaagtccaatgtgggatttgtggaaaagggagttcaacaggatagaaagtccctagaggatggaattggttctactaagcaacctgatgatggtgctgctgctggagataacaaggctgttttgcaatcaaagagcacaaatgtcagtggaggttcgtttgtctctagtgaatgtgaggacaaggatggcgctaaaatgtattgtgatcttgtgaatagggtgaatgatgttacgttgtcttgccaggagtctgtgtcttctacagttgttcagaaggttgagctttctagtgttgaggatcaaaagagtgctccaaaggctgatggggcagggaactcttcaaatgaaagcagtacgagacattttgatatctttctcgagaagaaggggatagtactcaagcccaaccttctggttctgagcagagaaaagaagaaagcagctaaagggtacagtggaactgttattagacctggaatggtacttctcaagaactacttgtcaatcaatgatcaagtaattactctctatctctctatctctcccctgtttccctctttatgcgtgtgtttgcctttgtatctgaacttatttgtatcattgtgcttctttttttcttcaaattgtgtgtaggtaatgattgtgaacaaatgccgtcggctgggtttgggtgaaggtggcttctatcaaccaggttacagggatgaagcaaaattgcatttgaaaatgatgtgccttggcaaaaactgggaccctgaaacatctcgatatggagaaactcgaccatttgatggttctactgcgccaagaattcctgctgaattcaatcagtttgttgagaaagcagttaaagaatcacagtccctagcggcctcaaattcaaagcagacaaagggaggagatgaaataccatttatgttacctgacatctgtattgttaacttctactcatccaccgggagacttggtctccatcaggtcagtatttcaaacaacttcttgatatcatgaagctcaaaggttgtatcatgagtttcaaatccttgatgtttcaggacaaagatgagagcgaaaattccatccggaagggattacctgttgtttcattttctattggagattcagccgagttcttgtatggtgatcagagggatgaagacaaggcagaaacgttaaccttggagtctggagatgttctattattcggtggaagatcaagaaaagtcttccatggcgtcagatcaattcgtaaggatactgcccccaaggctcttcttcaggaaacaagtctccgaccaggtcgtctgaatttgacttttaggcagtattagcccaaagctagaaactttggcaatgcatctagagctgtcacctgcttttgttctttcggtaacaagaagaaacaaatcttcgcagaaatctatcttcttgacaaatttgtttttttgtttccgattatatgcaagaacctccacacacggtctgtgttgtattataaggtcttggtaatatgattatcctttggttttcctctttcttctccagaattgctgcatggatccagtatctatctcttcttctaaattagattgttctgatttgttttaaaatcactgtttctcattttatttatctcttctgtctaccatttcctccaacccattctaccttttcaactttgtaagaattgcagaagattttgtgagtctggttgaaattgtacttgtcttgttttcctcttgagtctagtcagttaaggtggggggaccattctcagtgcccaggagggtagaaactcaagaagatgcgataacatttgtcacctgacatccatctcgtaaacttctactcctccatcggatacttgttctctataaggttagtgtatacggccacagcttcagggtttcatgaagacagtgtagttgttgtctcgagtaatatatttctaaaaaaagaatttgtcgttccttcatatatgtgatctttgaatcatcttaggttggttccatgtgtcattgtcaaacatatgtgccaagtgatctttgtcaaaccttaaaatcgtttcgcagaaccacagaaactaggcttcattatatatgcatatgtctggtttctttttcaattatacacaataaataagcgcacacaatgtatatagcttatcttctagtttgatgtgtaaagttaattcattgctgctaggcaacttatcacaccatatcagttgtattttccatcacgtggttatactccaatagctgatgcagctgaatccacataaagtagcaagcaagaatatattttcttcttcaatcgttctatattctctaacaaagaattatcactagagagattgtcatttttaactttttccagccattcgtttgcttgcttaagttgggataaagtctcggcaatatgattatctggttccgctagtcgcgctcctttggtttttcctttcttctccggaacagtagcatgtaatccagtatctaatgcatcttccaagaatttcaaaaaccagcttcttgtttctcgtttcaaagtgtttgtcagttcttttatttcttctgtgccatttcccttaacccattctagcttttcggcttctgttagagcttttgaaggcttcattgtggctctgcttgaagatagactagcttttttgctcaacttttcaggttccatccataacgaatgaatattcaccggttggaatgatttatctttcgatgctacaactgtaacctgtacttggtcaaggatactctggagggtgaagaagtttctgagagaggtatgtggattctttggtgaagcatttgagctgagttcagcaaacatactgcaaaatcattgtttctttgatcaggctaaagaaaaagaaaatttctccatgatatatatgagcagatttggtttcaaaggtaacttgcctgatgcatttgatgagatgtgaagcagccaatgcctctctttgcacttctgcggctatgagagcagctaaatttctccttctcagcattccctttggattaagagattattatcatgtgataagctcataggggaaggattcgaaaaacaaaaaagagagatacagagatcagataaagcgtactttacccaattttgatagactaacaggcagagagctccatgatgcatcctcagcagaattactcttcctgtttatgtagttcacagtggagctcaaagagagtttctttggctctgcctttgttggagctgtcgcaggccgacattgtaaaggaccagcttgacgtgcctgtgcatatacatgttactaaccacactcaataagctaatttagggatccttagacctgtgtgacttatcagaaggacacacacctgatctttgtgctccctttgtttccctttagccaatacaccaactttcttagccaccattatcgatccagtctcaccctcattgttgctacccccactacttgagtctgatccacttgcctttgaatttgaaatacccttcatataacgtgaagccacacctgtcttctcttccttgattacaaaaggttgatgttttcttatattctccactatgtttgatcttgcaccatctttctgctgcagaatttgtattagagaacagatctcttacaagaagtaatagctcaaaaatctggtgatagtgtatatatattgtcgtcaccttcttctggttgtgatattcttcttcccgaggtgttgtctcacttggtaccaacatctgcatcaaatctttgggatttcctacaaaaggatggcgtccagagatcggtctaactcccaccaatacaggaacaggtgtcccagcatcaagcttatcaacgtagaagaattgtcctattcccagtttgttgttcaagataagttcgttgtcttcgttgctcaatgagacatatgtggagtgagaagaatctgagactttgatgaaaaagccttggtttggccaaagctccgagccagctaaagcagggacaatgctgattacctgcaatagaacagacctatattcccctcgtaccttgatgttggtgttcatcgtctcgagtaacttgattaacactcttggcgtaagagaagccattcttggaaattgaacagtgtgaaattgaattttacaacagagagaataaagaaacgtttctgttttttggttggattctttgttccttgatgatggagcatcttcgctatctttgcatgtcagctaagtaacatcatcacatttcacttggctttgaagtcaagtgatcatgttacttaggctcttgaggatttcttgtcccaatttccttaacttttttggggtgaatgactaatgtgccattgacggaatagagacttgtgacgttatggggaggggctttttggggatttcttactgtgttacgtcaacttcgaattcacgtcactttccgaggaagatggagaaaggttattagggaaggtgagaatcttaccttatccgtcccactttgacgttttcatcacaaaatcatgattatttaaatgtagtaaacttcgtgtcgtataacctaattctttgtgtttctttaatgtctatccaaaagcttccgagtttcattttggacatgattcacagtcacataatcacgtttattaagcaacagactatgttcctctgaagggtcaaaatagtaaatgaacattgccatcctttctgtttgtttgtagtgtactaccaaaatcacatcgatgacatgtttcaggtttgatacaatttacattttacaatgtaggcttcagaaagttaacaaagaaatattgaagagagggactattctcaatgatacattgatccgaaacaaagagcacattgcgatctccgaacatttcacttatatactcgtgtctgttgtgcctgcattgcgaatttgttacctttcattcgcttggatcctgatgacttctgtaatgaatctttggtttcgaatcatttccctttgctacgaaaattggagagtgaaaagaatgaccttggtgctgcagtaaacaagaagcttaagagtgagtaaaaaagcatctagcaaagatcttactgagtttaaactcacagcttggttatataagtgactgtggattaggcttaacaactcggatgctagatatttcgattctatgatgatatgcatacttcaacgtttagattctatggagagttttcaaaagtagaacactttattgattaccttttacagaagctcctgtcgtctgatcctccttcagtttaaagctcaatggtgtgccagtggtttggactgaaatcaggtacaccatattagatcatcctccatgactcagatcaagaggaaaaaaaacaagaaatatatctaagcagttgataactctagtactgatgtattctagagttaaggtcatcagttttggctagattgtaagatctttagttgcttcttgtgaatgaatactatggtatttgaaatagttaccgtgttcagtgaatagctcgctctcgttgaagctatcaccagaggggtggctctgcaagaatcccattctcgactttctcaagtcttctgatgatcgatttgcaagatctcttccatcatcagtatcatcatccccttcagacgtcgtagcagatatccagtcagccaaactctcagccgcacggttttttcttccaaaattcaaaagtcttttcaacccttttgtcacatcttgttggcactgattttgagatggattaccaccagcagcgcgtttctgagcagctccccatttctttctcatttgagttgtatcgctctctgtatggttaagggaagagaagttccagaaagcaggactaccaactggagagtccactgaagcatcaagttcagatgcctcgtttggatatcgatgcttcactcgggaattccatggactagtgctttcaccgggtgagtccaggattgaacccatggtttgatgcctagaagccatagcagcaggtaattcagtatttgaaccagcgtcaagctgagaaaaagattcaccatttgcaaccccagtactaccccattcttcagactcctgacttagtcttggcatttcgttttctgcatcagtaaaagcttcaacttctgtgtcatcaagcgcttctcccatcccctctttctccatatcatctgatgcctcagattcttctgaagcctttagctgcgcattatcagagctgataccagtgccatgactattaaaatttctcccgctttgctcctgttcaagatacagaggtacagaaacaccatcctctgacttcaattgagaaaagtctgtagccaactcagcagcttcagcagcaccttttctgaaaattttcggccttcgcaacttttcttcttcatttacagcttttgggcggatagagcttctcacctgggtgcggacaccattttttccaactcccgaggctggtttcatgccctcctttttgatctcggagaagttagggactgactgtgcaaaatgtttttctgattgccctctccgcctaacagcactgagagtagaaactttggctgccgagcgtgacgctgacgtagcagtggttcgagcaatcaataaattatttttattttgttgtagctttttattctgggtgctcctggaaccatcctcatcttcctcactctgaaatgaactaattggatgctgtcaagtcatcacattgttaaactgttaggaaaccaaggataatattacacccactcaatagttttagctaccacagaaggaaatgctctatacctgatcctttttggcactcaacttagaattgaagtatacaagcttctctgcacgtcgggcacttgaatcacgtctccctgtagactgagaaaatttggttttcatctcagcgttactgcgatcaagtatatcttgcatcaccttcaatttggcttccttctcggtccttctgcaactccagtcttccttcagctttgcgtctcttttctgcatatattgctcatagaactttcctctagaattatcagaaaagctgatttctggaaaattttgcctcgtggtatctccatagtctttggtaacaaccatcttcattgttggcggagttttgaacttgtcttcatcgttggaggttaaagttggcattgccagggtcttctgatcagaaatttgaacagatgatagatcctgcgctacaggccttctcaactgtgaagtcacagcctgttcacttggctttccgggcttacctctacggacagaactggattgatccccaggcacacggagcatatgttcagcaaatagcttttcaagctcgtttgctttcactttcaattcgtcattcagctcttgacttcccttagacggccttgccctttgaacttgctctgttggagacacttggatcagagtatcactctcggagatatctgaaacactattaatggctgcagatggctttgtatttacagcagcagaacccatttcaggtcttctactatgcggccttttcatctgttcagaacctaaaagaaaatggtgcaacaagaaaataatcagaagattgcttaagtttcccctttgtcgaagtcaagatattaagaaaatatatatctagaaaagaaaagaagagaggtacgttatcacattgagaattagtcgttctcttattctcagactcaattgtttaataatataaagaatacttctacggtcatgatcatttcaagcattagaacacaggtaagcaaagaattaactatagacttttaagcgtacaaatgactgagaaagggagtgcataatggtcatttgatgatctcatattcccgttgatatttaatattgggtcaaagcataagaaacatctgaaattataaaggaattcccacatataaaaagtatccattcaagaacacgcatataaacgaaagaccaacacaagtttactattttctttctttactaacctccagaaaacggtgtctttctctggcgatcctcaagaagtggtgattgcctatccgaaggcattagttctttcctcggagactccgcagttactccattgctctgaacacttgtgataataggttcagtgccacctaactgctgtaatgtagacaatgaatggctctgaggatccctaaactgtatctggttctgcctgtttgatataaaatcgctcatctggttgttcgcatcatcatttatatttgcattccctgtgtaatctgaactggctctgggattcttctcatggaatttatacttggaattcttctccaaatatcgatccggagaatttccttgatgtctcacttgattattcgttctaaatggcacattcaagtctacctccttgtctttgggtaagaaagtagaacttgaattttgagactctacttcatccattccccagtcaccaccattgttggaagtacattcttcctcattcctatgaggattcgcagcatggctcaatccattctgctcttttttattgtagccgacaaattgttttgaggatgcaccacttccatctttggacactgaagatgacgagggagtgcacagtggactatcacccgtatcatccttcctgtcatttcccaaatcgatgctcatgtcactagcaccactccatcttcgtaccacaaccttttccatgcctgcagaagatgataaatcagaagaaagtcttttcagctcagtagattttgccacagctgttttctctccagagttctctttctgcttgttttcaaacatgctgatcctctcctgcacgctaagccgtctcgtgagttgcctaggctgactcactaaaggctcattttgtaccgtacttttttcctcttcttcatcattttcatcatgactactttgtggcttaagctttgattcatgttgacagtagctggttcctgttgcgctttgctcttccataccagtttgatattccctgtgttgttggtttctatttgtcgccaggtctctagatgggtcttcactgggatcatcaattgacatatcagattcccatgacgaacgtatcgcttcctcttcctgattgaccctccaagagctcataagctctggccttctctgacaaagtgttataaacttggtgcatgcttcactgcaataaacatagcagaccaagaatgatcagattacccacaactgacagttaactaagttggaagccaaaatatttgtggaactctatgaattacaatcgcctactctaataagtgagataattcatcaggttgactattggtcaccgaaaaaaaatagatactgaattatgtagtccagttaggcgtcctagtcatattataatcatgttcatccacctaatggcagttctcaagtctccatcagaccaaacctacctaattaagagcatgatgggtttctgtttatggaaaatagcatcaaggcctaaacaggtaaacataaaacatatgctcttaaggttcatatacaataaccaaaaaaaaacttttagtataatgaaagtccaaatttccaaagaagggtcactggcagagggtgataaacctagaaaccttggttgtatggtctacctagcaatagtatgtatagaaaataaaggtttaaaatgttctgctgcaactatgaaagctagaactcaaaatacagcacccaccaccttctcggtttaaacccagatgaataagactaggcaataactgaagatgtcatgtctccttgtgtgtaaaaagggctccaaatagttgctgacacaaaggccagaacgacagaaaaatccgggaaaataatacagaggatatggaataagggatatcttaatacttacttcaagcgattggccccaaatcgatcagcaaactgactaagttcggagacagtgatagggttgaaaccagcagccgaagcacgattacaggcagttgctaagtcctgtctaactgctgctagccgtaaatcaatagctttcagtaactcctttctggaaatttacaaacacgggaaagattcagcgttacacattataagactatttaaatcaggcgactttgcaagattaagagactttactttgtcacatcagcggctggagtagtatctgtgctatctgaaccaagaaaggtttagttagattaagccatcgcacaatttctcatggacggtatatgcaacggaatatacaactaactagaagacaagttaacaatgtgcataccttttgcactagatcgctgatcactagtcccctatagaaagataatatcaaaatcaataaaaacatcccactaacacaggatctgctttacttggacttaaaaaaagtgaagtacctcgccatatattttccgagcagcctccaactgagacatttccacatccaaagcgctaaccaattccagaacctctggggtactaacaaagcgtacaaacctataaaccagcaggcacaagagaaattagagtatttaccaggacctatgcttcacaagactcaaaaaccccttgttcaagatagagtataacctttcgagggtccctttcgtaaaccaggttccagcatttttgttgctttcaacttctagcctgatagactgaacttcccgggaaacctgttcttctgcaactttcaaatgagcaacaaatggtttcaccagtccagaagcaagtttctcagtatttcccgtagtagatacaaacaattcacatctgccagaaagaaacaacaagaagagtatctaaaaaaccaactaacacaaaaatgaagaattcactctctgattttaataccttgaccgctttggagagagttggaagacagcataatcaagaggtatagctggtctcatcttgacccctttacacaaaattttcagtcttcccccttcacatacccaaagacagcattaaaagcttatcctaagtaaaaagcaaaacaaagttcgtctctaaacgtaaatgctataggaatttgaagcgtccagagaaaatcaaagagaaacgtgactaaacaatagaagtatcatcagtaaatacataaaagcagtgtccatacacggattcaatttaacccaactaaaccaacatcacaataatagaaaccccaacacaaatcacagaatcaaacacattgctagatctgattccgatcatggaaatttgaaaacccaatcactaagaaaactgattcacgcccaataaggacgaatcctcgaagacccatgattcgaattcaaattcaagacataaagtaaaatcccaaatccaataaggaaacaaaacgccattgaaattcaagtgaagtcctgctcggatcagaccatacctgagaatagaaacaaaatgagatcttcgtctgtttccgatgaatcagtctctttcagattcacattcgaatagttactatcattgtcgagattctttctctgctttctatattcagcatcctcttcttaaagcttattaaaaccctaacaatgaagattgttttcttctgtttttggcttcactcaaaactctcaagtcaacttcgtaattaatttcacttccgctgatggattcaatatctctcccatcattgtgtgtctccttccttccgccgtaatctatctttgtcaaaaatctactttagagagagaaagtgaaatcaagagaaagaaataaacgttcttcagacaaaaatcaccatttttgttgacgtgaagtagcgtatacgatgacaaaacaaaaaaaaaaagagagtaatagagcgtaaaatttgaaatattaaattaaacaaaaatcaaagaaagtcggcagtaattacgaaattccggaaacaggtctcgccgaatcctaaacggctttcgttagttacccataatacccttttattcttcgaatttattgctgtgaagtatataaattggaggggtaaattagtctcttacccacagatgggccaaggaacaaatgggtatattggtactttgcctttcagatccaaatatttaacgttaagagtaacaacgattcgctgttttagagtaaaatctctatgtgcaaaatgtatattatgttaaataaacactgtactaaatagatgctgacaaaaagaagtatttaaattagagcttattctactctactgaaaattaataatattaacaccaaccatttttattccaacttttggagacactttaaatcaaatgatggaccccctgaaaaaatatctaattataggatatcactctttattcttctttaattttaatggacaattgaccctaactatatatttataatggagacatggctttaaatcctacccaattctttctttctttttggtatcttttcttgcccactttaaaaaaaaaaaaagaatattcatttgttacattaataatttactatttctttagtaatcactacttttattgctagatttagttccaaaaaaaaactttattttgaaaaaaaaaactttattttgaactttactaaggaaaaatcttgattagtaatcctagtgataccaatatatcattagataatatctaatctatatgtctaaacacacgtggacctttggaatcaaactcttttctacctaaaacaaaaacaaaattcagaagatttcaagatgctttatttcttacgttttcattattgtattcgtttcaaaaaaaaataagaatagtgcaagttagaatgatgttacggtgggactcggaagatggtatttttactcaaatatcatgattcacctttcgatacatgaatattagcttagtgcggaaggtaaaattgtgagaaacatctatgtgtaatgaatttgaattgactgtcatttgtttagtacctataaaatgccaaaaggcaaacatcatagaaaaataaataaacagaccaacgaaaaggtttcttgcctaacattcttcttttatagaagatcatcattggtggtttgaatgatgcttcagacacaagaaaatctagctcaaacaattactcaaaagaaaaagagttaaaaaaatgcttttaggtacacatgcaaatctccaatgtcataataaccaaacatagctttaagattttgcggttggattgtgtcaaaaatgtcctatgccatgttctaacctaactagtgaaacacaatctaactcagagattaagagaagttcaaaaacgtgcacaagagtctgcagcagaatgatctcaggcaatctagtgaagttaaatctgttccatatgaccaaagttaagaaagatatgcaaaatattaatacactcatgaagcctagataagtttcagtttctctttcaacaattaaagactcaaatctaaaatatatcaattacgacactgcatcactaaattctagttattacccaaatcgttgttgttgttgacaatcgcattgatgttgttcttgcggctgtgatgatgatcattactggtgtttcccattctcctcccatgttgctgcttaagttgtgatatctccaattgagtcttcacaaagaactgcattctctgcaactcaagctccttcaagaacttcatcctctctttctccatctcaaccacctgttgcagtttcgcattctctgtttgctcataagcttcaccgaatctcatgattgcccgagtcagctccctccatttgttccccactccatcaccatcttgcttcttcttctcctccgtcttcatcctcttcgacagaggaggaggtggtaaactgtcaccggaatcatctgacattgctgcttcagattccgagtctgaatcagaagcgttcctcttcctgaaacgccagcgtttcgactcactacaccttttcaccatcatcccttgctgctgttgctgtggcagtgtcctaccttgctgtggcagagtcctcccttgctgtccaaacggagctgaacggctactcatcggaattcccataggtacattgacagatcctcctccgcctcctccaccactgccaccgaaagaagcagctgagactctagccgtagctccaattaaccggtcaagattattgaaaggcggtgttgcagccttagcttgctgatggtacagattcgaacgacttcccattggaatacccataggaatcttatgcaatcctccgacaggaccgctgactccagaagttgccgtcgggatcttcgccgttgatccaatcagacggtcaagcttgtcgaagaacacccatctgctacggccaccgccgttagcgattctcaccttctcttgtttatacttcttcttcaccgtatcgatcctattcttacactgtatatcagttttgggaattttaccgtaatcctctctgctgctcacaatctcagccacctctttccagtgcttctgcttcagattccctctgctaagctccaagtatctctcaccccacgcatcaatcaacacagccgtagctgcttcgctccaacaatcctccctcccgccgccgccggttggtctcccactgctgttattccctccaccgctggcctgaatcggaagcagcgccagagccaacgcatccggatccttctgcgacgaattacccggaggagtcagagaataagaaggcggacctgccgaagccaccgtaaccgtgattcgtcccgccggcggggaggaagacggatcaggtgaatcggaaccctgagatcggatgtcttcatcgtcctccatggaattcgatatcgccggatctgagtcagaagctcgtgaaagagggagatagggttagggtttgggttaatattctgttcgggaggggtaaacgggaaggagacggcgtcggtgagtagaggggacacgtggaaggacgtgagaagatacggggagatgacgtggaatgacgtgattggtaggtcagaggtaagattccgtcaccggtaaagttgccggctcggtttaggggtaaaagatgggtttgtatcgtaatttccccatttcttcgtaatccgatgaggaagtgtattgacggaaaagcccatctagttttactataattaccggaactatccccgtgaaccatttttccggtgatgtaccgaaattacccttagcctaaccgtcagtttcaatatcggtcgtagactttttttagtccgtcgatagtttccagttgtcttccttcgttgtcttgcttcattcgttaaatcgattcgaattagtctctcttttaacaataagaacggtgacgtggatgttatttactttgggcatgggtttttattgggctttccatacgctacgttagcatgttatcacttagtatcattttttcttttcaccattgtcaaagatacaactttaaacattccagaaatactatgtttcaaaaagaccttatataatcttcgtgaattgtgaaacaaacagaaatttaatatttctcaaatctcaaaacaccaaaagcgaccattatgttatgtacacagcaaatatatatatacaaagaaaagtagtttgggatacttcttcttctcgtagaaataccttgtaatatttttcaacggtccaatgcgtttagcacaatcctgcagtattaccggacgttaattagatatggtggtactaatgaaagcgataatgcgttggataaaatgaagtatagtttgagaggaaagaaaagagagggagatcaaaccaatcgcaagcattgagacttgtagcatgtgtttcacttggtgttccagctgcatacaaatgattttggtaatcattaatttacaaatccataatactctcaagctaataatgattatggatgtcaaaataaaaaaaaaaaataataaaaaaaagcttataatgactatgaacatatgtatcaccttgcaaagtctttaatttacatgaatatatagggttttaactgctcataacacaagcatagaagataaaaaaaaagtggatcagaaaggatttttaaaaaaggtaacataagagtcaaaggggaaacggggttgcttgaacggtcaggagaattcgggacacgtttcagatccaccatcaacttccggttggcactttcaccggatatgtggtttctcaacttcccgagaccattttccggcgttggaccggccaaagtttcatcccacaacttgtgcgaaaaacccatatctctgatcaaattattagaagggtttttcttgttaattgtctctaatgtgttttgaaaagagttttttttttgttaagtcttctttatgtgaggataatggttttatataaggaacaggaacgagaagcgttgaatatccttggttagactaattatatacactttacctataatttaaccttccaaaattaaggagatttaatcaaggatgatgataaatctagccgataagaagataacttagagaagtgtgacatgttttgcttctatcttacatgatagtttgatgccgtcaatttgatttatgtgatgggcctgtacctgggccaattcttgattaggcctgcattaaaatattctgccaacggctagaaactttttctcttcttctataaatttactttttttggcctaatcccggaggttcttcattatttcgtcagaacaacattgaaaagttaccgttaaacactctaagcgctcttcttcatcttcttatacacttctcttccaacaagaatctcaccaagaaacttcttcacttttacaaaggtaatctctttcttccttctgatttaggttcacattatagactgttcttcttgcgattgtttgttcttcttttcgtatgtcgctacttgattcgttctgggtttctggggtctgtggtgttaaatttgcttgaggatcgaattgggttttgtgaaaaaaacgatctttgtttcgatttcgagttgggtttctgttaccttttttagggtttctaattgcttaaaatcgtcagttctggaatcaaatcttcgtttctgcaattggttctttgatgattcacagttaaaaccatatggcgaacatgaacgctcttcaacaaatgatcttcccagacgagaacgctccaattcatcgcaaaagtagttaatctttctctactctctttaaatcatattgctttgaaacaaagatttaacattttctttcttggctattatttacagagtctgtcactgctgcttctgtgaaatccaaagggactgtacttggtcagaagaaacctggaggagctcgtaaggctctgaatgatattacaaacaagtctgggattcatgcgaaagctgctgcttcttcaaagaacaagcaaattgcttctgctgctgtgaaagagattgatatagctggggaaaggtttttacatgatcacagcaaatgcatcaaagaacagcaaaatctttgggatgatcactactctgctgatctcatgctacttcatcatggtattgtatttagatcttctaagctatgatgtttaaccaatctttgcgagtaagcttgtgctaaacttgatcttttgtacttgcaggttccagcatcaaggagaagcatctcaattgggacattgaaaaggtactgtacttaaaaaacaatgtctatctctctgtctttgatggagattttggtgagactgcatctttaatctagttttggaacttaaagtgacactttttatgactctatcctatgtgtttttggtttcagatggatgctaaggacgatctgacttacgaagaaccagaagagatggcatcgcccaagttttctgattggctgaagaactcgactccatggcgctctccaatccgtcatggctctatgatgccttccactcctctggcttggcggttcgattcatgcgaattcacacttaaagaagactctgacgacctcttctgagtttctgtttcttaatgtcttcaaaattcatccttcagatgaagtagtaatagtagtagtggcgtttatcttttgttcagctcttcatgaatcactctgtgtctatcactttgtaactggtttcaggaaataaagttggtatcttttcaagtattttgactattcatcaaatttgtgccatattcagaatctgaagtttcgatttacactgtcatgtttcaagccacaatcctaaacatcatcagaattcacttttacaaacattcatctcttcaactgtgaacttacattgccgttatccttgacactattggtgacttctgactcttctctcactgtctctatcctcgcgactgttccgtaacacctctaattgagctttaaaggactgcattttctgcaactcaagctccttcttctccttctccagctccaccacttgtttaagctttataccaccttttcataacttgctgcaaatccaactattgccattgccacctctccaagctccatctcatccacttttacccgcggtggcagcaataatggtagtttactgtcgtcaactgagtaagcagaaagttcaagttcagattctaattcagtctcagaagcaactcttttcctgaaatgccatcgttttggatcaccactcgttgttcagattttgattcaagtctcagaagcaattatttctcactctctaatggttggtaagataagaaaggttcgaccaaaatggaacaaaaaataatgtaaatttttatgtaatcaaatgctgagacaatcaataactaataagaatatagaaggaactgtgtttgatcaacataaagcaattgatttcatcgatctcaatgatctttaacgattcttgcttttaggagacaacaattcaatgacagcacaggagaaacaaaaataaaaataagaagattctagagaaggaggtgggtagttttacaaaacgacgaccctttgagtttcgatgtattcctcattgagaagacaacaaccactcatcttgtctgcgactagtcgacaaatgtggggagatgagttagcaaaaaaatatggtgtgaagtggctatgaggtggggactccatagttgtttgacgacgacgtttcgtgaccagccgatggaacattgttctttctcctgtttcttcttccgccattgtttttccctttcttgaactcttgctgatggtccacctgctgatccaccaacaccaattcatcattcatcaagaagagtattataaagtgactctgaaaaggaagagtttgaagtggtttcagttccttacccctaaagagaaggaatgagctctcgggtcatatccgaaaggatcattattcatccccatcgaacttgtcgcaaacgaagatgaccgctgagaatttgtatcgaatacaaaactacgagatgaagtgaaatttgaagtggagcaggacgatgatgatgggaatgctgcagcgtctccttgaaacatctcattaaacagatcttgtagttgttcaaaactgtcccctgtgttattatcctgcaaaccaacatctcaatcatcagcaagttgcaatcgatggttgtgtaatacattgatgggaaattaaagcaggctgcttacactaggcttggattgattcatcatagtcgccatttcgttcaagaaatctcccattccctgcaaccatcaacaaatgatttccatcaattacatggttgataggttcagagttcaatcagacaaaataagaagtacgtggtgtcacacttgacccgttaaaagcattgtactttaaatgcaatggaacaaaagtaaccaaggctggaaagtgaaaatctttatgaagaaacaaaaaaagggagatttacgttttggtcatcatcatcatcagtattataagcaccaacatcatacaggaacctcttgttggagtcagacagaactgtgtgcccataaaaaaaagcttaatcaggaacattaaacaaaatttgtcaaggagcaaggaaatactagaggatctgtatccaataatcaattcacatttgttcaatgagaataatagagcaataggatgatgttgatgaaattaccagagtaggcttcttggattgcctgaaatttcttctttgcttcttctacaaactccattgacgaacaacgatctggatgccatctctgaatccaaaacaaaaagttctcaatcaattttcagtgtcaaaaggaaaaactttacaagtgcatacaaacctatcacagctaaggcaagatcaaaggaaacacagaatcaattgttccatcgatgtaacatataatgcagctaacaaattcaaatcaaattggttattacatgcaaatactccaaatcagggaaacagatacaatcattgttctgtacttcaatgaacaaaaacgaaataaacaaatttcgaaaataaggaaacttacgagagcaagcttcttataagcagaacggagctccgtcttagaacattccttcttcaaacccagaacagcgtacagattctcgttgatcttctcgctattactggacgccatcgctaattttctccttccagatcaacaaaaaaaaagagaaacccaattaaaaaaaaactcgtttttccgacgagttttcaccgctcaaaaacagagccaacaaacttgggatgtttggtgtgtgtataggtttgagtatcgatactaaagaggttcgaaacgacgtcttcttaagggcagaaaaaaaaacccggagagattagggttagataggtgtcgatcaaagaagaagaagtagaaatttggagagaagaaaggaaagaacaaacaggtttttttatatgttttttctaactctgcctttctctctcgtacaaagatggaatggaactctccagaacctctcttaccacttgtttagatctttttaattggtcctactactttctttttttactactaataatttatcgtattcttccattttcgtcaaactaataataatacttcttagaacaaaaaatatctattcaaatagtactaatcacttcatttttattttcataaaaaagactaataaatttttcaaagtaaaaatataaataataactgtttcttttacccccaacttataaaccttttctttttgggcttccaccacatcacccaaacttataacttacgtatcagtaaatttggtaattaaaacgttcatttaaatgtttgtttgtctcttttttataattttcgttggtcaagaagttgaattttttgtttaattttttggaacattggacgaataatagtacagtcatgagagtgcggctgagatttttcagatgtgtcgatgatatttttatgcctcacactcgccagaaggttctaatgaatgtggcgttttcgtaaactacaataaactatgaggtctttgcgtcaccgtcaattttttggaaacgtgtgctttttaactttaaacgcgtcaatcaatatccaccacgtacgggacccttatactataaaaatcaaatcactaatcacgattacgagtgcttttgttcatttcatttttgccgccccctcctctcccctattttgaagttgacctcattcatatagcttgagcttgtaatgtaatgttaatacactgattactaaagctaataaacaaaccagtaacttggcctcgttataaagtactaactaagatgcgttttttgcatttgcaatgctcaagtgatgattcgataacattagaaacacacacataacatgtatattatatagtgtgtgtgcatatctagtgtccactttattggagtcgttgaagatataatgaagagtaatgaacttgtatgaaggtactcactctgttttattgcaatcgatcatagttctccagaaaattaaagtaatatgtcaaaaagaaaaatggaacaagatgtaagtcatgttcaatctccatgtctttttttataaattatttacaaatttgttgtgatcctctctttctttctcaccttttcaccctttttcttccaattctattaaccataaattagcggcgattagtaattctttttcagtttttcttctttctttgtcacccactaaagactaaagagtatgctctttcttgtttttgttttgctttttttggttttgtttcatatggcttgtaggtgttgttgaaaagctttgttctctcatcaccagaaatgaccgtcttcatccatcacccacctcacataaccttcaggaatcccggaaatggcttcttcttcttctttatttccctgtagtttataaaggaaagcagagtttgttattattagcattgcggttttatgcatcatcaatggctgctttgtatttacctttctactgttggaaccaactgtttcaacaacacaaatttctgactctatttttctactttcagggatggtttcaaaggatctaaccactgtggctctgcacaaatgaaaacatgtcaaagactttctatagaacatttctggtttgatattaacattagccacattagatagattcgaaaagacttttgttggttaccttccgcaactctcatcttcacaagagtttcctgaagaagatacccaatccatatcaaaagctgcacatgtacattgctcaccattcccatcacagcagaagcaatcgttttcaagaatatcatctaaacctaattcctctaatatcggtggtggagcactgcaaaacaatagccattcctcaggtttagctgacagcaacccctatatatttagaagctttctttgacatagatcataagcttttttacctcaaactagcagcaatcttggcagtttcagacgttgagatctccggtgctgaatctgaaagacctttaacttcttcatctttttcagctaaaccatgtctacctactggtcccaatgcggctggactgctctcgctaatgatgctactttctgatagagatcgtttcatcgtcgatctaaaggcaataaaatggaatgtaagcatctctaatgaaacatagaatgtatcaaacttctctacaagtgtctcattaaacaggaaagaaaatataccttgaagtctctggtacagaattggcaagaaatcttgctgcgttgtaatgctgatcagaacccaattcccatagcgctggcttatctgattgtggctgaaagtatcccaagaacctgtagaaagatacaaatcaaagtcatataatttttcataccatagaaaaagaaaacagagaaaatttaacccagcatacacgttaattgcatcttgcttttcggcatccatataggcgttactgtagtaacgttgtaaagttctgaagaattcctgtgattgagtcgctgctctccattgaccacgcctttcacaaaatatctggccacataagtaagatcattggttaacaattatgtcctaagatttttatctagcgagacaaaaacttatggccagagaagtaaaagagaccttgttgtgtgccgcggatcctccatactgaagtgcaagtgtatctcccatcgtctcataaattcccatcaaatcttcagcgaggggattgtctagatcaatattagtagactctgtcaatcccaaagcatggagttgacgcccaaatgctaccaacccataggcatattgagcaacattggtgcgatctaaacagtctatgcaattggtcctcaggactcctttctgcagcatggtaacttccttttgctgatcttccttagcatccttactatcattaccgttttccaccaccaaatttggtgcagtttcatctttactgggtggatcataagtagaacattcaccatcgtcgttcctgcaataattaccggaagaatcaaattgatcagagcctagcttctaacaatacaagagagatgaataatgtgctaagcaagaaacctattggtaaatagaatactcactccaaggtggatggattctggttctgaaatccttctcctctaagatctggagttaattgacagtagaagatgctggtcaagttcagagcataagtagccaacctgccgagaattgccaacacgtttgtgccttttctggaaaagtaaaaacgctagtgtgttaataaaaagatgcaatgaaaagaaaagaaacaaagaaacatatgaggttatctccatcacgtactttctggagtgtttatgcaagtcccagtgaagaggccttagacgatcctctttgcttaaccctttattaataaatctaattgcatttgcaaactctgcacgcagaatagtctcccgaggcctcttttcacgcgtctgttttttcaatcaagtgaattaggatttagcaggacgatatatcaaaatttgtatcctctagattaccgaggagttagaataccaacctttatcaagttcagtatgatgattggattcccatatctccttccaagattttcaaaatgcagtctggttgcctcaaagttggggtctttcggtgacactttacacagacaagagatatcagcacaaaaaagcaaagaagaagaaaaatgacattggtaagaatatattatgctgaagaaagaagatcatacatattatatcaggtttgatattcaagcgtgaggtctcctgagaccagaacaaaggaattgaaccccgattctgaactacagaacttattcggccgggattaccatcttgagcttcctcgaaaacaatctgctctgtctcaacatcattagctaccctgcctttctcgtttacaccacgtttcagatatctggaggacaagatagaagattatgatccaactaaaacttatcccagtacagcttaactaaatgaatggcagagataaaacaagctcaggtggagagattgtaccttgtaccagcataatgccgagatctgcgagaaattagagtcaatctaaagttcttctcagaaactgatagtttgacctatatattggacaacaaaaaaaaccattataaaggttaacagattttaatgtgcgtagaaagaaaaaagaatggagaaggcatccacatagtggggtttggggttcactcctaattcttatgagagcttcttctctcatgctgtacaaattttcaaaatcaagcaacatggacacggaattttcaatgtgaggttaaaatatctaaacacctgtttgtaatatgcatatctctgaatgttagataaaattaatagaacctttggacaaattagtacaagtgatacctgtttgaaaaatccatataccaaggcaactgtccacatacagtccttcacgttattccgaatccttcgagttaagtattcgttccagacaaacatcgattcgtagtaagtgtgtccttccacattgttagacagattcctctgaagtgtatgcatgatgtgataggaatagctgaagaagaagtcctttgtgagatcaacagtgcagagcagcctcttgtacctacaaaatttccatggaagacagaagaaaacaaaaaccaaacatgatttagaacctggatcagtatctgaaaaagaaggaagttaacaagataatacaaagttcacaatataacagattaaatgacagtaggagagaataaaaatgagctctccctttcttgatagtacctctgtcatataacatatcaagataaatacaacaaatagaagtgtgtccactgtacaaacagaggagaagaatacctagaaatagtaaaaagcaaaaatgcgcaacaaaaaattgtcccactacagactaaataagatttgaaactctaagctgctggattatctccaacagcgatagacaaagtaaagaggaacatgtaacgaattcaatcacagttacctcaacaactgttaacttgtctaatagaaacctgtgacactattattgtgcagatcaaagagggtcacaatagagagaaaaaaaaagatagcagaatggtcttaaaatctaaatacaagtgataaagctttataatttcgaaaagtaatgtaaggataaaggtagcaaggtacaggttttccattttacaagcagaagtaacataagaaaaccttttctcgtccttagaataagccacattggatagcacagaggcatgtggaatcgtgatgatcttgctcttcgcaacaccataaacagtgtgcccacaaatttcaccaagcttctttcttttagtgattatcagcatgtaataaggtcccaagaaccttatgaatcctacaccaagaaaaaattgagattataaagaagaagaaacaactagtatagaatcagatgctacaaagacatttcattaccgatgatcccgtagcaggtggtgacaaatttcaaaccaccagatgatctgtttccctcgtgtatccttctcaaagtttcaaagcattcagcttctgtgtaagccgttgaatcttcgtagatattgacctctgctggctctgtcctatctaacttcaggaccctccaagacgttcgatttttatctcttccaatcatatagaagctctgttccacaaaacataggttaatcagattagcaaatctacggattttatcaaattatgcccaaagaagagaatcaatagagaataatcaccgagcgggtctcgtaaagcctgaatttttgaagaaaggaagaacccatgtcgacttctttgtcaatcgatctctctgacgccgccatttggaaaactcacgtcagacccggagttccgataaactcgggccgacgatacaacaataaacgaattcacaagagagaaaaaaagggaaaccaaaaccccccaaatagatcacacaacgctatatatatacccccaaaccaaatccgaacagctcacgaaactgaatctgacttcacacacaaatattcaaattttacaaactgtaaccagaaaacacagacacaacgatcctaatttcacaagtcactgtacgatacagatcgagattttaaggagaaaatcacaaagaatctgagtagatttcagattggtaaatgaagaagaagaagatgatgacagagctgcggtgaccggaaccacagaaaaatttaagaacaaaaaaaaaggaaatgtactttttttttttttggtgatttctgggtttaaaagtttttaactttaggcgctcgtttaaatatcacctaaatctctaattttatatttattgtttgtcaaaatgattattaaaaaacaaaaaaaacggttcttataaaagaaatattcaatttcgaaaaggtaagtttgactgtaatctttggggtgacttgtaacttgttccattagttaaaatatttaaatactttttttatgtttgaaaaattatatagaaattgtccaactgtgtacatatatagttctatattaaaaaaaaaaaaactagtatagatagttcttattctaaaattagcttcatatgagctggctgataaaattaactcccatatgagcttaaatcatttacacacaatggcacaaataaagaaattttactttaaacattatagtgtgtataaaccatcaattcaattttaataattaacaatactatcatatatgggaatcaaaacagaaataaatataagaatctatatttattaaatttagattcttatattcttatatagattccaatcaatatagaaattaatccaagcttaataaaaaattacaaatatacaaaatggttaggaaaagaaattaattagaaattattcccaaataaatacaaataaaataaaatatatttctaataagtaaaagattaatgtaaaaattaaaaatagccagaggttaaattttgatgatactaaaataaaagaaaatataagatgaaaacaaatacaaaaattgagatgtataaacccgttttttttagtacattacatatttacatttataaggaaagaatgtgactttattgaatttcatgtagtgatataaataatgtattgattttctactcatgtattttgcattatatcatattttaatagctaaatatgatcgttgagtttaaacaaatcgattgaagtgtttaagattgtaactacttcgattatttgtgtttgaattgacgtttagtttatattatcacaaacgaatctagaatctaaaagtcgttgtaagtataactaccatgatcgtgtgcgaaatctataacggtagtttacaaacttttgaatctttaaattataaccacctcgattgtttgtgtttgcgttgacgtttagtgtatttttctcaaacgaatccacgatcgtaactgttgtaaaaacaattaaagtcgttaaagtataactacatgacacatttatgaaagaaacaaatataaatacttataataatctccaacccaaaaaaaataaaataaaaatctgattattgatcatgtaaaacagtaaaagttcaaaagtaagccaaatcataacacaattttgcatatgatgatgtaatgcaagaactactaaattattttttatcaagtaaaaataaaaagtagagaatatatttgaacaaacaaaacaaatgcatcgaattttagtagttaattaggtgtgattgataggctgatggaaccactaaatatttttaaaccactaatttttttgggggggaaatacagtaagaacaagtttttgagaacacttttactgtctgataaaaaaaaaatttgtaataaaataatagtacaaatattattaacttgttatactgtttcaattttcaaagtatggaaagacaacaaacctacggttactttgtttgcattgggactatgcaaactcaaaatatgacaaaacaaaatgagaaacccgtgttaggaaacaaccattcgtgatttcaaaattattaatctcaaccacccaaagacaaagttttcacaagcgtttttctaaccagctataattgagtcaatgacaaacgcagtcagccttttcgggaatgtcgattttctaatttacaaataatgtcaaaactcgttttcactttacattaataaaatattaattcaaattaattaaagacttattcgtacttttcttagaacttagaagattaagcaaaacgtgtacgggagtacaacgtcccttgtatgaatccttctctttcttcaagatattttttggcatgattaaattaaccagctctattaacttactaaatgatttatgtttctatctatatgatatataagatatgaccgttaaaaacacacaaatttaattacaaaggtgaaatgtgaaatactaagcagttttcgcgtgatattatataatttttaaaaagttaataaataaatattataataatctgcttataatttgcggtaagaaagttaatcactgagtatttaaaaaaattaggttcgtaaatgattacagacttgtagtcatttatatatatagacttgccctcatatattacagacttgtagtcatatatatatatgataggtaaattttacatataacatgtgggaaaaatgaacatcatatagaagtcagaagtatcatatgtaatgtaagttagattcgacatgccgtcaggccattggcttctctaaaagttgtaaattagagaatagaatcattaaaaagcaactagcgaatggaatatcagtataaacaaaaagaagaatatactaatatgctttatattccatgtcagcttgatattccatttaatcataactagtttagaaattctcaacgtggagatttgatttatctacactctttctcgtctatttgccaaattctccaacccttcgatatatatatagtcaaaggtttgcaaatgatagacgtttcattcaacttatgtcactttcacataaatcattctagtatactctaatcgagtaaatagttagaattacctaattgttaatgcgaaaggaagaacgttaacgagagctcccgaaccgttggattttgtaaatccgacggcttaaaacgacgaagtttgggggaagatgtacaaaaagacaacatgggaaagaccctgaaaccgaggaactggaaacagctggcttgatgacgtggcataacgtgggcgtttcgtcctatcacaacgagcatcacgtggattttgtctggaccaccgtggcggctatttttgtacgtaattattctttattcgccaaatacatttttaatatttgcaacacattatgaccatcccatgaaatgatgccactcttaatatttacatggggtctttttaagcattatttgtgtgtttttttcctttatatatattttctccttttagaagtaaccatgatgaattttaccaaaaaaaaaaagtaaccatgatgaagaaaacatatttctgtgacaaccttaaagaatttcaacaacaacaaaaaaaaagacaaccttaaagatttaacttatcatcgttgaaaagttttcagtcctatatattatcgtccgtctgtcgctaattctttttcataatacaaaaggccaaactggataatctaaggtttattcgtgtgcttgattgtgaatttgtgttaattttaaatgtttttttttttttggaaagtatatagcttcaaaaaaaaatcttttacggcaaatgattgaccctttttgttttggaaagtatatgctataatttcattttttccttttacggcaaatgattgacaaacatcttccaatgttatccgcatatgcctctaaagagcccttaaccaaattatctcttctgcattcgagttgactaaaacctaaacgtaaaaataatggatttattgtccagaaaaccagaaaaaagttaaacatttataagattaggtatttttgatatgacttacaaattcaagtactcttggtgacatgagattacttctctgcccttactgtattatttcagatcttggttcaaaagatgcgatcgtagacttaagttttcttctttgttacttgatttgagaaacttgagattgcttctactgtttttcataaaagagatacatcatatttattatcaaatatcaattatacgaatacgagattgaaaaggaaggaggtggttaaggtttcgttttgtttggtttttcttgtatctctgttttggttcataaccttttgggtgggtttttcttctgtgtctctactttgctctgtttcctgggcatggctctgtttctttcaatatatgacgttaaaaaaaaaaaggaaagaggtggaagacgatgcttcatctgacttaattgaaatttttattgattttatcattagctaagattggatccgttgggttccatatgcagtatccattagggtttagtttcattgaatctgtagatggatataggcagtgacatagttatggtgaacagagttttgtgttcttcaacaatggcttccatcaacactctcgtcttcttctcacttcgaaatcattgccagatcaatcttcattgttaatgaaatcgtctccttctcgattcatgtatccagacgagacgagagcattattgttcttctccgttcgcttttattgacgaggctcgatattgggttctatatattggattcatctctaaaattggaagatcaatctatagggtttagatattctatttatgaaaacatgttaattggatctattggaagaaaaagttttaatgtgttttatgaagtttctggaaaaaaaaaaaagtagatctcgatgaagaagaagaagtgtgatgagtgaaaaaaaaaggaagggtaaaaacgtcaaatttgagcatctaaagtactatttttcaaaacaaattcagaatgacctaaaatcaaagtttttaacaaagaagtgcttgttttgacaataacccctaaaaataatgacatattttttgacaatgtgctttttgtaggtacataaaaatttcaagttaaaaagcccacaaaaaaaattaagggttagaattttttccccaaaaaaaaaaattaatggttagaaaagtaggttgatagatagaaaatgaaaagagagagagagagattaattagagccgaaaatgtggaaattagtgaaatgtccaatgattgagagaacaagtgtccctttttggtaaccactacttcatcttcccttttttcttgtttttaattaatgactattgttgctctaaaacaaaactaaaaataatgactattgttgaaaataatgaactacatattttgaatgacaaaataaaacattacagaatactctttctgtttttaatgacaaaataaacattacagaatactctttctgtttgataataatattggggaaagaaaagtcgattttttgtcaaacaacctacacaatatcaagtttgaatacagtggtaacattagtacaaatcacttacatatgttgtaactaatgttttgttaaaaaaaaaaagtgggctagcatctttatttttgggttacttgaatatattcaaaatcaagtaaaagagccgtgggcttttaattcatttaatgtaggcctatcggcctagctattaaggcccattttatgataatgtcttccaacatttttattttttcacaaaataatttggagttcaaacaaattaaataactaaacgtaaatacacaacgtcatctgattcttttgtgttttacggagcatttgatttggagttcaatcaaatcaactgtaacccgccatcttaattttagtatgacgaaaacgtcgtcatattttattgcccatcgagctgacattatctcaagaagtgccaaagatattaaattaaattacatacaatcaaattaatttaactaaatttaataaattaaatctaattgaatttaaatcattggaatatttattaatttatatttaaaaatattaaattattttttcttattgatactagaaatgtataagttacaagttttattttcaaaaaattagtttttaaaaaacagttgccaatagaaccgattccaaaacaaacaacaaagtgtctttgtagctggttgtggtcgctagcaaatacgaaacaattacatggccatatatatatatatatatgcgtttggtacttagtgatcaattttgtcatttttaaccatgtgaagagtttttgttttttttcaacaatcaattgtatatatattttttgccatctttatcacttttaataatagtaaatgaaatatcggtattcattttctgtgacctttatagtctatcattgaaaatagtgttggtgagaagtttagtctttagggatatggtgttattggaggaatcccaaggcctgaagcaatctttgtgtgaagcaaagcaaatgtaagaagaatatatcatctaaatttgtttaagaacacatcactttatatttaattagtctcatataatagcaaaatttcggatctaaaatacatgctacgcgagcctaatatttcatatgcgattgagatatcttttaccttgtagactgtacttgtaatttttttcaaagaagttacatttactttactatcttactataaattactaacttttgctgtataaatatgaccactgaacgtctgtgaagttcacgaccaaaccagtcttactctctcttaatattaaatcattggaatatttattaattgaatttaaatcattggaatatttattaatttatatttaaaaatattaaattactttttcttattgatactagaaatgtataagttacaagttttattttcaaaaaattagtttttaaaaaacagttgccaatagaaccgattccaaaacaaacaacaaagtgtctttgtagctggttgtggtcgctagcaaatacgaaacaattacatggccatatatatatatatatatatatatatgcgtttggtacttagtgatcaattttgtcatttttaaccatgtgaagagtttttgttttttttcaacaatcaattgtatatatattttttgccatctttatcacttttaataatagtaaatgaaatatcggtattcattttctgtgacctttatagtctatcattgaaaatagtgttggtgagaagtttagtctttagggatatggtgttattggaggaatcccaaggtctgaagcaatctttgtgtgaagcaaagcaaatgtaagaagaatatatcatctaaatttgtttaagaacacatcactttatatttaattagtctcatataatagcaaaatttcggatctaaaatacatgctacgcgagcctaatatttcatatgcgattgagatatcttttaccttgtagactgtacttgtaatttttttcaaagaagttacatttactttactatcttactataaattactaacttttgctgtataaatatgaccactgaacgtctgtgaagttcacgaccaaaccagtcttactctctcttaatattaaatcattggaatatttattaattgaatttaaatcattggaatatttattaatttatatttaaaaatattaaattactttttcttattgatactagaaatgtataagttacaagttttattttcaaaaaattagtttttaaaaaacagttgccaatagaaccgattccaaaacaaacaacaaagtgtctttgtagctggttgtggtcgctagcaaatacgaaacaattacatggccatatatatatatatatatatatatatatatatatatatatatatatatgcgtttggtacttagtgatcaattttgtcatttttaaccatgtgaagagtttttgttttttttcaacaatcaattgtatatatattttttgccatctttatcacttttaataatagtaaatgaaatatcggtattcattttctgtgacctttatagtctatcattgaaaatagtgttggtgagaagtttagtctttagggatatggtgttattggaggaatcccaaggcctgaagcaatctttgtgtgaagcaaagcaaatgtaagaagaatatatcatctaaatttgtttaagaacacatcactttatatttaattagtctcatataatagcaaaatttcggatctaaaatacatgctacgcgagcctaatatttcatatgcgattgagatatcttttaccttgtagactgtacttgtaatttttttcaaagaagttacatttactttactatcttactataaattactaacttttgctgtataaatatgaccactgaacgtctgtgaagttcacgaccaaaccagtcttactctctcttaatattaaatcattggaatatttattaattgaatttaaatcattggaatatttattaatttatatttaaaaatattaaattactttttcttattgatactagaaatgtataagttacaagttttattttcaaaaaattagtttttaaaaaacagttgccaatagaaccgattccaaaacaaacaacaaagtgtctttgtagctggttgtggtcgctagcaaatacgaaacaattacatggccatatatatatatatatatatgcgtttggtacttagtgatcaattttgtcatttttaaccatgtgaagagtttttgttttttttcaacaatcaattgtatatatattttttgccatctttatcacttttaataatagtaaatgaaatatcggtattcattttctgtgacctttatagtctatcattgaaaatagtgttggtgagaagtttagtctttagggatatggtgttattggaggaatcccaaggcctgaagcaatctttgtgtgaagcaaagcaaatgtaagaagaatatatcatctaaatttgtttaagaacacatcactttatatttaattagtctcatataatagcaaaatttcggatctaaaatacatgctacgcgagcctaatatttcatatgcgattgagatatcttttaccttgtagactgtacttgtaatttttttcaaagaagttacatttactttactatcttactataaattactaacttttgctgtataaatatgaccactgaacgtctgtgaagttcacgaccaaaccagtcttactctctcttaactaataatattgagatggcagacaatttgaatttggtgagtgttctgggagtcttattggtattaaccatcttccataatccgatcatcgtctacgccggcgagggtgttcccaacgtagctttgttcactttcggagactcttactacgacgccggaaacaaagtgtttctcagccaaaggaaagatcttccacaaacctattggccctacggaaaatcccgcgactaccccaacggcaagttttccgacggccacatcgtccccgacttcatcggtatgcttttgattattctaagatatctatttgattattacagatgtgcatatatatacaaccataaatatagaaacaagataattattaaacatggtgactaatgactatgtagctgatttcatctctattccgaatggagtactcccaccggtgcttaaaccgggcgttgatatttcacgtggagtcagctttgccgtcgccgatgcttctattctcggagcgccggttgaatctgtaagtccgttttcaatatttgttgttttgttttaaagagatagactttagggtttctaggtaaagaaacaatgttaaaaaaagtattagataaatgaaatcattacaaaaaaacgttattttaaaatcttatgaaacactattttttaatgtactaatattaataagttttattttcttgtgtttatatccagatgacactaaatcaacaggtggttaaattcaaaaatatgaaatcgaattggaacgacagctacatcgagaaatcactgtttatgatatacattggtacggaagattatttgaatttcaccaaggccaaccccaatgcagacgcttctgctcagcaagcttttgtcactaacgttattaaccgattaaagaacgacatcaaagtacgttgtcaaacaaccaatgtacaagctttttcgcactttaattatgttcaaatgactaactataacaagttattttacagttgttgtactctttgggagcgagtaaattcgtggttcaattgctagcaccattgggatgcttaccgatcgtgagacaagaatacaaaaccggcaacgagtgttacgagctgctcaatgatttggccaaacaacataacggaaaaatcggtccaatgttaaacgaatttgctaaaattagtactagcccctatggttttcagttcaccgtcttcgatttctacaacgccgttcttcgtaggattgcgacaggaagaagtcttaactacagtaagaaaaaaaactaactgttccattaactaaattcgagtgatacgtacatatctcttttcaaactgtttatttaatacaaatgtatcataaaatatttgtacaggattcttcgtaacgaatacttcgtgttgcggtgttgggacacacaatgcatatggttgcggaaagggaaacgtgcactcgaagctatgtgagtaccaaagatcttacttcttcttcgatggacgtcacaacacagagaaggctcaggaggaaatggctcatcttctatatggagccgaccctgacgtggtccagccaatgacggtccgtgagctaatcgtctacccaactggagaaactatgcgtgagtattgggaacccaacaacttggctatccgtcgtcggccgtctcgtgacttttacttgggcctcgccgcctattattagttggatggctttgagctgaatatttcgatatatatgagagctattgtcttataatgtataatcgatatcgtaacgtggaattatgcctatatgacgtcaaattatgcctttgacgttgtcgaataaactgcttttgaatatctgttgtatcctctaattttggtaatctatgcaaaatagaataaatttataattgtcgttgtttgtacaacttgatcattggctcattgctacgtggactaataattgtttttaatgaaaataaataaataaaacaaaattccatttaaaacatcaaagttgaaacattctcccaattaaaacttccaaaatttgttgtttccatataaaacctccaacgaatttttttttttttttatttttataaaaggttaaatttggatccgctattagagagagcaagagttttaagcctcatgagaagaatgttgttaattgacgtagtacatggccacttaaccgacataagattttaacaaactaaattgtgtcaatggacgtattacatgatcactggaagagaagagttttcaaaattagttagaacataagataatctgcgatcgaggagaactaattatctttctttttttaatggttttataatctgacatttgatccataagtttttggttaatataagaagaacaatcagcgttaagttatcttatgctacttttatggaaaatttattaccactaatggtaatggacaccatgaattagttaatgttcagattttactgtaatacctcaaatcggtccactggtattttgtcacaaacttacaattcactggaccatatttttttttcgtcaggatcaaatggaccacgtttttttccggaaaacttagcattaacttgtatctggttatttcatccaaactaaatttaatgcaatttgtttttggtagggactaaatttaatgcaataacatggcctttctttttttagttttttaatatatttttttttgaaagttcgtatgattttaaaggttgtctagagccaaaaactaatcttatattccgaaaaactatgttgaattgctcgaattccggtgaccaatagtccaatactactcacaatgttgaaactagaaacaatgactctattcaaaaaaatatatatatagtcgattgatcgatccttgttactggcattgaattaaacgcatgctccatgttatcacctcggtaaccaatactaaatatttattgttctgtcgagctattattaatcatacctacgtcggatc

SEQ ID NO: 416 - DNA, 3059 bp, Arabidopsis thaliana
tcaatatctcatcccaatttaaacccttcggttttcgttccggttttgatttggtttacttcttaatgaacaataatcaaccgaattaatctcggtttggtttggtagagcagacataacacatgagcataaaagttcaaatacagacatagtagaagatcaaaagacttaaaagctagaaaaacctttccaaaaatggcaaagaaccgtaacttagtcttcttcttaggggtattagcgtcttttacactctccagtttcccggtaactgtttccggcgagccccctatcttattcactttcggcgactcttcctacgatgtgggcaacacgaagttcttctcgtcggagttcgatccagccaccacgtggccttacggcgattccatcgatgatccctccggtcgttggtctgacggccacattgtcccagatttcgtcggtaaaaactaaaagtcttacactttcttttagggttcttgtaattgattccaatttcattgctattaggtcgattgattggtcatcgtgaaccgattcctccggtacttgatccaaaagctgatctttctcgtggagcaagctttgccattgctggagcagttgttcttggatctcaatctactactgcatccgtaagcactgttcccgccattgttgataaaaaaaaggcttcgtaagagttttatatatctatgtgttttattttgttggatttgcagatgaattttggacaacagatatcgaagtttttagagttacataagcaatggactgataaagaacgagcagaagctatatacatggtaaacataggagctgaggactacttgaatttcgcaaaggctcatccaaatgccaatactgtggagcagctaactcaagttgcccacgttctccaaaggataccaagagagctcacggtatactttttagttattcacaactctctcaacttgatagattgatggatccaacttggtagcttctacaagtttgatcgtagtaggaattttgttttggatatgtgcagagtttatacagggcaggtggagcgaggaagtttgcggtacagaatttgggaccgcttggttgtttaccgatagtgagacaagagtttaagacaggtgagaattgtatggagatggttaacttcatggtgaaaacacacaatgaaaggcttagtcgtttgctcgttgcgataaccgtaccgttactgtaccgtggcttccggtacagcctctttgatttcaatggtgaaattctccggaggatcaatgaaccatcactccatggtaattaaattatagaaagatgaaacaactcttttttaaacatgtggattcggttgttttagttaatgctcatgtttatggtggttaggatatactgatacaacgacttcttgctgcggaactggatcgagaaatgcatacgggtgcggttatagtaacgtgcatgctaagctctgcagctaccagaaatcatttttgttcttcgacgggcgtcacaacaccgagaaaaccgatgaagaagttgctaatctgttttattccggagacaaacatgtcgtctctccgatgaatataaaggatctcgtaggtaaagcagcgaccgatcttcttgcgcaagaaatctagaaatcccaatcgtgttctgttctgtttctttgaaataagtaaatggttgttgttgtaaactgtaaaactctgtattcaacttcatatatatatgatgataaagaaaaaataaaccgtttacattggaaaagcctagagtctgaacaatgttttaagattgtaaggtgcagtgacattaggtggtccgctccaaatcagctcagcgatctgttgatgagccgtttccgtcaaatgagaaggatcaaagaagacgtaatcatcagcgttttcgcatagcttgtaaccttgcgatggtccatttcggaatccacatgtattgattcccctcaacggcccactcccgcaacatgccatctccccttccttaaaaccgtaacgagaaggattgttgattctttgggatagagaagtgtgaaagtcatgaagagcgtatttgaatccggataaccggcgctctagacgcctcaagacttttggaaattcttggttatggagattgatcagctctgtgactggctcgaaacaagatcctatctttgtactgtttattatcaatgcgcttggtgtacaaccaaatggacccaagctcaagaatccgaatttccttgctcctaatttatacaactcctgaaaagaaagatttcacatttttatcatacataatcaaaggttctattcctctctgcttttagttgacaaaaccagttacttacctcgattacagtcgttgtgttaccgatgacgaaatcgatgaatctttctttggtagtgttactaaaagttgaggtatttgcaaagaatgggtattgatagtcatttgctcctatgtgaaaaagataaacagctttcgagattactctcctcgcctctgcatctcctaaattagacctcaacgttttctccacgttcttgaagttgtttaactgtgttcccaaatctttcgactttgatgaaaccaaaaaaggaatagaaaattcttagtcaaaacagaaaattttaggtcttgttgatctattgacgagattagttaccgatccgggaaaagttccggcgaaaactccggcggctgtagtagcgaaattaagtccataggttagttgactgttactgtaaccaggttgtagatttggcgggatcaacggtaaccatgcgtattcagctgccacgtcagattataatccgttagaaaaaaagaaagtaaaagagtacaaaataaaactcatgtatcaaattggtgattaccaataaaatctatcattattcgtccatcagagacccgtcccgttggaaacttgaacgttgttttaccatacggccagaaatttgatcggaaacttgagatagagtcgaagtaattattgtttccggcttcaaacagagaatctccaaacgcaaacaaggcggcttggttcgttttaa

SEQ ID NO: 417 - DNA, 83906 bp, Arabidopsis thaliana
gatcttctttgcaagaaatcgagacgatcgataagcttatagtgcagatgaataagatgatgatgatggaattaaatctaggacttgccatgtttagttgcactatctttttcttactaaaacaaaaactattctgcgatccgttttatatacatgtaggtgttttatttatttagtatttttagtttaaagatgtgtaacgtggtcaacttgtgcgactttgaatatatatacaaaattttcattacggtttttttttataaggctgcggagtttgacgaagacagcgtcaataatcaatagtagtagactgtacaaaaatcttctaacggcccattatttttctataaacctttatgattgtgccttctagtttgttgacttccaatgtttttctcttgaaatttttgaccaagaaaatatatctgcttttgaaaaaacaaaaagtaaattccaattgttgaggaaagttatacattcaaaaagctttacgttggatttgtcaagtaaatggaaaattcaacgtttagttacgaagaaaataattgtggatgtcgagtgggctttcattatccacgactgtagagcaacaagaattattctagctgaaatgggcttttaataacacagatatgaaattagatagctcataactcagtatactctttttttttttttttaaagtaaaataacttacttccaaaacaagtgattacggtgacgactcagactgtcatagtgtcatagattggaaaactagttttggtttctctgttatccatagtaaaatgttgtcttatgataatgggaatttcacggtgtacttgggaaaagaattagtcgcaaactcgttgattgaacaatgaatcttcatctagacagccttaagcctttagttaccctacagaatcattttgatgatttccaatattttcttgtaagcaatgtggccatgtgggtgtattattatttttgtattttcatcaaatggttcacgagaaagtttacaggacaaaactcaattctgtctcatttttccttattaccaggcacgttctttgtctggttcggtcttgtttcctgaagcttttttaaatctattgttttcgaggtgtacgaagaatctttctaattgcttttaaagtgaaagttgtttgaattattcaaaactaatgaataaataaggcatatttctcaaaatcaatcaagcaaagttaggcagagaagattcattgaacagatagagaagttccaaagagactttattataatgctaaacaagtttgggggtacaaaacattacactttcgagggtgatgatacgctataacaaagatcaaaaagagagctcagaagactaataaactgtcttttaaatagaaaagaaatacaaaaatgaaagaacaaaacaagacttaatagatagatattattatacctctatttacttcatcacaccttttttatttcgacaaaattaaaagagaaactctctatggaagagaggctcatgagataccaatgcatagagcttgaggtgtgacttgtaccatcccccaacagcaaaatcctgaaacaaccaaaaaagaacgacagaagattaatcctgaaaccaacacttaggttgtttgtctttacgattcaacaagaagagcttgtaactgtaactcaccaacacagctttatttacaaactaaggaaccatcgatcacttcaaaagtctccttccagcatgaaattgatctcatctaagctccatagctccactgggttttcctcttcctgagtcacagcaccagcatctgcgccaagcatggcttccacttctagtggggtgtcccacaaggcgttgtcaaggtatgccatcagatcgtctgactcatcagagtttggtttgagcttcttggctgcattggtttcttcaacaaatgatgcttcgttgttattgacaagcattgaagagatctcgggtgttttagggccgtgatcactccacccgaactcagaacagtcgaaggagttactgccctgatcggaactgaaatactggtatccattgttacctccagcatcgaacgagtttgttaacccaaactgattgttgtacatctgaggcttctcttccatgaaactcatatcaccaaaagagttgtcaaaggagttgttgcagtactgctgactcagatgtgttggctgctgaaccaaagttacgcttttgtttggtttagccactgatttctgaagattattagtcttagcactaggacgtttctgggatacgacgctagggttcttctcctcgggaaaattcaccttagctttcgtgccacggattctgcgtgctgcagcatcataagctcttgctgcttcctcagcagtgtcgaatgttccaagccattctcgggagccttttctcggatcacggatctccgcagcccattttccccaaggacgctgcctaatccctcggtattgattcttcctcttcctcttagaagatttctcagcttgctcagcggactctacagttttcttggcatatgctgaacctactgtagccaaacacacacaatatcaatcataagctgaatagaacaaacaaaactgcatcccttcaggagctaaggacggtaagctggtatataatcaacatagtaacagcagatggttacaagaccagtgagatcaaccaattccaaagactaagctataaactaagaaaagcctctgaaaacctaaagatctaaaaatttcatgagctttccaattcaaataaaagttgagattcgaatcaaacccaaatatataccagtggagacgaaagcggaagctacgggcttagtagttgcggtgaagacgaaaggcttaacattgacgaagacatcatcatcgtcttcgcagtcaaaagccgagtcatccttaaacccttggaaatcagcttcgaaatcatcgtcaagatcgaagaaatcggatcgcttattcgatctcttctttgaagctttcactttgtttttcagatccggccagataaactcgttagtgacgcggagggacctcggcggaggtatgaaatcggagattatagctcctccacacatggtggcttcacgaaagctctactctttttaggggtgtaaatgatcagaaatagaatcttcggggcgaaataataaatattcgattctttggggttctcttttttagtttttcttctttgtctcgatgttactctccagaaagaatgagaaagggtgggtcgtatattatatagattgattctttactattatacccttacctgtgactcgtaatggctgttatgtgtttaagcctttaaggtgatttgtcatggtttgggtggctgaatataattttacagtttagtgcttattatataatgaaaaaatgcaataattggtgtagattcttttgatgttatcactatatatggaagataatcatgcaatgaaaatatctaattttcataatccactagtagatactagataatcatgcattgaacaaatgttctcataattagctagtagaccaaacgtgttttacaaatatattgaaaagctatgttttggtatatttgattatttatcaaccctttaaaatatgtaatatatggttttataacaaaataagttaatacaaggtaagttgcatcccaatgttgtcatatttgactgtccttagaaatgtcaaaactcaaaagtaatttcccaacttttataattgacgctttttgaacatgaaacacgtacgaacgttctaaagttagaactaattattcttgtggttttcagttttgcatggtttatgatctggaagtccaatacaatcgtccgttgtgaaccttttagtgtgtaacagggaatgatttatgtaaaaagattctacacattttgacagcatagtttatgtcaaagaacaaaaattcaaggaaaaaagaagaaaaattaatacacatctttagccattattagcaatgacatcttccacgtattaggctaacatatatagatgcttctagctagcagtagaaaaagataaattttaatcccagatagttgccaactttcaagtaagtaaacaaatcaatcatgtgtgttagaatcgacgagatttgttgagatttcaaaataaatgaaccccatccctagatgatattatcatggagtggcaatattggaaataccaaaaatgagctcatctatgggcgtgtttgtgttacacggagttcattgaatcttgagacttggaaaagagataaaagaaagacaagttgagcaagtggactctacaaggctttgcgttgcccgagtcccaccttgttaccacacgcttaagtcttaacgcacatcttcaaaactaaaagatcatcaactatttattgttaattgcatatcaattcttctaaatgaaaattgtccggtgtatcttaacatgtttaagatacccgttaatcttcatagttttttcgaaatcatattccgaagagttgaagatggatagtagtatacgtttgtagtaaatcaatgtgtatatctacaaaagataaaataatacccccaaaaatcccaaaaaagaaataagtagagaagataaagttaagaatgcaaaaggaggtaggaccattatcctttggtacgattgagacaaagctccaaaaatagttgatctcaagaaacagaagatgatgtaagttttgaaagctacccatccgtatccctgcaattatttttgtttccgttattaaatgagctgtagagtatagacaagcaaaatttaaaataacgaaaatatttagaaaaagtaattaaaatgagcactattttattattatatcttatgctaggaaaatgtaaatgaaattattttgttcatttttgaatggtagtaggtgatctgcatctaattttagatggctgtaaaaatctagaaaggttccaatcgaatatttcaatctctcaaatctaaaggctttatttaactcctaatctggttgtctgccactaccaccagttaactacacacctgcactacacgtatcttctagttgaggctataatcgaatcatcattctttaacccaattttatattactatctaagaatatacatctatttctcagcataaaagattagggggaacccatcattttgactttggcttatccggaaaattggatgatcatgattcatgatatataataaaataaaatcagcatcacaagtattattttttcttgtctaaatataagtattttcggttgtatgcaaattttttattgtccttttaatttttgacacagttttaaatcaatttttaaaagtcatataaactctctattaaaactaaaaaaaatgaagtttcgatgaacacatataaatagaaacaaatttaaaatcatcatatctttttctacttttaccaactcatctagaaaaagatatgttgaagtgcatagatgtgggcttggagcttaaagcttaataagcctcaataaaagcccatatcacaagtgaaagatattcttcagctacttctacaaaaatgggacgttctttagacgctctatctttcttaacaacaaaacaaaagatacatatttatattacaccaacaaagatcatagacgacaacaacaacaacttatgatctttctttttcactagtacaacaaacagagaccagaattttcccggtcaccagatcctaaaccccttcaaagaggttgttgaagagtgaccaccaagggacttgtcacattccgtttcccatctgaccaaactatatgaccagtctccacatttgtcgctcctggtgacaacttcacctctgtggtcttaaccctaacaacaaaactcagtttctgccccacccgtctgaacgatagcttctccggctcaaccgtcaccgtagtccctctaggcggcctaatcttaatctcgtaaaccgaatccgaatcgcctacatttgtcacagtcctaatgaaatgtgtcgacattttactctctccatactgctgaaacacgacagagaacgacgggtagtttaaattcccgacgtgtcccgctcgtcttgcaccgtcacagtccgcttggcgacgggttattgtcacaatgttggttctagtgtagttagaattacacaagaagttgatataatcataagatgttatatcatagactaatcccggatccatagctttggttgggtgaacatgacccgaaccataatccataaccgaagatgtattgccagtggactcatccatcatcggctcaccgctgttatcaaccgtgtaagccgtggttatcaatgctgatcttatcgccgccggactccaatccggatgagccgccttaagcaaagcagctagaccagacacgtgcgggcacgccatcgaagtgcctgataaaatgttgaactcagttctccggttatcagaagtaacaccagatggaccaatccggtcaggccaagcagctagaatattcaaaccaggtgcgattacatccggtttaagaatctccggcgtctctggattaggaccacgagcagagaaagatgcaacaaccggtgcaggtcggatcccaagtcgggtacctttgaaaacaatcgtagccgttggatgtttcgatgaacgagatttggatgattcagagatatacctacgaatctcatctcctccagaagcaccaacagatgtcgccggtaacacgtggcaatcagctactaaaccttcaccgtcaaacacaccattcgctataatcatccccaagcctccatttttccgtacgatctcacctttggttgctctagaattgattcctctatcacaaagaacgatctttcccttcactaaattcggatccaacgagccttcaagacacagagacgatgagtaaccatcgccgcctagtaaactaccaccgtaaacaagcgggtacattcgacccggatccagacccggtccaccgtatacactaacaccagaaatcatcttcccgttaccgagtttcacattggccggaaaatccctatcgattgttccagctccgactgttgtcatccacggagcaacatttgtcaccgttaaagcaccgggacctccgttaccggcggaagcagagacgaatatgcctctgtcaatagctccaaaagctccaatagcgatagcgtctaggtaataaggaaccacgacgcctccaacggagagagagatgacatcgacaccgtcggcaacggcggtgtcgaaagcggctaagatatcggagtcgtaacaaccggagttccaacagactttgtaagcggcgagtctagcttttggagccatcccagcagcgacgccgtgagcgtagccgagagttgacgccggaaaaacgtaacggccggcggagattgaagctgtgtgagtcccatgtccatcggagtcacgcggagagcgaaactcagtcgtttcattcattttcccgttggttgcttcatacccaccgcagaagaatctagctccgacgagtttacggttacaagcagactccggaaaatcttgggaagcgatacattggcctttccatttaatgggaacaggaccaagaccacggtcatcaaagctaggtctttcgggccaaacaccagtatcgataactccgataactagatccgacccgaaatcagactcttcgagtagacccgctttgtcggtggacctaagaccaagaaactcaggggaacgagtggtgtgcaagtgacggacttgttccgggataacagagatgacatgaggatggtctaagagttgactagcgtcttgtgaagtgagtctagcggagaagccatggaaaacggtgtcgtatgtgtggataatggagggaggagaagaggtgagtgaggcaagagaggaagtgtaccagtgaaaatgagtggggaagattgagggtttagcttcgtggtcgacgtggacgatgtaagtcaaggagtttgaagaggaagcagaagaagaaggagaagaaagagtcaagaggaagaaaaagtagaagaagaaagccatcgacggagaaagttagggctttttctattattgttgattctggatttggttagtgagtggaggaagaagaagaaggtagagggtaccacattgacattgctacagaagcggagaaagagaggatagaagagaactgtggtttccctagtgtgtacagagaaaggaagcagaagaagttgtgtttttgtgagctggaggcactgtctttttttattttgttaattacgtaaatacccctatatacttttctaaattattgtgatagtgttggaaacttgaatagtagattagatatgggatttatttgctcacatagctatcatccattagaatgaactgaatgaacaaacacaaagaggaaagataaaaacatttatattagaatgcagttatgtttcaggtggcagattcttatgttttggtcacgggatttttaaatttctatatgcattgcattgcgtagattgggatatttgtcgattattattattaataccatgttttgattccatctttgtttagcttcagacaaaagtaaggattttcacgttgtttggatttggtaaagctaagcctaaaactgatggatgtcatgtgggtccttttgtttgttcgacatgtgttcgaatcgctcctcctgtactagaatcttatgataacttgaacttttgttaatcaaataaggataaggctttgtgatatttatgtccaatgttgattaggagttagatagatttaaaatgttttgaacaaattaacttataagtattaattagtttatcgcacgatttgaatggcttattaaaaaattacaaactaaaaagtctattattattattttatttccttaaaagtctataattcatagttcgacgcttacattatattggacctttaaaagcataattaatacgcgttacgatgtgtccatgttccaaagaaaatccacctgactagtcgatgtttattgtattattgaaccatttgataaacccagagaccaaagcagagtgttgagttcacgtgtttttgttcttttctgctatatattttttttacaagaaaataaccatctacaagaatgtaaagtctatataaaacgaaaaaatagtgtaccctattcaactgtattggcgggtaatacggccaataagtaggtccagagttttttttttaattattcaggcatatttcctgcagttcattgaaaaatttacatttaccatccattttatacatttattatcttcgttttctaatagagacttcggagaaaagaaaatgagacattttttttgtttaaaccaattattgactatggaggaagtctagtaatgagtatagaagctctctaaagcgggacatagaatggaccttttctctaatcacccttcattttagcttttgcttttagttttttttttcatctttgcttttagtttagaaacaaaggcgaaccataccagcaacttttgaatcttaatttttaattatatttttctttagaaagaaattttcgagagtaattttgtaaatttatgtaaaactatttccattggggtttttcataatagttttttacaattcaaaaaaataaaaataatgaaaatgaaagagagagagtgtaaaaagtttctcacttgagaaattctgagatattctgtacaacccatcattacatttctctttctactattgattcaattttttaactaaaataaaattttaatcatataattaaattataataaaatattaatttttttttgtttgagaaacggtgggtttctcttggatggagatgccctaatgggcttatcaggtttcaataaactcatgggcctccagtttctcatgaacaataaacaagacaataagccaacaactcgttataagttcattcatacgacaatgagccaacattaggatggagaaaaacaaatacttaaaagaaaacatacttaaacaaatttatcgaataaaccatcgattggccttttagatacgaatttggcatgcgtgagaagaactccacacagatccacaaccatagcaaaactgatatccacacctacgaattcacaaaaacaaatcaaaatattagtaaattaaaacttagtactaaacaaaatatttgcaatgattaaaaacaaacctgcattttatatgttgacaaccctcgactttatcaacatagaatttgcaactaggacaccttctccactgcttattttttgccatctgaatcaacaaagcatcgtcttcatcactactcttcttcttcgtattcccaaatctttgaaactcatcacacccaatccccgcatgccatgtcaccttacactgcacgcagaacagtctatgacaagaacgacactccgtctgcgtcacgttagcatctccattttcattgttcaccatcatcgccgaacaatctttgaacggacaatagaatttgtcccacgaggagatcaaagactcgcacaagattttctcccaacggtcgaatacatccttagggattagatctcgacacgtgtaaggctctatcagtcgcgtgcactccacgtcagggcatttgatcctcgatgcgttttcttttatcttagttgccacgtaacggacagtacagtcggtgcaataggcgtgagtgcagttagtggttcctcggaagatgtctgaggaaggtttttcgtccatacagatcatacataaccttcttgatggttccatgggttcattctcggctttaatctccggttcctgcttaaccagcgtgactagattcctatggacttgaggatgatgattaacaccaacagtagaagcgccaaaagaagaaaacatagcttcttggagatggatctccgtagcatagctttcgtcggcgattgggaaaatttcatcgtaatcgaataaagcagagaggtaggtttcgtctaccaacatatcggtgtccacctttgtgcttgacgacgatgatgatgaacccataagttttgttctgtgtgttagtgcatgtgtttagtgtcttcttagttaaatgcataggtttaattagttgtcagtgaatatatcattggaatatgaaattttaagcaattgaatcgtagtcaatgccttttcgttatctcttgatacattatgcgaaaaaaatttaaacttccatatgtttatgtgaaaaaatgttacattaacatatatgataatcgatttgcaccaaaaaaaaaaaaaacatatatgataatcgaatgtataaggtaatatatgatatcacgtatctcgaatattagtctttacttttcgtatagaataaattaatgaggaaaacttccaactttgatgcaaatcgtttttccctttctccacatcccatttattttcaaatcctaaaatctaattcatatgtcccatactaccattctcgaacgtcgtcgtttactcgttttccagttcaaacgatgtcgtgttggcttggtgcacccaagtcgttttgcaacttacgtttacaatgctgtttgctatgctatgcctctcatgttttctttctactttccaattttttttttctcacttcattatttgattaggtggttcaaattaatttgattacggagttcctttgtaaatgatgtaagaatcgattccaacattaatggactttaaattatttttaaagtaattattagttgggtcctcaaacatttactctactcgcttattagccctacggccctacaccgtataaaattgcaaaatccatctggagattattggttgtcacttgtcacattttttttttttggtttaagaacattttcaacgaagaaaagagagcttacactcactttattaaaactctaccttacaacaagtaacatcatcagatataacattgtcacattagttgtacttcgataaagtaagtatatacactacaaaatttgtggaaacctaaaataaaaaaatagtttacaacccaaaaatctcatcaatttagcaacggtaaagtatttaccttttacagtatacaattgataagactatgagctaaaacaagtccaatgatgaaagagtgatcaacttgtgactccaccatcatcgtcaaaacatcatctcccaacttcaaaccgtttatcgattgttttctcttcacttctgccaatagttttccacaattatcctcaatcgctagacttgatccgcgagttaccatcttataacaatattgttcatcgtttctacatgatcccgcgttgactctatacgaagatgatgaatctttatttggaacttgaaaaacattatttttcactcgaaaatattctagttttgttgttgattcaactgttgctgatgatgatctatatccttcccatgtcttgaataatccaaatttctacatacaccaacaaaaaaataacttaattagttttgaactttgaagtgaataattgtgttaaaaaataattgcatgaaaaaaatggaacgtgcgcatacctgtctacgtaaggtaaacaagacatgaccggacaaatccatgagataaacttcacgacagctcttagaattataattgtcgacacgataaattatgtttcctttggaatcgaagacggtgcagccatttgtgttgaacaccaacgacttcatccatatagtgaaactctcttgctccgtcgtcaagtacggtgaacttgtttcttctccggcgccggaggttgttagatcgggatgaatcttcaccatagtctctgctggacagattcgatattgccaagtttttgtctcaaaaggtcgtcggtatatttgcatatactatatggagacaatgattcgttttttttttttttttggttgattcgatttggtcgagctaattggattaaaagtcgggtttatatgcacaaccgattggtggaagttacttactttgttcgtttattgattaatttaagccaacttcatgattattcaatgttcaaagcaattaacttcttgtcacatttttaattcctcgtgtttcagaagaaaagtctcactacatgtttgaatcttcgatgtttaataattatataattaattttatgcatgtgatgtcgagttattttattgtttctttgtgtatattgatgtgtgaactactatatatcgatctgatctgatcaaggccttcttccacatgtttaatgtgaaattctaatgacaatttctggagggaaaaaagtactacatttataatttatatcatagaagtagaggcagggagctctaggcagcttgagaagttgctcaatcaaatttgatcgtgtacatgtttatgtcacattcacaccaatgctaattaagtaattatataaataccaggcaaaaaccttttttttttgttatacccttttttgatacattatacaatttaatatgaaacggaggaaataatgtgtttgttatatatgcattatatacaaataaagttagaaaaggtgaaaattttgaagctaaaagaagtaacctgtcaatataaagttaaaatggaaaaatactcactcaagatttcgttcaatgtactttttttgtttgttatcattgttcaatatacttctctagctactaaattaagtacagtcacttttcttgttgtaattagatcacacaatatcagcaaccgcataaacaattgagtcaatgcttaatttagattaaagtgttaatatagcacaccaactgaataattgttagacgcattcaaaatttattacacatatacagtgtactggcgacatagttattgctaataattttaaaatctaacagcggggtattaattacgtaatattgcatttggtcgtcagtcgtcactgtttgtaaatgaagttggagtcgacgaagagtggtgcatgtgcatcgtcgtgtcacaggttttaatttaggtcttaggcggataagcgtcagtcgtcagagatcattacccttttgtcctgtcttaattacatattctagtttctttctttaatcatatgaactaaaagttaggtttttatttgtcctattcattcatacacttttaattgaataatctcaaacttttggcatgttgaacctttctagtagctgacggattcccgaattgatactaaacagcaacttgagtataaatattacataatgagatcactgaaaaaaacatttgtaaaatatataaacagagacggttttcttataccaggtaacaaattatgaatccggatttgaaaatataaaatctacttatattgaaatggcatggtgatcacactcgtcagcaaacactactattgacactttaatctcgtgtttttgttttgttttcaccatgtaattgcattagtcgaatagctttcatagtttaaagtttaaacaaatgaatgacagtactttttgacgtatgtattttaaacaatttactaatggtgggtttgttcctaagtgtacatcatctgttacaaatccaatatagatgacaaacgaccaaatatatgtaaacattttgggatactttttgtgcccttttctgttaggataagcaccaggtccatatatcgattactgacaaaaaaataaagtaaaaagagaggagttttaatattttgtttgattaattaaaccaatagatgatctagtgtatgaagttttaaaagagaggagttttaaaagttttaaattttttattaggtagcctaatcttatttttcagtcatacgtatgtctctattggtgtgcaaaaggccaattagtgatacatcttattctacgtgtgagtaatcctaatttatagagttattaaaacgacactttctggggacattttaagaaattggaatgagacacataagataagcattcttgagattgacccccaaaaaaagataagcatgcttgatgtatgacgataaacttgtagatttgaattgggagagggatgcgagtttaggatttgaagatttgtacttactctcatagaaatatagtaatgccactttgccaactcttaactagatagtagatacatatatatcttggtaatagtatttttacatgttgataatatctcaaaatatctcaaaatatctcaaaatatcttgttattctctatagaaggtgtatagtgcttgtctagagacgcaataaacgaatataaaactacaaatcacaagttgtaataacaataaatacaaatgaaaataataaccaccgtatacgaataaatattccactataaatgttataaataagaaagctaaagttaaaaattaaacagacagtgcatagcctttttcaattacttgatgcgcacttagccaactccaaacgaattatgcacttgtctttttctttgttgttgtcacaaatagacctggtttaagttaaccagataacatacaaaacatattgggtatataggtccattgagcccattagacttcaagcaccctctagatggcccaatatcttgactcaaaattagaacaagaaaaggggaattattgtatcgattaattccatatcctatgatccaccgaattattttcatgtctacataaaaacatctatataatatattggacccatcatgccggtataggctaatgttacattatccaaagaagaaagaaatgaaaatttgtgtttgttgtatataaggaaaccttgcatccaaaatcaaatcatgaagttaggctaactttttagctgtcaatgattgcaatttgctcctttgtttgccttctaacataatacggttgaccaaaggcgtgtttctgattttaaaacgatactatcataatatctccaccgtatttttaaacgattgtataacataatatctccaccgtatttttttgtataatttctaggtttgtcaccttccaccgaattatttttattttgtatttccaaatgtattaaaatcttaataaattcaatttgggttgatatgttcgacttgaaatagatactaattagtagtaaaataaaggttggttgaataaagaaactgccaacggaaacggaaatgactagtggatttttttgttaaaattttaactagtaatcgagaataagtaattaggagtgaaggaatgttctttgttgataacgttcttaaataaggccctgttcgtttgatcagtttgatggatcatctggatggagatgagttttgatgtttgtttggtgccaaaaacgggagtttgaaaatttagcctaaattttcaaattcatttggctgaactaaattggatcatttggatggaaatgattcagtcaaaaataacaaatgacaaaaatatcctaattatttcaattgattatttagatgtatttttagatacaaaaacaaatagactaaatcttcttttacaattattttttaaaaaatagaaaaattaattttttctctaaaactgcaaaatcaaaattttccgctaaaaccgtaaaattacatttttccgccaaaaccacaaaaatcatatttcccgcaaaaaccgtaaaatcgtgttttcccgccaaaaccgcaaaatcacgttttcccgccaaaaacgtaaaattttattttccgccaaaactacaaaattctattttcccgtcaaaaccgtaaaatcatgttttctcccaaaaccgcaaaattacgttttcccgtcaaaacctcaaattcacatttttccgtcaaaaccgcaaaaatcacgttttcccgctaaaaacgtaaaattttgttttccgccaaaaccataaaatcgagttttcttgtcaaaaccgtaaaattacgttttcccgctaaaaccgtaaaataaatttataaatgtaaaaaattattatttaaaatttatttacttttaaatatattttagattaagaattaaaattaatatgtttacaagtaataataaaaatataattagatgaaagtatgggtattttaggtatttggattattacaaatcatttggatggagagtagagataagcaaacgaataacatctcattcggatgatccaatcaaatgaaccgactaaaaataaaataaacaagagtcggatgaatcatccagatggacatgttgaatggatcagttggatggatctgtcaaatggaaatgactattggaattttttgttaaaattttaactagtaatcgagaataagtaattaggagtgaaggaatgttctttgttgataacgttcttaaataacttgtgaaggaagaaagacacataaacgtatttggttggcttatggaaacaagtaaagaagtcacgaaagaactaatcaaagaaagcaaatgccgtgtccgtctcatattcaaaaaataaattaaaataaaagagtgcatgtgattgcaatctattcgtattatcatgtagatctacgatagtatttttgtttttccattacaaaatttgatattagcgattccatgttttgggtgttagaattaataatagtattagtatgataacatctcaataaatgtaactagactgcacatatattgatgggatcagtttaataaagtttaacatatctatatttttttcaagaatttttgtaaaatgaaatatatctttcatatttaatttttccaaattttactcgattttctttctaagaacaaaagtttatgatttgatttgtatgtatttttagaaaacgcgtttataaattcacaattatggaatctctatagtattgttgggtccatataattcattccacgggccaaaaagacataagttacgcaaggggttaggattaggtacatgaaggtgtatgttaagatccgtgagacacagataattgacgtgacgatgtcgctttctctgccacagaaaaacatgaatatcatatcagtcaatacctccaaatttttgtttttttaatttttttcaaaaaacctgaaaatcaaagggggaaaaaaatccctcaaaattcgagtattgaagaacgacgacgacgatcttctgggtgactcaaaggtttcagctcaattcagatgattttttgggttgaagatatttgaaacgattcgccttcttttggaatttggaattttaaaggatttcgattttgatgtgaattttgcacatgatcagggactgataattattgggttttgcttgattttgattgttcatgaacaaaaattctggaaaagatctagcttgttcataaacaatttttttagaaaacagaacaaagttttctccgatcgctcctaaaattgtatatatacttttctgattcgtgttaatctggtgataattgaattagatcgtcataaaacacgtcttcttgttgacactgattttagcgtttaatttttattttttttcagtgagaggttaagctcaaggtctctggattgcttttgaatttgcatgctgttggaggatgatagaccatcggtatgtgcttgagttttctcgaggaaggatgaaccgatacgagccgtcttattgattaattatatatatgtagtggagtgcctgaaggagatatatatatatatagtagcagttggatattagggttttcatttgttaggtgtgagtttcttttgttgttgttaatttggattctagacttccatgaccatcgtagcatgatggttgggaaggttttagatgggtacaagagatagtaataataggacattctctgagattgtgggtctgattaaatcctggctcccctggcgatccgagccagctactgtgtccagggatttttggatgcctgatcagagctgtcgtgtatgttacgagtgtgattgtcagtttaccctcatcaatcgtaggcaccattgtcgtcattgtgggagagttttctgtggcaagtgtactgccaactctattccttttgctcccagcgacttgagaactcctcgtgaagactgggagaggatacgtgtttgcaattattgtttcaggcagtgggagcaaggtgatggtggcccacacgtctcaaatatcacggaacttagtacttcaccttcagagacaagtcttcttagctctaagaccagtacaacagccaatagtagtagcttcgctcttggctccatgccgggactgattggtcttaatcaaagggttcatcatggttctgatgtcagcttgcacggagtatcttcaatggagacaagcgtaaccaagcaaggcaaagaaacttcaaggaggagcagcttcattgccacagacgtggaagatccatctcgctttgctttaaataggtactcctttcctctgagttctctttggtctcataggtatgaatgaagctaattagatcttcaaacgagcttaggtcctgtggcctttgaccacgtttcttatgcaattccaaggtagagatcggtcaaaatatttcttcggtatgtgaagtatggaacgggaccttttatttttgagtgagaactaggaaatcagagtactttaacttcactagtgtttgggtaacttatttatcttttcttttcagcatcaggagtgatgatgagtacgacgagtatggtgcataccagactgatattgagacgagtcattctcctcgagctaatgaatattatggtccaatggaatacaatggaatgggcattgatgatgtcccctgtaagcatcttggtggagaaaccgcggaccagaaaagtttaagcggctctccactcattcatcagtgccttgaatctctgattcgggaaggatcagagcagttccagaagaaaagtgagcatgatggtcgtgacgaatgtgaagcttcttctccagcagatatttcagatgatcaagtggtagaacctgtggatttcgagaacaatggacttttgtgggttccacctgagccagaaaatgaagaagacgagagagaaagtgctttgtttgatgaggaagataacgagggagatgcctcaggtgagtggggatacttacgaccttccactagctttggaagtggagagtaccgtggcgaggatcgaacaactgaagagcacaagaaggctatgaagaatgtggttgatgggcactttagggctttgcttgcacaactgttgcaagttgagaacatctctgtgagcgatgaagagggcaaagagagctggttagagattatcacctctctttcttgggaggctgctaacttattgaagcctgatatgagcaaaagtggaggaatggatcctggtggctatgtcaaagtaaagtgcctagcttctggattccgacatgataggtaatagaagtaaaaacatttaaccttaaaatactgctgtcgagcctgtagtgcttcaattcacgcactgtgtattttcatcatgtcatctggattcttgtgaagtttcattctttattaatccatctcgtgtgttattttacagcatggtggtaaagggagttgtttgcaagaaaaatgtggttaataggagaatgagtacgaagattgagaaagctcgactattgattctaggcggtggacttgagtatcaaagggtctcaaaccagttatcaagttttgatactttgttgcaacaggtgaaatttgcctgccgcttacatatttctttttcttcctgttggtggttagaaatggattttgttatctatgtctaaacccttctacctcttaaacatgttttggttttcaggaaaaggatcatctaaagatggctgttgctaagattcacgctgaacgtccaaatattctactagtcgaaaaatcagtttctcgatttgcgcaagagtatcttctagccaaagacatatctcttgttctaaacatcaagaggccacttttagaccgcattgctcgctgcactggtgctcaaataattccttcagtagaccacctctcctctcaaaagctgggttactgtgagaattttcgggtggataggtatcctgaagaacatggttcaactggtcaagttggaaagaaagtggtgaagacgttgatgtattttgagcattgtccaaagccattaggctttactgtaagcattcccaactattagaatttaatacacagaccagattttatattattgcctcatgatattacctcttgctttttatgtcccttcttcttcagattttgctgaggggtgcaaatgaagatgagttgaaaaaagtgaagcatgtggtccagtatggagtttttgcagcttatcatttggcactcgaaacatcgtttcttgctgatgagggagcctcaccagaacttcctttgaattccccgattacggtggcacttccagataaatctacgagcattgaacgttcaatatctactgtgccaggtttcacggtctcaacatatgaaaaatctccgacaatgctatcttgtgctgaaccacaacgagcaaacagtgttccagtatcagagttgctctctaccactaccaatctatccatccagaaggatatccctcctataccctatggttcaggctggcaggctagagaaataaacccgagtttcgtcttttcacgccataatatttcattgaatttgcctgaccgtgtgatagagagcagaaactcagatttgtctggaagatctgtaccggtggacacaccagctgacaaaagcaatccaattgttgtggcagatgagacaacgaacaattccttacatttatcagggcaaggctttgtgcgaaagagttctcaaattggtacgagcattatggtcgaaaaccaagacaatggttcagagcttacaatcgcccaacaacaaaacaatgagaaaccaaaggaaacacaatcccaaaaagaagaatttcctccgtcaccctctgaccaccagagcattttggtttctctatcatcccgatcagtgtggaaaggaactgtgtgtgaaaggtctcatctctttcggataaaatactatggtagttttgataaacccttgggacggttcttgagagatcatttgttcgatcaggtgagttattttcttttttgttttgttttataagacatctatattacagcttcaataataattagaaacctaaatgcatgctcaaaactttttcagagttacaggtgccggtcatgtgagatgccatcagaagctcatgttcactgttacactcatcgacaaggcagccttacgatatctgtcaagaaacttcaagattatctcttacctggtgaaaaggaggggaagatctggatgtggcatagatgcctgagatgcccgcgacttaacggcttccctccagcgactctacgagtggttatgtctgatgctgcatggggattatcgtttgggaagtttctggagctcagtttctcaaatcacgcagctgctagtagagtagcttgttgtggccattctctgcatagagattgtcttcgcttctatgggtacttttttcttgcgtccactcctccttgggccaaatatgattaattgttaaaaattgtcttgtttaaaagtctgttttttcctaacaagttgtgcccgtgcagatttgggaacatggttgcttgcttccggtacgctactatagatgttcattcggtctaccttccaccatcaattcttagtttcaactacgagaatcaggattggatacagagagagacagacgaggtgaaatacatgtgattctcttggatggagttttgaaagtgaatactttgactgagttctccctcttttttattaaacaggtgatagagagagcagagcttctgttttctgaagtattaaatgctattagtcaaattgcagagaaaggtttcaggcgacgaattggtgaactcgaagaagtgctgcaaaaagagaaagcggaatttgaggtgaaaatttgttatatcatgaaagagtatctaaaactcagcgatgcttaattggttttatgccttataacaaatggaagataatagccaaaataagacaaggttcgtttttgtaactattcttacatttcttccaggagaatatgcaaaagattttgcacagggaggtgaacgaaggccaacctctcgtggacattcttgagctatatcggattcacagacaacttctttttcagtcatacatgtgggatcaccgcttaattaatgcatctactttacataagcttgagaatagtgatgacacaaagagagaagagaacgagaaacctcccttggctaagagccagacgctcccggagatgaatgctgggaccaactctcttcttactggctctgaggttaatctgaatcctgatggtgattctactggtgacactggctccttaaataatgttcagaaagaagcggatacgaattcagatttgtatcaggaaaaggatgatgggggagaagtttctcccagcaagaccttaccagatacatcttatcctctggaaaataaagtcgatgttcgtagaacacagtctgatggccagatagttatgaaaaatctatcagccactcttgatgcagcatggataggtgaacgtcaaacatctgtggagattccaaccaacaataaggtctcgcttcctccttccaccatgtcaaactcttcaacttttcctccaatctcagaggggctaatgcctatagatctcccagaacagcaaaatgagttcaaggtggcctatcctgtttccccagcattaccgagtaagaattatgagaattcagaagactctgtcagctggctaagtgtgccattcctcaacttctaccgttccattaacaagaatttcctgcttagctctcagaagcttgatacatttggcgagcatagccctatctatatttcatcttttagagaggcagagcttcaaggtggaccaaggctacttctgcccgtaggcttaaatgatattgttgttccggtttatgatgatgaacctactagtatgatcgcatatgccttaatgtcaccagaatatcaacgccaaacttctgctgaaggggaatctctagtttcatatccttctgaactcaatatccctcgcccagttgatgataccatttttgaccctagcagaagcaatggttcagtcgacgagagcatactttcaatatcctcatctcgcagtacctcacttctggacccactatcatatacaaaagctttacatgctcgagtctcatatggagaggacggtacgcttggaaaagtgaagtacactgttacttgttactatgcaaagcggtttgaggcgctacggggtatatgtctcccttcggaacttgagtatatacggtctcttagccggtgtaaaaaatggggagctcaaggtggcaagagcaatgtcttctttgctaaaaccctggacgatcgatttatcatcaagcaagtcaccaagacagagttggaatcattcatcaaatttgcacctgcttactttaaatacttgtctgagtctatcagcacgaaaagcccaacctgcctggcaaaaatcttgggaatctatcaggtacgtaactgctaagatgagagatttcccgttcaggttagattcactcttgataaaaatatgtcttgtgttaataggtcgcaacaaagcaacttaagagcgggaaagaaacaaagatggatgttctgattatggagaatcttctgtttggaagaactgtgaaacggctttatgaccttaaaggatcttcgcgggcgcgctacaatcctgactctagtgggagcaacaaagtcttgttggatcaaaacttgattgaagcaatgccaacttctcccattttcgtcggtaacaaagcaaaacgattgttggaaagagctgtctggaacgatactgcttttcttgcagtgagttttattcttctgcaaaccatttactcttcactactctttgaaaaggtttattagcaataactatatttttcgtgtttgcagttgggtgatgtgatggattattcattgctagtaggcgtggatgaagaaaagaacgagctagttctcgggattatcgacttcttgaggcagtacacatgggacaagcatctagagtcttgggtgaaatttacaggaatcttaggaggaccaaagaatgaagcaccaacagtaatctctccaaagcaatataagagaagattcagaaaagcaatgacaacttacttcctcatggtccctgatcaatggtctccgcctaatgttgttgcaaataactccaagtctgatcaacctgaagaaacctctcaagccggtacacaagcagagtgatacaagaatcattataatgtaagtttattttttggtcttgtatagatttttggcatttgggaacacattattattcgttatttctttctttattggaaggttgggtttctgtcagatatcgattttgtttgcgtcttttagattttgggtcgttaaagtagagacttaggagattgtctgaaaaattcctcagaaagatagagagacatttctcttgtgtatagcttttgctttaatgtgacatgatttatgaaagattcttttgtttatatgttggatcctcgtacccttttttttggtgaaagattgaaatcaaaatctggacgtaagtttcttacaaaagagaaacaagaaagaagcaaatcgctgcttctttcatagccttttttctgtacattcttattcaagaggcctttttgaagagagaaccagattttgatgtttcgatgaagaaaaaagaaaggggatttagaggaagtcaaagctgctccatttgatcatcatgaactcttgttctgaagcaattatcggtctttgaccatccttgtttgaatcgctcagctcctgataacttctttgcagaagatcaagaatctccacctctctgtttttgataccaaatccatttataaaacaaactttgaaacaagatcgatctgattaagaatttaggttaggattaggaatatatcataccttgagtaagaagctaccattggactctgtgtgggacaacgaggaccttcatcgtatccttcacatataacctctccattatcatctgtgtaacagatgatcccttgtatcggatcttcaaaaacctgttccaagaaaaacaatttcaacattcatatttttaccaaatggttgtgtctgaattttcaagaaaattatgatccactctaaggagaaacaaaaagagagagatgatcttacaatgttcttggtggagtatctgatcggctgaggctgtgaaactgtggctttcttgactttaacatgaacttgactctgttgaagcatcaaagtctttgctcttactgtctttggaacaaaacatggtgttttaagaggaagataaagtttagttgaatatgccatagcttttgtgtttctttctttcttcaagaagaaactttgatctcttctttttggacaactcgtttggtttatagttctcagagaagaaaattataaattccgatgattgattgaatctgagtttaattaagatttttttttaagtcaattatatatagacgcaaggtgaagataaaataatagccaataagagtggcaatctcattaacaagtttggttgtctttttcgtggggtttggttagttcttctaatggtttcgtttttcttcttacgtttgatttttgatgaacgtcaatgtgaaatcgttgaatatatctacacatatacatgtgtatgtctagtcaggtgtatttttattacataaatttttataaaactattattgggatttcttactccgttaatgtttaaaaaatattactaagaaaactacttagattctgtaacacttatatttgagaaacaaaatgagttttataacccgattctttgacaaaataatatgagacaaaaacaaataattccccaactgaaatagtttatagacttaagacattttaccttccttctgacctaaaaaggtaaaaaagacatttgaccttccatcgaaacaattaatctgtcattacattaatttcaaaaacttgcgtgctattagttgcacttgcattcaaccaattttttcgttatgttgagataatattaatattagagtaaaagaaaaactaaacatcgagcaaattagttgttacagtgcttatctgccgtccaatgacgaattaactcctacttaattaaaccgtggcacgtgtcgatatatcaagcgtcatgataagcttttaggagcatttttaattgcaaaatgacaataattggtgttatattattgctatgatttagacaagagactaattgtaggctaaacatggagacatcgtcgtacagtttctcgggaaaaaagctgtctcttcttaaccacaataaggtacgttcgagtcagaggctccgagcaatgatatttatttcgctggtttgattactaaagaaatgcaaaacaatactataataacaacgaatattcctccaccaaattaattaaactcttgcgaatctttattttgttttgttaaaagaataatacaacagatttatacaagtttctgagtcatcagcaactttggaatccttataatagtttatgaacatttttaaccaaaaatacatataaatggtggaaccatagattagaagggttggtcacaaaatgttggagcaaaacttccaaaatcgcttttaacaatttttaaaaagacttccaaaatccatttttttctgtcggttaaaccaaatttaaattataatttcgatagagaatgtttagatcgatcacccgagtcgatagtatataaattgtagtacattgaatgaaaaactataatcaaatattttgtggtctctgtttcaggaggttgggaggttaaatacgtcaccaaagtttttattaattttctagatcgtcgtccacttatatcatcgcggagtggtggcctaacttatcaatatcgtacgatctccaaatttaatataagcaagtttgattataaaatttgatacagaaattatttaacattatcttcatcatcacttattttataattaacaaatactagaaacatacgtctacgagttaaagtaatgggtttaggctaaaagatttggtcaagaagtatacagtagcctaattgaaggtccgtttaatggcgtatgcttctcatattagacttaagttaaggcccgtttgataagatatttaggcccattaacagcccaagtgttaatcaaagtctaacttgttactcaagagtgcttgtctacgggagctaaaaaggaactgggaagagtttgtttcttcgattcgtagatcaattctcagctggtaaagtttttttgcatccatacaagttcttagttacttgaatcgtttcctatttttttcattcgatctgtaatgtttttagggtttaataacttttgtgcagacattgaggtttatctcagatcgaaatcgagaagaagatgtttctcactaggtacaaaattgagcatttcttccttcgatttcttcagaatcgtgtatcaccgtttctgggaaaacttcgaatccaacgattatggtgcttgtattgatcaagtttttttttttttttttttttgttcttaaggactgagtatgacagaggagtcaatacattttctcctgaaggtcgtctctttcaggttgagtatgccattgaagctatcaaggtaatttatagattactctagctgctaatagcttctctagaatctagtaaagttgggatgtttctttgtttgcttaaacgaatttggttacttaatccattattgtgttagtgtgctttgttggggagtagacaatagattgggcatgccctttttgtatccattgatgggtttgttatggtttgattgcagcttggttctactgctattggtgtaaagacgaaagagggagttgttcttgcagtcgagaagcgtattacttcgcctttactggtatagtttctctccttgtatcttctccgtgtgactccactgttttattaacatttgttatgtttagcagtttccatctggttgatttgttagtatctaagaagttttctttgctttactatttccgtgcctttatgattttggtacacgcacattatgctacaaatttagtcttgaattggcatgagtgatagaatctgaaaggtaatattagtatgaatttgtaatacctttttgagtttaccctatgatggtaactactttctcagtctcttttttatcttttaagtaggagccgagtagtgttgagaagattatggaaattgatgaccatataggttgtgctatgagtggtctgattgctgacgcgcgaacacttgttgagcatgcacgagtagagacccaggtgagatctcagtttctgactttctgtttctcatggatttgtttttacatcaaaagttctttctgttaccaactggttttattatgttgagcagaaccacaggttctcgtatggtgagccaatgactgtagaatctacaacacaagctttgtgtgatcttgctttacggtttggtgaaggagaggaagagtcaatggtagtaatcgctctattacctttatagcataggaagagtcaatggtagtaatcgctctattacctttatagcataggcaatgtttagtggatttctcttctttctgcttggaaattatgatcaattatcagagataaacccttagattggggttttaaatttttgttgtgaattaatagatataactctttaggaaccaccactataacaatccctaatcttccataatgttttagcaaatattctttggttctttactgtctcctttttatatgaatgtacttatgctcggtctcacaaactttttgcagtctcgtccatttggagtatcccttctcattgctgggcatgatgaaaatggaccgagcctgtaagttgttattcatttcgcttatatcattttccaactgtgtagatgatctcaaattggtaaacaacaaatgttaaacaactcaatcctgtataggtactacacagatccatcgggaacattctggcaatgcaatgcaaaggcaattgggtctggctcagaaggagctgatagttctctccaagagcaattcaacaaggtactaataacgtgattgtttcactgtcccaagcgcattacagaatctatttcttttgaagtttccttgaactccaatttcacaactcttacaggatataactcttcaagaagctgaaacaatagctgtatctatcctaaagcaagtaatggaagaaaaggtattcaattgattacaagtttgtttattaaaaatcccattaaatccctctccggtttagccctttttgatactctctacttttctggtttaggtgactccaaacaatgtcgacattgccaaagtcgcaccagcttatcacctctacactcctcaggaggttgaagccgtcatcagtcgtctatgaagaaataaaccgccattctcttcctgttatcttaccttgtctgttcggtaatttatcaggcttctgtctgcttccggttctctaaaccaaaaattagtttcgtttaatcagataatggattttatcgagttgagttttattgagctttctatctacatttttttgtcgttttcaacaagaagttaaaactaataaatatctgtccaaaagaaaaaatcagaacttgaaagttgaaatctattatgtacatatcatcattgtacgtcggaaaaaaaatctcaattataagataattatatatttattatctatataaccaccctcactgaatttaacccaaaccccattaagagaagcgctgatcgtgaaaacctatctttagctaaatctttaaaaaaataaaatatatttctttgaggttacaaaagaatatattgtattttttaaacatatctttagctaaatctatagaaaaaataataataattgaaaacttaagaaaacaaataataagtgattaagtttacagagggggcattcccataaccgcctttggaatccaattatcatcccctcggagaaaatacttaaccgtaaaccttgcagcctcatcatcagacgaaatgggcttatacccagcccatttaactctcttggatagatccgacccaggacctgaattcttgtactctctatagaatatagtacgtggaggcgggtcataagtcgaattccacgcaatccacccagcgggattcacgaacgacccaatcaccgattgcataataaccgtcttcgaaaacaatttccacggacggccaagatacgtcgtagcagttacatttccgttgggagagattgtgcattggtggatcgatattcccgtgttctgattggcctcttgtgtaccttcagcggtgattgtgttgaactgattcggaagcggctgacgcggacggatgctgcagccttggaagacgactgtgccagctccgaagatgaaatcaactgttccggtgacgtcacagttacgatagtattgtcgatttgagtgagtataaagagtatcttggtagccgtcgaatgaacatcgatagtagactgaccgatcggaatctgatcggaatgctaccgcttgatgcttctctggcccggcggtgtttatgattcccatgtccttcatcataaatcctttgccttcagttgctgcgcgtaacaagttaaaaagtgtttaaaatgaccatgttacttcaaaaaagcagagagtataaataagaaagatgagagaggtaccaaacgtggaggtattgaaagtacgaaccccgtcgaccatgttagtgctaccggaaataatggtcttatccctgccgtcgccgtagataaacacattccatttatcctttttcataaggacattctccacatacgtacctgctttcacgtatataacaaacatcgttttccccttcttcggaactctccaaaccgcttcattcaccgtcctcacatcgccggagccatccgccgccaccgtaacatgaggcgttaagttcttcgcttgaagtaaccgcctcactcctggtctaacccaatttggaaacgaattcgagttaagtagccgtctcccctgaaccgggatcctagacttgcttggttttttgagaacctgcgcgacgatggctaagctgttgcttgtgaactctgtggaattaaccatggcggatttaagcttctgtgggattggtgagttgtagttatcttcatcaagcgtgtcgccacacgtcccgatatctgttacggcggagctaagccacgttatgagatcgccgatcgttgacgaattcaaattcttcttcccgccactaattacttcatccaaggaggaaatagtatcgttaactgaatcaaccgcgaggtcgaacacatctgcgcaaacactaagcgccgatttgagtccctcatcattagtctcttccgcgagtttcttcggtaaaccaacgatggaattgagttcgtcgaatgtaacttgtaacgaaagcctgaataaaaccttcggatctgtcgtcgttttggataatggaagcttcgagatgcttgagatacaagaagcagggtaattagttacattacacacagttctgaggactgaactcggtgttggatgaggtgactttcgaagccgcggggactgaactccgtgtctttcgtgtattggaaacttcgcgatgatcgctaagctgttgcttgtgaactttctggaattgaccatggcggatttaagctttagtgagattggtgaattcgcgtactctgttttgttctggctgagttcatcaagtgcgtcgagacacgtgtcgtgatctgttacggcggcgctaagccaagtttgaatctcgtcgatggtcgacgacttcaaaatcttcttcccgtcaccaacttcttccatggtggaaatagtatcgttgactatatcaatcgcgtcgttgaacacatctccacaaacactaagagacgatttgagtctctcatcgtccgtctcttcggcgagcttcttcggtaaaccggcgatcgaattgagttcgttgatgacaacttgtaacgaaagcctgaataaagcctccggatccgtcgtgttagacgatggaagctttgagatgcttgagacacaagaagcagggtaacgagttacgctgcatacatttctgagtgaagcggcgggagtcaacttggggactgaaattggtgttgcatgtggtgatgagtttagaagccgtctcccgtgaatcgggatcccaaaatcgcttattgtagagagaatcttcgcaacgatcgctaagctgttacttgtgaactcggtcgagttaaccatgccagatttaagcttcagtgggattgctgaattcgtgtggctgatttcatcaagcgcgtcgagacacgttccgtggtatgtcacagcggcgctgagccaagtaaggagatcgtcaatggtcgcagcattcaaaatcttcttcccgtcaacaacttccatggcggaaacagtttcgttaacacgatcaatagcgaggtctaacagatgttcgcaaacactaagcgccgatttgagtccctcatcgtccgtctcttcagcgagcttcttcggtaactcaacgattgagttgagttcgtcaatgacaacttgtaaagaaagcctgaatataacctccggatccgtcgtgttggacaatggaagcttcgagatgcttgagaagcaagaaacagggtaattagttacgctacacacagttttgagtgaagcggcgggagtcaactcggggactgaactcggtgttggatgtggtgaattgcctttccggctgtgaattgcgatggtgacggtggagctgatgataatcgccaccagaactgccacggaaatgcctatttgatacaaacgctttctcgtctttctcttcaacgccaaatcttgagtttcgtcaactttgccatagcctttgttgattgacttgacagtatccatcaaaaaccctaactcggtttctagggtttatatttgtgtgtgtgtgtcttagaacaagaatgaagaattggttattgatgtcagtgtgttgatagttttatataagtagtggaatgtgaatatttaaattaacgtctcgcgtttattctctggtgcttcttaaggaagtgtgtgtagatgatcgattaaaattaggagtgttgacgatacatcatgttctgtcactagttaattcatgatcatcctcttacgtaatttctgtcactaattaatttatatcaatcttcattaagaagtttccgtttctgtattcatcagattgtaattgaatattgcatgattaatgcagaatattcgacctggtttaataaaaacatgaatttgggtgctacttgtgattaataatacaatactagtttcaagttttaagtccaaatgtttgtctaatttaaagtaatattttcacttctaggcacatatgtacttactagagagtatagaaaacatgcacgtcttacttgataacacatgcaaatgggcaaatcattccagtgaagctaataagcagtgtagaaaaagtcaatgcagagcacattggtttgtattgtcaacgttgcacattggattagaaattacactttttaaaataatagtttgagcaatatactgttatagaaagaaaaaaaacttactgattaatagtgtgcttaattaattgtttagaattatttgaatttgaatgcgggaaaatgtcctcaaaaatatattgataaatttttatcttattgaatattttaacatgattacgattgaacattttatcatgatttttatttgaagatatttttattcatagtctattttatggggtttttgttatggaaactttggatgtatagaatcacgaatttcttgatataattgatgagatattgtagtgatctaatttgggatagattttagtgatatgatatacttactgtgcattagttttgggcttttaggataagttccttgcagaatactaaggaagtctggttgtcaaagttctagaaatgtcgtttatggaaatatcatagttaggaatatttggtttgaaagaggttaattacttattttgatccattttctctcattggaagattgactcttttttttttgtgcaatggaagaatgactttatttaggggaaaataccaggaaaaaaaaagaatatccaggtaacaaaaaaatgcaagatcaacctcaatttttttttaaactacaaaaagaacttaggtcatatttaattttatttttattttttcatatgtaaatttaatacccgttaaaatgggttagcaagaatgtttatcaactgaagattacggtctaaaagaagcccatgagacgaaccaacaaacgtgtcaagaatgtctccctccggtcagattgaaccatcttgggctaagttaacctggcgctaacatgcccgatagccgataggccaatgctcattatagtgattttgacgttaaacacgttacaagtacaaaggaaagttcgagtcttcgagatattaatttgagtaatgttaatacgttatgaatcttatgatatagtcgaagtcaactttggccagctaaatctaaccaaggtcaaagacaagtttttttgtacgctttcgaattgtgaattcatcgtaaaattgcgcaattatcattattaggcattcatgtggtttatatatttccaagtttctctttgctttacaccatagtaacaaacttaaaaaagaaaaaaagaaaaaaatcaaccggtcgatgattcaaggttttttatttttctaaaagcactccgaaacggttaccgggagcatcgtcggaattatcctaaattccctttctttcagccttcttaccgtaactgtcctcattgcttattctctttctagatcggattacctaacaagttttggactacaatgcatgcatatcaaaatagtttgtcttttttttttttttgatatatggacataagtttcgttgacaacaaaaagagagagaagttacaagaaaatacatgtttttggtttgttttttattatgacatccatcatgcatcatcatcaaataggcaacatccctcctttctcaaatccatattctcaaggcgcaaaaacccgcattatttcatctcgtttctaatactacgatgatctagagaaagtacacaacccaaacaaaacaaagaggacaacacgatttgcttcatacaatattaatcaataatttttgtagccaacaatacgtaggaacacattacacaacaatctctcaaagaccgagcgagaaggggaaaccggtcgacgataaccagcctccaccaccaataaactgaccagccgtatatttttgagcttcagcagcagccgtaattaccttaaagcccctccacttcactctatttgcagttccagcccctgctcctgtgttcgaatactctctgtaagtcagagtgttcaacgcaaaagtcccggtccactcggaccacccttcgggtcggatcacgtcggagatagccgactgcattatcaccgtttgtgaatattccttccatggccgacccaagtacgtcggaaaactacctttcaccgactgtaaatccgacgtggcaccgatcctacatttctggataacgatccctgtgttctggttaggatccgttcttccctgagctgtgaccatgtttttctgaccggaattagggcggcgagcgtggatgtcacagtcttggagcacgacggcggcgtttccgaagatgaagtcaacggttccggcgatgagacatttgacgaagaattgacggttagagtggacgtatagagtgtcttgataagctaacatgtcgcaattgtagaaggcggagaaatcagaacccacacggagagccaccgcttggtgcttcgacggacccgccgtgttttggaaagtgatgtcacgagctaagaatctctcgccgacagcagctgggccccacaaaaagaaacaacggttaattaacggcatcattagctaaaagactaattaaaacaagacttcttttgcaagaatatcacctttacttttacgaaaattttaaaactaaaatgttaatattttggtgttataaaggggaaaaagaaatgcgaattataccgaagttgtaaatgaaatgataaaaaacatatttctattttttgttcacatgtaataaatttaattaatggacaaaattttgatagaaaagttaacaacaatgaaacaaacaaaataagaaagaaaaaaggtactccatccctaaaacgaacggctctcttcacgagtggatgagccataaaaccaatccacataacgtgactcggaaaagcatatgaataaagccaagaaaataatggatagagacactcacatgactcagatcttaactaagttttttgttcaatttggtaaattcaaatttacatttaattatatctcgttactactaggctacatgtgcgcgaatatatgttgtagtgggggtactaagacaagaatctacatgtgtatatttaatgtgcatgaaaagagtaaagatttttccaccaaataaaggaccacaatcgtgcaaaattgcttttatcttttgtcaaaaagttaagtaattaaaatgcttaccaacggtggcggagtggaaagtggtgctaccgtctacaacgtttcgacttccggtgataatagttctcgtccgaccatctcccataaacattatattctttttcttcttagcaacctccacattctctctgtaaactccggcttttatatgtatcacatacctcttattactattttcaggggccgcggcaaccgcagcagccacagttttaaatgtaccgctaccgtcagctgccacggtggcgtcagctttcacacctgaaccctgaagaagcctcctatctccagcggataaccaagttggccatccctccgagtctagttctccggctccggcgatatctacagccaccgtagtttcctgattctcctccttgagcttacggttgtttgaggttattttagctttttgctcgaagttggctatgtcagtatcagtcatgttcttgatcattgctagagcgttgctgcacatgtgctctacgtgtatctgcatttaatcatttcgttataaagctatattttcaaaaaattgtgacaccaacaagttgatatataattacaagtatatactaataacaaaatagatagctactattcgtatgtatggaccagcactagctaacaatatctcaatgtaagaataaacaagctctaaaaaattgtcactaagatgtgatgtgatgtaagaaagttttttttttctttttttgataattgtgatgtgatgtatgaaatatctagttttctagtaactctatataaattttcctactataaacattatcaaaacaagtgatttaattatgttgaacattcatctattccataaaatttaatgaacgaacataaacgtaaaaacaaatgcaatttgtatacctttgcgatatttaatttttgattttcaaaggttctttacgtacctgccccttcaacaaggctttacgaacttgcttatcggcgtcgtcatgagagaagccgtcgagacaagtctcctggttggtaatggcggagctaattagtgttttgagatctccggcgtgttcccggagagtttttttggttggatacaaatggagatcttccaccgtttcatggagctcgtccagcgtctcatcaatagtctccaaacagtcatgaagcgccgtcttctcgcgcggcgtcagtcctttcctcttcttgatcagcttcttcacggtgaagtaattgtgctccacggcggttattgttaggttcaccgatgcctcgatgacatctttttgcgacgttagctcgacgccgccggcagttaccacggcagagatacagagctcagggtaacgcgtggagctgcatgaggatcttagcacggcgtgagacgacggggatagagttcgtttttcgttggcttttgaagctccggcagagattccggcgacggcggctacgaagagcaaagctacggcggcggatagcaaaacaagtttcttgtttttcttgaaattatctttagaaaaaatttctttcattgatggtgccattgttcgacactagtgagtgatgatgaatgtactcgtgaagagtgggtgtttatataataattatgttgatgaaattaaaatcaaacacgatactatttatttaaaatggctttttctggttttacttttcttgattctattatttgagtggaattttcagaaaaacaaaaaacgttccactgggttatataagctgcctcgctcgtaaagataagatcttcgttttatgttttaatcagaatattattcatattatacggaaattgacaggagtctattgtcgtttttgtatttttgtaattttgtatatgtaattacctaaatattcgttgctttgccagtgatgaactcaccagtctcgtccacgtttatcctcatacacattaggaaactaggattatattatcattaaccgacaataatataacctttttctttactaaaaagcatattcttcttttctgattttagtattcgtttcgtcattcaaccaatttgaaaatctcgagtgttactaaaactattctttggattcaattgatgtgtaagtgtaactggaccgtcgttatcagaaacacttgttattttcagttttgatttgataacatttgtatctttaaagagttcaataatagaattagtactatcttacttagaagtataaatctttttacacacagtacttagatctttcttttaaaacattaggtacagagttgattacatacaagtatagaatgctgatttatgtatcttaacaacaatagttgagaaaactgccattatactaaaactatggaggtaaaggactatttctacctataaattgttaatgatgggtcttgaaacgtctaatcatacataaaaggaattaattaacgttgctataaatgttatggcagaacattatagtatacaggtataattaaagcaaagcaaaagtgtcacatagcgattatgtaaacaatcagatattaggggcaccgaaattattgatgaaattataaatataaagtatttaggccgatggctgcaagcctgtcacgggtccatctaccattttttttttggaataaagctattattccatcaatttgatgaaaataaaatttaaatacaaagtattgttgctataacgcagactctagctctcttttaaaagatatgaatgatataaactaaactgttttaatctgtttgagtatctgattgtttattaaacttggaaaaaaattattctctcttatgatgacatctctaaaaattatttttctgatttcaataaacatgtttatatctgatctctggtaggtttagtaagattataaacatagtctcagtggatgtcatatcaaacattttttcccccatttcatcagatcatattctctccaacatagtttagttaaatgtcatctataaagaaatgtttatttcagtgtcggtagtttaattgaccaaatctagaaaatgaaataaaagagattgtatcctaaatccaagtatcggatacaagtacattattgaattatagccatataggataaaatgctacaaatagttatgaatgaagtttgttccctcgtttagaaaagcatacagtaaactcgtaatcatcacatgctttctttcattttttttttcttctttttttggcgatcttttctgtgtttttttttctaatatatcaaaagttgatgttacaatcatgtgaataatttgattccttctttatcattaatctttcattatctagagtagctaatttaaggcggggaacttattttacggaaaaagtgataaattgtgtaacgggtatattaaacataacaacttgcataatctctttttgttgacagcaacaacttgcgtaatcctttctatcaacaagttgcaaatacagggcatccaatgcagtaatcgagagactgatgtccaaaaaaaagagagaggcaattttaaaaataaataataaatataaaaactaccataagtttataaataacaaaaatatcatatttggtatgaacatttacttttaggttaattacagactacttaaaatttcaagacattttttgcaataattaaataacccctttgatgtatgttgtatcaaattgtttagaatttaaaatattagtagtgaacaaaatttatattctcacaactaattttttgaagatacctatttccacactacttttatgaaaaattgtctgttgtaataaaacctctgccaattattctttaaaaaggtcactttgtttggttgatagatttgtttgtcttcacgctttgaacgtgctgctgcacatacacagtttatctatttaaattgtgtcagtagagagcgttgggaaatgtaattgtttctaaaaaaaagttactactacaagatttatacatttattaaaagaaaaacattcatcgcgacattcacagtatcagtcgttcctagtatctttcttgcaagttgagatatactatggtaccatagtatattagtgtatatcataagttttgtaccaaaaaaataatttatttatcactttttagtgatgtcacggtagcttaatacatggacagtatattatcatataatgggcccataatgcctagcatgggcctgattttatatctctttcgccggaatgtctatcaccaccgccgttaattctggttgaccttcgtttgcttcgccgcagccaccatcttcaataatcgccgtgtctgtgttcgtcggaggatctgtcgaaaactcatgatgttcggatgtttggtcgtggttttggttaaaactcttgtcgcggccgccaagttctggtctcgttcttgactgcttcaaacaaactctctttctacatataggacaagtggagtttgattgcagccaggagtctatacattcaacgtgaaaccagtgatcacagctcggcaaaaccctagctttgtctccatcggctagctccgagagacaaacgacgcattcgaggacgtatttgaagtctttggtattgaagtctacgatagggatcgatcgtagaacgtaaggctttataccgacacgttccttgatggtgatgctgacatgaccatcgttgttgttgtcatgatcatgatcatcatcatgagtattataacatttaatgatgcaactcactaccacggccgaaatcccaaagaaaaagaaagcgaagacaatatttattccgagatgtattagaatgacagcatcggattctttcatcttctataaacttttttgaagaagatcaaactctcagtaagaaaccaaaaacacagttggtagagaaagctgttagctaattccaaacctaattaatttgtttaggtatttataataacgtaacaaaaatccatctcgataaaaattgggaataagaatttccatattttttttatagattcttttatatgtaactgagatatagttaacaatgacaagatttagagattacaatctgcttcctagtaataaggcacgacattgtgaaggcgttttcctctcttttttttttcctttttttttgtggcgtataataatttcataataaaaaaataaaataaaaaaatcataatttgatcagatgatagtaaattcagatttctgaacacgtgttgatttgtcagtgattaaagattgtaaagctgacgaacttttctcgatccacagcttctgttttgctttgattattttgtttcttcatcattattttaatctttagtttgatgtattgacaaaattaatcacttacggtgtagtacactgaaattttggttttgataaatgtttgtatatgatgatccacaccaaggctagaatagaagactaattatttacggtataattaaaccggatatttaggatttctgcacttctaattttcggcagaaatatctgcaatagaaagatattcaagatcatagaaagatctatttttcatatatatgtaataaggcatgcataagatagatatgcaatagaaagattgtcgataaaatccttaacttcttagaatcttactccgcgaatctaaatgtctactataagtctataaccactgttaaatctggttgaacttcgtctgcttcagtggaactaacgttctcgataacttctgaatatatactcgagtcgtaactatgagtcaagctcgagtcatctacaaattttggtctcgttccttcaaaacttcaacttcgattctgcagattggacaagtactggaattcgattgaagccacgtgttgatacaataagcgtgaaactaatgattacaactaggcaaacccctattgttgtctccgtcgacgagttctgagagacaaacgacgcatatgacgccgtctttgatatctttagggatgaagtttacgacggatattgataggaaaacgttctttctattaatgtgtcctcatttaatgcatcgcttcggctatgagatttctactctccaacaacgatgcagcaagtacaagtactctcgcagccttcttactgaataatacctctttttagattcttctgctactcacttgttgcaaatcgagtaatacctcaacagtcaccagtagtctttacatgagcagattccgtcgacgaaatggtggaatcgttttgtgtctctgaggactatgactctcctagttacttgtgacacaatcttcatccatgaatgacagtctgcacatactctgagattcttggtaatcctaattggaaccccttcacctgtgtggattagggagtaggttgtcgcgagtctctcgctgtgtccacaaacccaatttgctttggtttcttcatcaacatcatgaagcaccacactcgtattaggcgaataaccggatttttcaattgcttcttgtagttctgtccatactttcttatactcatcagaattacgaaactcataaccacctcctgcaacaaagatttgaatcttgtctttaacctgtacccaactgcaaccagcttcctttttgacccctctttgtttcatcatctctcgaatcttatccacattgtcccacatctttgcatcagcatatatgttagaaaccataacgtagttccctggattatgaggttcaagaacaaacaactcttttgctgcaatctctcccactgaaacattcccatgaagcctgcaagagttgagcagtgatccccaaatggacgcacttggcttaaatggcattgtttctatcaccttcactgcttctttgatcttaccagctcgccccaagatgtcaaccaaacaagcataatgctccaaagccggtgaaactctgaactccgttttcatgcgttcaaacaaacttagaccatattccgtaagccctgtatcgctacacccagataacaaagcaacaaaggtaatcccatctggtgcaacgcctgactctatcatccattcaaacagatttatcacttcttcaatatttccgttgattgcataacagtttagcattatgttccatgaagccaaatccttagttaacatcacatcaaagactctccgagaatactcaacctctccacatttcccatacatatccatcaatgaattaagcaatggaacatcaggtttctctttcgatttcagaatctgtgcatgaatctctttcccggtgagaagagcagcgacacgtgaacaagcgggtaatattgtcgtcaacgtcgcccaactaaacccgatcatctcttcctgcatcttcctgaacagattaaacatctcatgaacccgaactttcttactgagtaccgaaattaaagaattccaagtaacaacatttctctcagacattccatcgaacaccttacgtgcatcatcaaataagccactttccatataaagcttcaagagcacattatacactacttggtcaaccttctcctttcgtttcacaatctgggcatggattcctctaccaacccgaagatctttcaaatccacgcacgctttcaacgccacggatatcgaaaaattcccaggctcaatgaagctacacaacatatccacatagacgatcaaagcgtctcttggtgacccgtttctagaatacccaatcgccatagctgcccagactttctcagtaagtagactcgaatcagttacatcgtcaaagattttccgagcaagatccaatcggcgacaaaccgagaatagggtaatgagcttgcttagcaatttggggttgtgacggagactaggattgttgagaatcaaagaacatatttttataccatggtggagtgatttagcggagatacaagcatgaagaaggtctgtgtaagcttcgggagtggagagattggacggcgaggatgatgaattctctatcaatgtcacggcttcgtcgagtttggttgatttagagagacctaaaggctttgtgaagacaaattgtctccatgggatttgtaaaaatttagcatggttgatactctgagaccccagtggagtaagataagcttgtggagtgataacatctgcaagttttttgaatcatgaaaccaaatcaaccattgaaatgcacaagctttgagaaattaaacatctttgtaacatcatccagagtagaatttaaaccaattatccaaaaagttctgaatcagaatgtaaacgtacctaaagaaggcattggaaattcattcagctcaggagtgagagaaggcgaaaattcgaaactcgtctcttcgaaaagtacagtatctgtgactgtgattgtagagatgagacagagaagaagagggagatggataagccacacttaatgggcctttaatatttgggcttttaagtcccggtagatgtatatattatattttatttttcttttattcgagaccacaaaattagaaatactaagcgcagcaataagattcgaagaaacaaagattactattacacaatgcatattgaagagattaagcaggataaaaaaaaaccaagacccgtcatcaccggtcggaggatggtgcatcttcgccgttagatcctctttgagagccttcaacttttttctcaacctcttttcttttctgttctttgtcttcgctgcctttactaatcctctccctgatctcttcctcctacgcattagaataatttaatttcatgattactatgacaaacaaacaaaaatgagattatgaaacctcaactaattggttacattgtcaagtgctttagcgttgggaagtttcgaaccatgaacaccagctcggttcgaggcttttccaaccatcgtcctcacgccgtcgtaacgaccatcaaactttccgacggttcccacagatctccacaacttcccgatcatcattctaattatttctaccctcattcaagaaatcgtgtatattatatggttttgattcaaacgtgaggtgtgcatagtatagtcgatttatctaccacgtgtcataaaaagtgtccacgtgacaaatccacgtgtcactagcgtgtttccggtcgggtttctaatattacgtggatttacgctcttacggttccgtcgtcgccttgattgccggtgaaagtccaaagattgttgaaatttagaacgaccgttgctgtttaagctttagcaattcagcagcagatttacacaaattgtaatcgatcatattccactttattaacataaaatttattcaaacaaggaaaaaattacaaatggaataataccgtttttggatcggaactcacaaaagggaatggttttgttcatgttgtcggaatctaaaaaaaaagctacaaattgggaacaaattacaaagaaacatgggagtgtacaatgcgtgaagggttgttgttgttattctctcatcatcagttttatgaaaccgaaagaaaaaaaggattttgttttgttttgtctgtcctcggttgtcacttgttgtcgtcccatccagattccgagcagacaagagaaaaagggcaaatttttatgtttttttttgttggttctcatcaggtaaagaatttacatgtaatcattgacgccggagctaccggagccgactccaacagttctcttgctcatgttagctctctgcaccaatacaaccaatgcttgcaccacttcagacatgggtggtctaaactctggctccggctgtaacagattaaaagaacaatatacattcagatttcatttgttcagatcatcacattataatatatagatgattacctggacgcaaagggcgataacatctgcaaatcgggagagggatttaaccgggtatagccctttgagagctggatcaaccattttgcccaaagcatcaatgtcgtgaagctgaggtgttgcccatcttaccaatgattgttccgatcttgaccttgtgctgtcacacacaacaatcaccaggacttacttcaattctgaacacatttgcatcactcttaagtttttttaggaaggcgagggatatggattgtaaaagtacctgtcgaatggttttcttccggttaaaagctcgagcatcactactccaaaactgtaaacatcgctcttcaaagagtattggcctgacattgaagtttctggtgcgctgtatccttcatcgttttggtttagtagctgcacaatgtcatgaatacttaggaacaagttccatggaggaacaaaagagagagagagatactagaattctgagaagtttagtctatactatatatacctcgtttgcagtgggaaggaagctagcgagacctgagtctgagaggtgtggattcagctctgagtcaagtaaaatatttgctgatttaatgttcttgtggactatagatggtgagcaaacttcatgcaagtacctgcaacaacaacaatactttccatgagactctgctgcatgctattatattgagcaataatgtgattgagatgtttaaagacttactccaatgcacgtgcagtgccaagagcgatcttgacacggggattccatatcaacggtttgctttcctcttctgcaagatgtaaaaagtcatgcaatgagccgtttctatggaactcatagaccaccaagtgttgcccgtgttcagaacagtaaccatcaagctttgtgacattttcgtgatccaaatgcgctattttcgatacaatttcggtaaaatcatcagcagtatccgtgggaagcgcagatgagtcgattttcttcacagcaagtacctagtagatcaaagaaaatatctcagtagcagaatattatgacattgtgctcttacaagtagaggaggattatataaaattaaatacctttccatcttcaaactgagctctgtatactcttccaaatgttccttcaccgagaagattatctacgctgaaactgttggtagctacttgaagatctgaaaccgtatatgtgttcacatttgaaggaacaacaacagcagctttctttgcaacaataggttttctcattgttgaatcatcgtcatcaaacgacttatgtcgctcagatggtggaggacgtagattcatcgacaatgacgtatccagtttctttgtctcaaccaatggtggattctgtacagacttattctctgcaaccagatgattacatagttagaaaaccataagattatttgatgtataatactttttgacaataaaaaaagtttaatgagttattaccttgatgaaagtcattggacgctagtataatgggttggttaatgttattatcagtcttttcaatgtccgtggatgatgaccgctttgatctttttctcttgatcaagaagaaagctatgactgctgttacaactatcaaagaaatgactattcctgctactccaccagctccaagccctgatttgctggagtctttgctattgctggaatcaccattggaacggtttccacggttcccggatttcggagtaggtgatgatttactgatcggtggtgtaccaggaggtggtggaggtgcaggcccggaatttaataaattgccatcttttctgttttcaagatcattcaggaaaaaattagtgagattagagaaaagatcgaagaatcgaagaaaggaatgcaacacttactgcaagttaatgcctttcaaagaatcagggatccagcctgtgaaccgattgtttgcaatattcctgaggaggaagcattcagcaagaacaacattcaagtggtgtctacaggagataaattcctaaaaatggataagcttaagttacccacagattttcgagaggaagggtggctagaatatcaatggtgcctgagaactgattgttctgaagataactgtgaagttgaaaaagcacaatgttagtaactaagtattaactttaactggttcacttacagggagtttttatttatcaatacatagagacctacttataggagtcttacattgattttgcactcgtaagagagctacaagtgtttgggagagaccctataaaagcattggaagagaggtccctgaaaacacacaaaatcttgtcaaaacatttgtttattaacttattcctttgactcaggaaaaaaggatcttacaatatagagagagaggtgagttttgtgaagtcaatagctagctgcttcaactggttgtgagcaaggttgctggacaaaaacaatggagcattaaataaccattctttctccaagatatgtttgagaataaacaactgaagaacttacaggtacttaagaggagccatcatagaaatggaatattgagcagatccagtgaactggttattagcaagattcctagacaaatacagaaattgatcaacttgcaaaacaaacatagaaatttgtagaacatataacagagagaatcatcaaacatacaatcgctccaagtttggaggaagctgataaggcaaatcgcctccaaggttattgttgctcatatcactgcaggtttcaccaaaaacaatccatgagtataagccacaccactaaatacacaaaagtagaaactttggagaatcatggaagataaatcttacaactcagtaacagaagtcaatttatcaagcatgaatccaagtgatccagaaagtccaagacttggtaactttctgcaagtagatacatgtattaagcatggatacaagaaaagaagaaaacaaagtgatattgaattatgattaaaaagtgattacatttgtgtaactcgagagccagagcaagttatgcctttccagttttggccacaaggatcacctcctgatgctgtccattgtgagagctgtcctggagaattcatggagctgaacatgatgtttaacgccgaagctgcacatattaagaaccagagaccataagtgaactattccaaaccatcataatcatcttgattttttgtcggttacatgaagcagatccaagatttgagatcatttgggttttatgaactaggtgttaatgaaatgcttgagaattaacaacaacaaagaaaaaacccagaaaagagaacaaacacacaagaaaggaacaaaaagaaaaacaaaacataaagtgtgtgaaaaaggagaaaggtttgagatttggggttaaaaagaaaactcatttggtcgaaacaaaacctgttttgaagaaaagaacattatgacagaaagggttattattttagcttgggatgattatgaagaaatcaaaagttgtagatgaaaacataaacccagaatcatcaataagactacacaaaatgatggattaaacacctgaaaagatcgagactttttaaaagattcttcaaagaggaaaaaatgaaaagtgaaactcactatctgatgaatccgtagctccatggatgaaacttggctcaaacccaacaatgcagagtataagcagagccaaaaccacccgattctcagtcatcttcttcctccttaaccttgtctcactttctctatctctctcgaaaaccagatgagacagaagaaaacccaaatggcaaaaacccaaacttttcttcagagatttttattattaatttaataaactttgaggataaattttgataagctagattttatacagtttcagccataagacgaatttatcgagtaaaaagctggcaagcacgatttgctataagtaagaatccaagagccatacaaataggcttcggcgctttgctttgctttgctttggattattttatttatttcttccatatacttttttatctacatttgtttattaattagtactaataattaccatttaatattagttaatgacataatgctacacttaaaatgctaatttttctttttaattttgtccataaaacaattaatcttggttggtgtatcatggttatggtctgacgcattgtctttttttggtttttatgcatttctcttattcccacaaattaaaagaaaacaaaaaatacaaataaatacaaatttaataataactagctgtagttttcataaggcctacgcgcttttaaaggtttgtatattcttctttcttttctgtattttaatttcctttttatgtacgaaatattcatatactgaattaattcatttgtatagtaagaaaaacagaaacgaagctttcatacagtatagattactttgaagattggtttaggattgggtctttccatcattgctttgaagaattaattactttcccttcacatctaagtggaatgaaaaaaggaaatagagtgaaaaaggttaaattgttttttactatattaaaagttagtttgtttgtgcagaaaaaggtagtttgttttgcttataaagaagagacatgtgggtgaaataagagtaaaacactcattaatgtcgcaattatgagtatataagataattaattaacaaaaaccttattaaagaaactcacgagattcttgtagcaaatatgtatgaccttttctaatttctattagagagggacggatatataaatttaagtaatttgatagtttgtaatgtatgagaaaagataacttagcaacgaccaagaaaaaatatttacgatattagttaagtgatgcatcttaatcttcagcatttcgttaacttccaaattattgtcaaacaaaaagttacatcatcgataatcaatcatttagtttagattgtcccagttttatgtgagcgattagtttggttaaaacgtgttaatcggtcattgtacgtggtttgcctctcatctccttagtaatgtcttcgttgaaaatttcttcgtgtatgttcgctttcttatcaatttaattaattaacttgttcttgatatttgacccgcgaaaaaatacgtgtttggatattagttttctaaggcaccgacgagacaaaataaaataaaatgatgtggggtttttattttgcatttaagaataatagtagaaactaatttttttctttaacaaaaaaacaaaactaatgttttgatgaatgatgagtatttaataacactattgcccacatctatgatctatccatattttcctacaattcgttttatcatattaatggtgtatttggatccctggtattattaaatttagaaaatactagtttttaattatataggtaaatgaaataatttgaaattttgtttaaactgaattatgttagaatttaggtagatgaatagatcaatcgaggcttgaagccaagcgtgtgccagcaagaaggggtgacactgatagtataaatatataaaacgaaagatatgatgtatctctccggcatatataattgttttcagagatttattaattaaaattgacaactaaatttgtttataacagatattaagaacaaagtagaaaagaaaaaaaaaacgaaatacaaacaagttagcttagcttcaatgaaggacgtgtttctacaactattagtctgatgacaaaaataatctcgtcagcctaatttttgttatattttttcttttttgttttgtgtcattgttagtcattttgagttcatgtataagctttaagatgtatagggttatcatggagtaggtattaggtacattctaatgacaatagccaaagaatattgatcagttttaaaaatgaagaattcttagaagagaaagaaatagagagagtatcgaattaacacacaaatatttattcgagaaaaaaaaaggctatgaagctctcgacgacgtcgttgaatccctgaatagactacgcctaacgtgatgccgtttattttgttgccgacaaacgacgcgtcgtttgatttcaattgcctacaaaagctaggcgacctaattacgttatttggtagggccagatgaagaactatattgctcgcataataaaatgggcggtgtgtgttagtgacttagtgtgtttttgtgatgctttttttaatttcttttgtccaatattttttataatcgatggtgtatcaattgtctacccacgaaatttaaagtaacatgtcgattaatatatcgatcagcccactacaaacccttttaaatagactctgaatcctatcaattctttgtaagttagtaacgttcacagacttggtcatttgtacttgatcatacgtatttttaagccttttaagcgttttattccttcggagtcttggactctggattgtatatatttatcttatgatttagataaataaaaatactgaaagttattccagtactagtttctaggaatatcaaataacccacttgttaacattagtccaccgaaaattctcgtagaaaaacaaacagaggaaaatagtacatattttatttaaaatacagcatttgctttgctaaccttataataaatacatatatcctatttgtcttttgtcaaaacgagttctttatatactttacaaattcaaagtaccatacgatattgaactaaagatatcacaacaaatattctttgttacaattacaccattttaatactaaaaatcacaaacaaaatcaaatggtacctaatattttatttgtttgtactcatcatgaaaaagagaaacacacaagaaaaaatgctttgcttgttgaagagttattgctttcttttcggaaggcttaggagtgacgagtaagaactgagatgagacagaactgacgtacgtggatatcaagaccacaaatttgtatatttgttccaaaaaagttacaagcattgcatatttgcattgaaatgatagaactgtggcttcttcttaatctatctacaacgagagggtcgcttttaaccgaccggtcattagtagtccttatacattctagtcaaatatggttattgaaagccgtacgatgatattgtatgtaatcttatcttagaaataatgtaggtgaggcgtgagaaagcaatgaaacatttgtcgaaaatatgaataagacgaagcgcgaaagaaacgacacgtgaactccgtcacatgtgatagatatattgggccgttggggacaaatgctcactttcagaacacctacacgttatacacgtaggcatgcgaacttgttgggccattgtaacgaaggcccactttctgaacacctactacacgtgcctacgtttatctgatttttcattttgtcgtttttatttccttgcattagttctcacttctcaatgcaaaacatatcgattaatactatgttcaaaaaataaaataaaaacatatcgattaatatttaatagtgtgggaaaatatatcctcgaataaaccaaaagaaaaaaagatagattaacaaaaagttatcagtttctttttccgatattgtttggaaaaaaacaaactgattaattatctaataagtattctttataccaaacgtgaagaaagaaacttgtgtgttttgattaatgacgagattttctatagtttgttgaaaggaatccaacgttagcaaattgaatagcaaaaatacaaaatatataacatttttcaaacttctaaacgtatatggattcagttaatcttcttgaataaatgttatatacagtatacgtaaagtttaaaagtattataaaaacggaatacagtaacacctgagatttcattacgggtagaaatcaaagacaatgttccttaaaacagactcaattgaaagtaaaacggtaggtgagtaggtttaatttctgatttttgtttcttttcgaccaaatgactactgcaactttcttaaactgagttttttagatctccatataagttacaatacatattgagtattgacaaaaattattttggtttttctcagtaacaacaaataatttcaaagtaaaagcgtaagaaaaattacaagttacaaagctaaataaaaatcagaatctgcagtcgcctaataaaaaatgaaaaatgaccaaagtttctctgcaaaacaaaaactttaatctagagaagcaacttccctcctctctgcaacaaattaaattctaaaaaaaaaacagagcaatatatatgcatgcatatctatagtataagctagtctccattgaatacaaaacccagagacatgcacaaagacaacgattcgggttcgggttcgaatccgggtcaggtttcgaactacttgattgttcgaccgcaccgaggtgggtacatagacttgttccggtacggtgtgagagatgaccaaacgagcaaggcaaagttcttggagatgcctgataaccgcgaatggagcacgataacgattgatgaagaagcagaggatcaccgttgggtaatcgtggtttcgattctggttcgtaagattatcagacttctccgaacaccaatggaattcacaggtttcgtcgttgacttcttccttaatctgttctctgcgaatggtgggttcttcggtttgcttctccggttgattcaaggtaagtaaagttagaaactttgaatctaaaagagcgttttctatgagtttggatgcgtttttaaatgtgatttaagttgtgttgtagcgaaagttgtgataccagaaagaggctctgtgacgtttgttagtacaattgggcaacttgatgggagaattagtctgtataaggaatggaatttcgtcgaacacttggagggcattgactcggttgattctggaagggttaaaatcgaattgggaagtcgtgggcttatggatttgtgtgtgatggcgtctaagcttgcgtatgaaaatgctaaggttgttgaaaacgtcgttgatcttcattggaaggcaagtttttgttaagtatagaaactttaaacacacttttatgacaaaaaaagtttcttacttttataaagttttcatcttttaatgtctgcagatgaatctggtggagttcttggattgttggaatggtgagaattgaggattagatagcaaggtttagccttatttagcattgcttgatcagagagttttagtttagttatggatgtgttgtttttgtctttctttgcagattatcagaagcagatgtctacacaagtttttgtgtttacggataagcagaaagatgcaaacttgatagtaatcagcttcagaggtactgagccgtttgatgctgatgattggggaacagatttcgactattcgtggtatgaagtccccaatgtgggaaagcttcacatgggtttccttgaagctatgggtttaggcaacagagacgacactaccactttccattacaatctctttgaacaaacctcctctgaggaagagaatagtaaaaagaatcttctggatatggtagagagaagcgcttattatgcagtccgagtcattctgaaacgtttgctttcggaacacgaaaacgctcggtttgtagtcactggtcacagcttaggaggtgctttagcgatactgtttcccacattgttggtgttgaatgaggaaacagagataatgaagaggctgcttggagtttacacgtttggacaaccaagaatcgggaacagagaggtcgggttattcatgaaagctcaactgaatcaacctgtggatcgatacttccgagtcgtttactgcaacgatatcgtcccgagattgccctacgacgacaaaacgttcctctataaacatttcggactctgtcttttctatgacagcttctacaacgaaacagtaatgttatcatcatttgaacaaaatttaaagacttcagatttaaaaatgtgaactcgatttgtaactaataatggatttcttgaatatttgacagaaagcagaggatgagccggacccgaacccttacggtctgcgttacaagattcttgggcatgtgatcgcagtttgggagttggttagaggcttgacgatggggtacactcatggaccagattacaaagagggatggtttaggatcttgtttaggcttatggggctggtgattcctggtctgtcggatcattgcatgactgattacgtgaactcggttaggcttggacccgataatgaacttcagatgtcctctctttgaaaagtgctctgtttttttcaaccggaactatatgttcttggaataaatcttaagtgaaccggaactatatgttcttggaataaatcttaagtgaaccggaactcggttaagatgttggttcgtaaaatataataagaacctaattttgccaaaattatagttttattcttttgactagtttgttcgtcgcattattattacaactagaggcaacaatcaaacaagatcttacacaaccagaagagatttctttggtcaaaatgaaactaaatccaaaacttcccaaagatttcaactcgttttcttacataacttcttctaaactccaccagctcaatcggcggataaaatctctctctttcaattgatgtaaaataacccatgaaaataaaaaccaaaagattgattctttaggttaaaaaaagtaacaagattttgaagggttattgcaccaaatgaagagagagaatcaaaagttctagccttctaggatagggttcaagccatgcaaccaagcagccaccaacaccaacggagagcttcacatcaatggagcttcaagaaggagacatggagaggggagggggtatatatacatatactaatatgtaaaggttaatttgaaggaggagtcaaatggttctctctactcatcgccatggatgtaccagcagcaaagcatggtggcacaacggcggagaatgtagagacgagctcgttgttccttcaccaaggaaacacatttgcttgtaaaagcgtgtcctttgttgaactttctctttaatcctgccatgggattgaattagggtttatattatgttttagtgatcaaaagttgggtggcaccaaaaaaaaaaaccctctaatgggtgaaggaagagagtgcaaatgaaaggtttgtgatgaaggagaagaggatttgaagagtatatatatagaagaaaaagaagaaagaggtgtcgtaaataataaggaagtaaaataagaggagatgaacatggtcttgattttttaggtgcattgacattgggatatatgcatggctggttttgggtttcccaaagatctatactttcatgaaatcataactttgtacataaatattttattctatcattgtctaacctattatatattgtaggctgccaaaagttaatttcatcttataaatagataaattagtcttgaaactgataagatcttactttgtgtacttttatttaaatgtaagaaacgcggtaaacacagctgtttattcatattatttgtttttttaaccctcacaagaaatggttaacattgtttaataggcttcaacacaatatttaactcaaagaaaagaagataaagtagaaaagggagaaaggtgggcttaaatagaggagagatgttgaaagaagacaaagcattgagattgggtttaggggaacatggaaccggcaatcttatcttcggtttctccacttgagtaggtttgtttggttcgattctcttaatttaatctctaactttcatatttttaaccaagattttgaaaactggatgatctcttagaacataaaagcattcgatcaaacctactgagcaataatatgtaaaaatctgtcaaactatttttttaacgttacagttgaattttatttggtttatattattataacttggtaagtacttaaaattttctaaaacaatctaatttattttacttaaactctaaaccggtaagacaaagtaatatgaactataatatattttcaagattgtggtcggaccaaccatatccgattgggtttaaatacattatccttaaccttaaccattgtcataattaagttacgaaaacaaaaatctgaaagagattgtgattgtttccgtttctctatcattcgtagcggttttacagctgctagaacaaaatcaatcgctcttgatttcttcctcatttttctaatcagttctccatcacttatcgtgtatcaaattccggatcacaacagatttggatcacgtacatttatatcctcaccagtcacattgttttgtacatattaaaatagacacactgaaaaatacatatagtacaatatataccattgtcggtctacgattctaaggcttctaagcccaacaagtatcaaaattttgattatcatgtttcttatgaatacgtacgaccatgttccaataaactattgaaggatatcatcctcttctcacgcaaatgcatggaccatagagaaggaatcgcctttacggtcagggcccaatatataaccccagtccattttgaatataaatggatcttaggacactaaccattattacggagttttgttatgtgaaccattaactagacaaattctaaaacttataaggaatcgtgtatataagagtgtattatacccgattcattatagagttactagctaaggcccgcctaaaaagacgggtataaaatataaatttattcaaataattattaatagtatttaaatttcaaatagtaaatagtgatttacatcgctttttataatatttaatttagtaacttttgtatttaataaaatttcaatcatacacattcaattttacaatatattttaattatatatttcatcataataagctatcttgttattctatacactccatctttcttttttgataatgtgtatggaacaaaagccacctatgatttattcataacagaaaagtacactcgaacacttttttaaaacaacatcccatgtgtatcctttaacaatgtcgaacttgcaactatcggcctaacatcaaataattgcagagtaagcggtaactaaaatgcatagtttgctaatccattcagtatgcgattagtttttctatacacatgagtaatctgaactatctggtccttatacactccatcttattaacgatatttgaagtttaaatagtaagtcacatacttttttattatttaatttagtatttccttaaaccaaatttcaatcttacaaattcgatttacaatacaatttaaatatctactttactttaataaatataatttaattctatacactacatcttattgttagttttccattttagttaaaaaaattataagataattttttagatataaacatataaattaaatatctataaatatttttatttttttagtttctttaggaaaaaggtaaaaaaaaaaatctagcagatgtcaaaatctaaaatcgttaaaattgatatgtgtcatgatattgtgagttactaacttttaaaaccgtactttatatagtaagattttatatatttatagacatataaaattagtatatgtaaatttatttactttttaagttttctatttttataagaaaagaaaagttaaatctttattaacatatgtaaacatcttatcgttaaacttactacatgtcctgatctcgtgagttagtaacttttgaaaccgtactttatataataagatatagaaaacaataattaataattctagacttagtttctacataataagaagtatatataataaagaatagttaataattttatagaattcatttatgttgagttgcaaacttgcaagtgtgctttattttgttttttctttttaatttaatttttgactactcgataatgttcaactaattggaaagaatgggtaaagtcgttggatataataagctcgtcatgttaagctgaattctgtagtcaattgactcaacgatagaaaaaatcgaacgaaggatgaacaaaactaagttttgactccagtcaactactaataaaccatcatcgttggattactaaattccttacataacatcatcaaaattctcttttgtccaaaaaaaaataacgtcatcaaaattctcaactaactcaatcaaccgataaagtctctctttcgtttaatgcaaaataaagaatgaaattctagctttagaacccctaccgctaggatattcataccaatatttgaaaccaattgagccaaagtaactaatatcttactgttacgtttcattttcacctgtcttttttggaatacatattcaatttgaaagaaaaaaaaaaagaggtccatccagggaaaaaaaatttactaacaaattttggcttggaaactatataacatgttaattagtctctttctatcattagtgttcgaatttgagattttcaagactcctcattgtggtgttaatttccaacggccgattcgaacacgtaattgaccaataaaatgttcatgaagctatacaaatacaagtgcatttactgagtttgcatttctttgctaatattatagacgaagatagaaaaatagatcaatatatactagtatcacttccatatacaaaatcgttgaatattctatcgtatacatactctaacacagatcatatacacgccctctatattttgttgttgttttaaccctaaaatcgtataagaaaaaaaaagcgtgagacagccttaaacgcgtttgcgactcgcgtagcttttgcccacatagtgataataattactattgctctgatttttactcccaccactagagcttttaccgcgcagtaaatatgacaacgccctccacaaaaacgattttctccgtcgcggtgaaacggcaatcacgtgactagcatgtggtctcgttgacttcttaatcacaagacctctaacttcttccggtggcttataatgcctaatcaacggccacttgattccatcaaaaaacggatgacgtttgatatcttgcgcacccctggcgcatcctagccttttccttgggtccttaaccaaaagcttctcaatcaagtccctagcttcatctaaatcaccgtccatatggaaactcgcggtcttagtggtcgatactatattccgcagtgtttgctctttactctctcccttaaacggcgtcgtaccgtacaataactcgtaaaggaatattccgaacgcccaccagtctactccgcttccgtgtccgttgccggaaactagctccggcgcaagatactcatgtgttccgacacaagatcttgaaaacgccgttacaggctctgccgcaaactctgaaacaatctcctctctctcgtactttttctccgcagcaacggagaagcaaccgcttcttctacgacgaagcgacggagatgaagaagatctccggtagcgacgagatttaaaagtagggacaacgtcggatttgaaacaaagatcaaaatccgacaacatgacgtgtccgtcttcacgaagcaaaacgttttcaggtttaagatcgcggtatacgattcccattgcgtgaaggtactctaatgcaacgagaacttcggcggcaaagaatctaaccggctgaatcggtaaacggttaccaggttgcttgcgtaacaaggaatgtaagtctccattgggagcataatcaatgaggagacacgtgtagtgagactcgtcgatacgagcatagagcgtaggaagaaaagggtggtccagcaaggagaggatctctgcctccgtctcgacctgagagagcttcttctccgtcgtgagacagttacggtcgatgacctttaaagcgaatcttgcggaagagtcacggaggttacagaggaacactcggcctaggtttccggtgccgaggtggcgtataagtttcaggtggcggaggtggatgtttccgtcggaggagagaagttttgctgatttgattgctgaccagtgaggatcatgacgacggtggttgacggaggaggaggaggtggatgaggttgtgactgcagaggaagtagagagtctgtcgttgaagcttaatgttagacttgtgcgagcgctcgaggaggcgaatgtacggtcggtagtggtggatgtgaagctgagatcaagatcggtgtcagggaaatagaaatcttcttgttccatttttttctttcttgattcacttttttttttgtgtgtctttgaggcagagagttctgagttatttataaagaagacattggagacttgatagttaattagttatttgaaaaaatgattttaaaaaagtttatgtttgggggttttgggaagttgggaaatgacaagggaaagtgatgatatgtttgaccttaacgggtcatttattattatgtgattttaggtattaaacaactattaatcacgtatgaaagtctaaaactatcactaatcttgggtgtgcaagcacatgtttattttatcaaacaccgacgatggtgcatattttaagaaaactaaacagttatacagttgatacagtcggtcgataataatcacgcatttacaattatatcatcataaatatatataattcataacaattataagatgcattaaaagagggggggaaatattcttgacggaaaaacaaaaaagaaattttgaattattttttcaattggttttagtttttaataggtgggtaagagagatggagtttatactgaaataaaaactaaactggaagtgaagaagaaacataaggtcagtgaaattaattgggggagtctgtgagcattaaagaggcagtaacagcttgtcggctgtaacgtttatcgaagttagcatcatcacacttacgtgtactcacttgacagtctactctaacgagtatcattaacatattacccaatatatattagactttgagtcgctaccgaatatattttggacataaaactactctctcttataacctattataaccaaaacaataataataaaaaatattaattatcaacgtattctagtacaaactatctcatgatttccatctatcaaaatttgatgtaaaagaaagagattacgaatgcatcatgcatgggcatttgattcttaacgtgtttgggaattaaattttattttagaagttgtatgttaatgacaaattatgatattagtggattctgaaacaatgtatctttctttgtgaatgatttcagtatttttgttaaaaagtaatagtttttttttttttttttaacacctcatataacatgcaacagttttattatggaagtattttatactacaaatattaataatttttatttagtagtattaaaactaaaataatatcttccttttttttttgtcgtgggtcaaaatattatgagggattcgcatgttgaagagaatatgggaaatggatccatgtgatgggccattactaaggcttcttaccgttgcgggacccacgtttgctcaaaaagtctaactttgtccgccacgtggccaacattggacccatctttgtcgcttttaaattagttttctaatcacatatctgtgggcctctgcttttaaactaatttataacttaggttaataattcttccaataatttaattctcatttatttcctacctaaaaataatattttaaaatttttgaaaaccccttttcctttatataataccatcttaaaaaaaatattttatatttccaatcaattattgaagttatcaaattattagctagtggtttgctgctcgttgatcaggttgattgatacatggagttactatctataaacaagaaaccaaacaggtgacattcgacgattagtagatgacataaccggccgcatagagaagagtatacatagattaatgattggtttaggtgtagtttgttcaaagaatatgcttatgctcacttaagaacaattttctattaggtgtcagacaaaagaaagaacaattttatattatatactcttttatttaatcgttgaattactactgtctacagatatataccagatcagaccggtacataaattacatgatgcaagttgcaaaacataatcgtgaaacataaaattgttaattaaacccaagatctcaggaaaaaggaaaacacgaggatcttcccctaagtagtatgtgttaaccggtaattgaacacaattatgacaatatataacattaagcgatttgcatttcaagtaatgggattcgattacttaaccacgtggtttggcatattatgttacgatgaacgtgataataacataattaatacgtccttatctttcatacttctgatcaagcagcctactttacaatatactagtgtgaataaacagtacaatatgaaatataagtattacgtcactattttatttcaatatatcactaaagaagtaattctcattaaagatttcttgtttttattcaatttcagatgctatgaataatatatatacactgtaaattgaaaacaacaacaagaacttacatagaaaataacaataataatagatgtgggagcaaagaatccaacctgtatttataattattagagaaaccattatttgaagacaaaagaatgctaacctttcatgtgatgaataattgcattttgccacaactacttgtaacagaaagagaaaaatcttctcatctatatgatgtctataacataatatatatattatatatgaaaagttatacaaacattagtcactttatatagtcttgagattacctaatccgtgcctaccatgagaatgtaaatatataaaaaaactttatgtcacttattatttagtagcacattataaaacttcacatttcaaacttatagtacacataacgttttaaggaaatgataggacttgcataaactcttgacctaatttgtcaatattttaactattcttttacaattcttcgtttcgagactacggtattaatgcatcggactcattctaacgtcaagaaaagatgcattggcgtgtaaaccatagtttcccttttgaggtgcaatgcatcttagttagaattcttttatattacgatgattaaatttgtttcaattattaattatagttagtgtgtcctaatcaagctacctgattaatccaacaagtttgacatggtcatatcacatgtaccaacgttcattgtgatcaaaacataacagaaggtcctaatcatcaccttggagcccacaacattttatctaataaaacaacataacatatgggttttcaaattcattgaactatgcccacttttaagttgaaattatttaagtatatgaataaatatctaactagtagctattaaaatataattaacgttacttatgaattattaacattacccaccaacaaacaaagggacacaaacacatcctttcaatctacaattactcttccgaaagtcaaacagccgacgtttagttgactgaagtaaatatcggtagagtctcttattaggcaatctaagcccatatatggtaaatgggctttttgattaacgaattcaaagaccaagctcgttgaggaataaaaccgttcaagcttttcccatagctcaaccgattaaatccaaaaagaccatcctaaaaggctacaacttaaaagagataaataaaaattataaaatcatgtttcgcgttataatctcgactacgaaacaatagcgaactttaatatgatataatttctgaaagaaaatgcgttttttttttataagacaaaaatgtaattagcgaaaaaccttaatattcaattactcactttaaccaaataggacatatatctttattcctctgtcacgcttgttgcctttgttttctttgtgttctttgatttcgtttagggtgcttcaaatctggtgaagagtcgataggaagagataagcgagagcaacatgtagagaagggagacaacgaatgtgaaaacaaccgaaatcaatgcattatgacagaaggatccataggagtcacaagcagagctccaagtaatgggtatgtttccatagtatgctaagtaaaccgtctctgcagatacagccccagccgctagaaccacgtatgtgaccacctggtcaagcaagaacaatgtcctgacttggaccttgcttattggacacggaagcgctaatattgcgagagccgagagaagagaataagcagcacaaacgccattagcactcaccaaatacctacaataagggaaaaaaaaggaaaggttatgattgattacgctctaatgaagcaagaagagaaagagagagatagaagaaggtgaacatgaaagctccaatatttgagtaagaaacagagccaaattcgttggagatagagttcttgatcatgatgacgagacccgtaatacttagagccattgatgctactcgcaggaccgcctctgccgatttctcagtgcgattaagcactaaagctgattcgtcaatggcggtttgatcagtcttgtccatcttttttttttggtgtttaaggatagagagatctttgtctttgtcttttataatgttaagtgtttaaagtcataaacgacaaaacagtcgctcaagcattcaatataatcatgtgattatatgacgtcaccagtctcaattttaggtgactctttttctctattttaatcatttttttttccaaatttggtattacgtaccagaagtaaagagatgtgattaggccttcgtaattaatgatataggttgtctgtttattcatttatgattttcgggtatggactattttctctcaatccttgttaagaaaattcattcacatgaatggtctaatactttttgcacatgttaggaaggaccgtctgcacaagcagagactcccatccatgttgacatctttacctaagttatttcaagaacattatgtacgcttaagtctactttataatagtaaatgacataggataggacgaccatataaatatttattttttgtttttttgacaaccgtcaagacagaacgaatagaatctgaatagttgaaatgtgaatagtattgaattcgtaacactagttatcgcatcaaaatgagatttttagtatcgacctttgcatattccacgcgtcacctctccaagcagcatacgagtatcaaactatagctacctcgtgactaaaatttatgggtattgagaaaataaaacaaagtaatactgttagatatatctcaactacttttgttagcagtacaccgtatatatacatgtttttgctaaagaataacaattgacgtactaattttacctcattaatatatatggtgaaataggtgattagtatatttacctaattcaccatatatgaatatggtggcaaactgagatataagagggaaggtgattttcatgcaaattttttttttatttttttttgaatgaatgcaaaatttattcaaaaaaaaaaaacctgggctacatcaagtacttcatttctgagtttttgaaaaatctaaagacaacaaaagactttacaatttaataaaaaaataataaaaatactttatcactctcaacgaaattgttgatttaataacgtatctcttggtaaaacagcgttttatttgacgaaattgttataaatgaataaaatgataatagaaactagtgtggtacgtaaaatacctctcatttggcaaaataacggttatgtatcatgagtattgcatacgacagcgtgcttaaatagtgtgctttcaggagaaaatatataccaagttatttgctgaaattaccacgcaaatctgaggttcgaatggcaaaataaaaaaccaatgtcatttccttaatgtattaaggtcatttaaataaaattgtacacttttttcacctgtaagcgttccaaagtgtagaatggataactagaagggtcaaaggtataatattaataagcgaactcactttttgcccaagtgatttcacttcttacatttgcttgatatagttacccaaaagtgtatatatattcccttatacaattgttctattttctggattataaggggaataagaaaaaagaaaagagagagtatataataatacttttataaagtgatgttagattctaatttgtaacgaaaagttcaaagtgaaagaaaaaacgaaaaagtttttctgttttgttttatatctatagccaagaaagtttctcagatttacaagaagttaactgagaaaaacaaaaaaaaaacttatgaagcatgaaagactaattaacgaggtgattaattttgagacaaattaaacatcgaattaaaagtaacatttggagggtttatatgttatatatgtgacatgataagtccgattcatgactaatgtatatctggaatctaacatggaagaatagagaacgaagcagagccaaggtcaacttgccagacacgaatcaacagattgtgaatgagaccaaatcaatggtcataaaccggttgggtttaaaccggcaagtcatccttggctcaattccattcgttattccttcatgcaagaccctctgatacaaccaaagactcccattacaatattctttcgatcacgagctacttattttcaaatgtgttacctctttcgtgactcttgtgttgtgtggtaaagcctagtcgagatgtgtcggtatatataggcatacatatacaaatgcgacaaaataagtatattatattgtttaatttctatattccatttctatatgcatggctgggatttttgaccaaaaccctaattcaagaatagaatccaaaagatgggatcaaagaatataatctaatgggctgaccacattttccgatttaattcgcatagttaatattctttccactactttatgccgcagaaatttgtaattaagtaagacaaagaaatacagatataagatggtcgtagaaaccagtagaggaatttcatttttcgtggataagtggaatattaataagagaatggtctttactctttacagtgggaaatgggaatagtagcccattataatttcatcagattctatatatgcatgtttgtataagctaaaataaatacgtttaagcattcttcaaaaaaatttacaagttctagagactctcttaacgtcggcaatttatattctactttacatgacactttcaggaaaagaaaactatactcactagcagatcattaaattttctttttctttttttgaatgaaccttagttgtggtttttatttttgttagctagaaacttcagtgttttttttccgccaatggtagtgctttgatgatggtccggcccaattcatagaaggccttgaaaatgggccagaccaattcagagacccaacaagctcgactgtatacacaaaattcacaaaaacagcttttgagaagttttcttcttcttcaccttattttcgggtatcaaagccacaaaaccctgagaatggcggcagctactcaatttctctcccaaccttcgtctctcaatccacaccaactgaagaaccaaacctcacaacgctccagaagcatccctgtcttgtctcttaaatccacattgaagccacttaaacgcctctccgtgaaagccgccgtcgtttctcaaaactcgtccaaaaccgtgacgaagttcgatcactgtttcaagaaatcatcagatgggtttctctattgtgaaggaactaaagttgaggatatcatggagtcagtggagagaagacccttttacttatatagcaaacctcagatcactagaaacctcgaggcttataaagaagcattggaaggagtgagctctgtgattggttacgctatcaaagctaataacaatcttaaaattttggagcatttgagaagtttaggctgtggtgctgtgctcgttagtggaaatgagcttagacttgctcttcgtgctggtttcgatcccacaaagtaacattctttatttacccattattgccctgtatctgatttagagagctttaacttcatccctataacaaagtgtttgacttgttgatggaatcagtattgatatgaatggtatgatttggtgtaaaatgaataggtgcattttcaatggaaatggcaagtctttggaagatttagttctagctgctcaagaaggtgttttcgttaatgtcgatagtgagtttgacttgaataacattgtggaagcttcaagaatttctggtaagcaggtcaatgtactgctgcgtatcaatcctgatgttgatcctcaggtatggttaaaatttactttaaactttagcatcatgtctaacataattggtcttggatattagttagtgagcttttctgttttatacatttttcaggtgcatccatatgttgctactgggaacaagaactcaaagtttggtatcaggaacgagaagcttcaatggtttctggatcaggtcaaggcacatcccaaagagctgaagcttgttggagctcattgccatctaggctctaccattactaaggtaacactctgattatagttgcttaaagttgtattttgatgtaatcagatgaatatggattgctctctgtttagtgtttgcttttggtccgtccttagatctcaactcttgagctctacgtatttgcgtatgttctgtttattccaggtggatatattcagagatgcggcagttctcatgatagaatacattgacgagatccggcgtcaaggttttgaagttagttacttgaacattggtggtggtttagggattgattattaccatgccggcgctgtccttcccacacccatggatctcatcaacactgtaagaacaacatctctttcgttcatttgatctcaaaagtagtgggatggtagaattgttacaatccttgatgtgttccaggtaagagagcttgttctttcacgagacctgaatctaataatcgagccagggagatctctgattgcaaacacttgctgtttcgtcaaccatgtaactggtgtgaagacgaatggaactaagaacttcatagtcattgatggaagtatggctgagcttatccgtcccagtctttatgatgcttatcaggtaaaaacaaatatacttctcacaacagcatctgcagattttggtcccctttgagctatagctaaacattctcttgttcatgtttttaactcaaaagcacattgagttggtctctcctccaccggctgaagcagaggttaccaaattcgacgtagtgggtcctgtctgtgaatctgctgatttcctgggcaaagacagagagcttcccactcctccacaggtatgataaggatatgattctgtttggaagctcaggtaatgtggaatcttatgagtttattgtattcattacagggagctggtctggtggttcatgacgctggtgcatactgtatgagcatggcttccacttacaatctcaagatgcgtcctccggaatactgggtaccaacacattttcttgttccaggagaatcaagatcccgagagaaattgtcatgaatttgaacttattttcttcaatgtgttgtttgtttttgcaggttgaagaagatgggtcgatcactaagataaggcatgctgagacattcgatgaccatttgcgtttctttgaaggtctatgaactcttagatttactcatcattgttgcttttttgattgaattgtatgattattcggaatcaggaccataatgatattgctgttttagattttcacattatgtgctttgattcaaagtcaatgaagtgatcatatgaataagaaaacgttcacaagtcaagacagaaaataagaggtgattctgattataagaggagtctttcaagccaaagtcgtccattgtccaaacacataaacactcatctaagcttcttcccatagctataagaagattctttcaagctttttgttcacaagtttgcttgcagaactaaatgaatcaataactacaactactatgtcattaatcaagaaactaaaagaagatagttcatagttcacaggacaagtaaagtgaatttggtttatcatgtagtgacttaccgccacaagtctaatttcatcatgggttataaggaagattccaaaataaaccttttaatgtgtaaatgagacggtggctggaaacttgaagtagcaaaatggtcccatgcgacgccgtattggcgcggccacctctctccgccatataatagaggtggtcctttaagttttattttctttctgtggtttctatgttaccgtacgtatcaatttttaaaagcagctatacatggtacgacgtctaacaactatgttacctgaattgtcccatcgggccatttaatatgtggatggttgcatttttcttcttctaagtgactagtttgtacttggtaaagtgtttacgctaacatccatttgtaagtttgattcaacaaattaacttcaacagtgaaatgaacatgtctaatttggaaaagtttgatttcaaactgaatatgttaaaaatttctcagcataaataagattaatatccaaatgttaattaattattttattttcaattggatgatcataaaacttgcaaaataattaatcagaaaaagaagaagcaaattttttaattatacttgaacaatgaaaacctaaatccctgcaatttggcttttgaatttagtaagagacgttagtgtatgaatgtatgtatatgtcatcttcacgaattaatgctaaaagtttggcaaatctttggttggccaactcatttggctatgatatgttgttaccattatatatgcatgttgctgtcaatttttctcttttccagaagtttagaaaatcattatatagttatattacagggtacgtatcatatcatacagccacatatcaagaggattagaaaaaaggaatctgtgataatcatagtcttgaatttagcaaacaaaaattgttttaaatcactgagccacttttatctaaatctgaatagaaatatatactgtattctgtagtcttgggaattataagttgaagataaatatgatctttaaacgataaacaagtaaaggatggaaacgtatataactattatttgagaaaagaaattgaaagctataaaggctaatagagcccccacaccggccgtcttcccttttgaaagcaacttggtaccttttaacttgatcttacatccgtaccagtgtgtttacagatacaatctggatcatttgatctttgttttggtggtgtttatatgttgttgtgtaatcgaatgatttcttcatcgtataggttcaaagccagagatggttgtaatttggtacattgatacttacttgacattgaagattaccaaataattaagcttggtgccaaattaaaacgttttttattttcttttacgtgtgtgtaaaatatggtggttgattaattgtgcatatctaaagataaaatcatatcattgaaaattaggtttgattttgtcgggagtgtaagttctctttcacatatattattgtccttttgtagatgcaatcatgcaagtgctttaacacttccattcatactctctataaattcacttcatcacttctcaccaaaacccttcacaaataatcttgtccaacaatctctcatttctctctttcttttttccttcccatgcgcaacgaagaagctttcttctcccaacattctcttttggattcagaagatctcaatcagcaatggaaacagttaagacctccaggttcactactgaggtggctccggctaagtttatatcggcgacaagagaaccattcaagaacatgttgacaacaatctccgaggaagactttgactttgatgaactagtcagagccactgcagagagactctcttcttcttgtccaggctcctcctcctggtctcttgctcactacgccaagatcaacagagtctcttcttcttagagcattcaattgccatcccaaaatgcatttttttctttctctttttcaataataccaaagaagatgatctgtttgtaatctcttcagcatcagagtttttttatctacttcgcgttgttgaatgttttcctgctagcattcttgaattattttatgatcacttctgtttattagcattcttgaatcatctatgatcgatccttttatgtactaccaacgaaccatccatatattttactggaacgaaagcacgaaaccatgtccgatgttaatatgtttaacgaaaaaccacaaatacaatacacaaattcaagaacgttcttatactaaaaatttccacaggacttgtatatttgtgtaaagcttcatcgataagaggcaaaaaacaagaaggcgttatattatacagaatgagatctgttttttttttctttttttttccggtaattacttttactctcttccaaaaatgtaataataatagaaaagaaaaaaactcacttcaccatcatcacagtcgcaggaaaaaatctcgatccgctcactctgtataatcagactagccggatgggttaagcaatgatgaaatgaggaatgaggagtgtgtgtgtgaagggaccaagtagaggcttcatgcttccagagattcgagtcatttttgttgaagcaaaaaacaatggttcacgagtacttcttcttgctaatctcccagatacgatttaccagatctgctttcaactcctctggaatctgtgatttcaaacttgatttcacatcttcaatcaacctccttctgcacaaaggtccaaccatccaaaacatgaatttaaatatgacgattataatgaagcatgaagccaaaagaggtccaaatgcaatatatgcagattctagctattatactcaagtaagaggaagagaatgtatgagaagatcatagggaacaggaataattcgtgcttcacttacttcaagtcgctaccatcttctccacctgattgctctgtacgcaatctcttcttggcatgcatggagatgagaaccttgtcataccatccgcatgaacgtagatgtgacagcgcgtcttttttcaggctgtggaaatgtgcaacacaatcaattataggttagctatggcgtcggaatataatagcgagtatttagcaaaggcacaaaaccgaagttacctctcttttattgcttcaagttcattccgagatgattcgtcttttctcagcaaaatgcaggggtcttcctttgttgaagaacacaagcctttggattgggtggtactaacaccgttcctctcagtttcggggtgagcagttccattttgtgagccattacttccacatggatgtaagttatccttgtggtgatcacccccattgctggagccattactccgctcatgaggatgcaatgccactttatgattactactacctggtgcactgccgttttctttaactccattgccaccattttcagtaccaaactttctctccgtaccagagttaactttagtcggcaaaactgatacactattctctttgtttgcctttggagctatgttctcatcttggtggaaagaaagtctaccattgacaggagagacccttttggcaccaaggttgacagatatactgactttcgcatgtggccttaaaggcgccttttcaactttggaagaaagcaggttatcctctagtggggcctgctcggctcgtggtttgggcctaataaatttatggggctttgaagaagccaggttacccttctggaaggactgctcggcttgaggtttcatgttgaaaccattaaggggcccaataaacttctggggatttgatgtctcacagccattaacttcatgagatgtagtcccattggatgttaccagagttttagcagacgctggcctctggtttgaacggctgaaaaacaggatataagctttctctgataaaacctcctgcaaggtggagagcgagacaaacgaatcattgcagcaataccatcgacccaaggaatcctacacaagacagttaagatatcagcaagtagttcgagagttccagttgcttgaaaattaaaaaaggacataaaagaaccttaacgtatgcataatagtgcccagattcaggagaaaatcctgagtgcacaattatcccaaagagcttgtattccggttgagggtcctgcagtttttaatagagtaaaccaataagcaaaaagtaggaattgggaagtacagttacatagagcaagaaaattttcacaagctagagcactatgatgattcaataggtagatgcagggactaataatcatattgaatttcatgtaagagaacttggaagcaataaatcaaaatatttaacagcctatgacaaaacatgatatagactagaagcataatatcaaacttagctgcttgaccaaacttgtctcaaccttaacttttttttttccaacttgtctcattcttaactaatcagatataatcaaagcaatacttgaaagtgatgtcagacttctgcctcaataattcaaaggataaaacttagccaacctaaaaactatgaacgttgcaaattcattcgatattctatatgcaaatcatgtcaaaaggcttaatcaggttgaaaatccagttaaacgctgcagtaaactattcatcctgcactaaaacccctaacattctgatatgcatctaactggatatgtagaaccattgcacaactaacagaaactggcaacacacttaaagttaagttgaaagtgtcagaatcttgtaccttgcttgctttactcatgaagttcgagagaaccagaatctcaccaaatgaaatggctttatcaatcttcccaccaaaaatgcccccaaacctctgcaaatccattaaaattattatataactaaaataattgccaccttttgtaaacagaacatgatacacttactttcaattggataacaaggatattaggcgcttgcagtatagacatctgcttcctcgccgtcaccagtttttcacagctaaatcaaattgaaaatttcagttaaaaacagaaccacaaaaactgaaagaaagacaaactagaagagaaatcacttacgactcgcatctatacttattgttgccatctaaaatctctgattgaaagaacttttgcaatgactccttcacagagctactctgcaaaatctcaagactgatatccataatctcatcggctttattagactccgcaccacaagacaaacacttgacctggctctgcaaagcaccaccaaaaatctccttcacgacactattgccattaaagggctcgttaccgttgtatcgcaacttcttgagtctgagagacgtattgtggcatgcatcaatgacatagcgcaagaactcatgagcatcctcttgacgaccaagcttaaaatgctcagcaaaaattttgagacagcttgaaatcttgttaggcgcatcggtagttagatccacactaagagaccttgctattcttttctcaactatgcaaaatggacaatcccttttcctctctccatccacatatgtgtcgcctatcaaaatctcgaacagagagaacaccaatcaaaagcgtcagagatacaaaacaacaagtgtatctataagaaactataattccagaacctattagaagctaatgatcaacttccaattgaaaaaagtttcgataaccctaaagtgtgaaaggaggaggagaaaacgtacagtgagaggagtgtttgtgagtaaggcagaaattagcgagaggaggagtgaaagtgagacactgaaggacactattgaggtaacaggtgttgccgagattccgtaaccctaagggaggaccattcctacgcttttgactcagtagactcggcatccagctcatctgcagtttaaatcccattcaaaatcggttattctccgccggagaaaaccaaccaagcaaccgctcatcgctgactcgccgccgcggccaagccaacagctgcgatcgcatcttttgtcaccacgcgttttcctcgcttttctctttctcttctaattcacgttttgggggcttcctccaatcaatttgtagtcgaaattaaaggaagattttcacgaatttgaaagagttggggaaggaagaagatgaagatcgaattcgatgaaggtaactgccgagggaagagacccgcccagcaacaaaccccacaatcccttcgcgatgtttatttaccctcgtcccattttttatttttaaaaaaatataatttccaggtaggtaaacaaaaaaggaaatactgttactgggctttttaggcccatcttttaagccaataggaaaagtcgatacacgatttatctacgtgtagccatatttttttaattattaaatttaagctgatgatattcagaaaatatttacttcttggaaaggacaaaaataaaactaaatttactttttttttttctttctctgccttatgtggatgataaattttcggataataacctacaaaatgtgaataaaatttatgagaattgaacaaattgattcatcttttttttttcctttccctggtacagagtttgttgtataagttatataattcggacggtacaaatgagaaaacaaacaatcaaagattacctcaaagactgatgatgagaaactacattttctcggacatcatcatctctctgtattagtattaccttgtgacaccaacggtattgattcagcatctcctggagtttctgtggtaacaactttggatgcttccttcttcagcttatggttgttataagccgctacaccggcaatagctgtgtgtgaacacagagcacactgtatgagaagcaaatttttttcttgttagccaatttgtatgtgagaagttttgtcttaccgatggcgtaaccgaaaagattgatgattgtgagtttcgtgtcggcaaagagaagagctgacaccaagacaaccacccaatccttgacaacgccagcaactcggatagtgagagcactcgtgtgagaaatcaccaagaaaaccgacaagttgagggcaaatgtacagagggaattaagggtcaacactacaaagtggaagttccatgggccattgccatctatcttcgatttctctagaaagatccacggcacaaacaagcagatagcactgcaaaggaggtacaaaaagataaaagtaacccttaggcttaaataatgagagaaatgagatggcttcctcttcttcgattttacttacctgcatgggctcacgtagtacataagagagattgggtttaacttgatgcccttcctcttgacaagaagttccatgaagattagcctcagggcttctccaacaacaccacccatttggtaaaccactccaatccagttgatgtttaattccccataagaagctactaaaacaccaaaacttatgatagacattatcaaaagcatcctgcagctcatcatttcaagtccagcagctactccaagaataaacacagcaacaggcactgcaagtatggttgaagaatactgtacattgttagtcagatataagaagtaaacataagacttatgaggaaccaagagcatgaacagtttcttacttatagccttcaacatctgcgcaaatgcaactgatatgtagaggtaggcagtgtttcccaaccagagggtcattgcaaacattgcacctattggaataactgacgtaacatatctgagtacataaagtgagttaatactgctacattgataaaattagtaaagatatttatgttatgggtattttcgactactccaaaatcaaattccttacgaagtctctttcttccttacatttctagtgtcattccttcctcgaccttcacaatcttcatggagaaataaatagagaacagagaagggaccaaaagttaggcagtctttacttgtgaacaaaaacagaaagaacattaattgcaagattaccttaagaactttggtaagaagaaagcacaagacagaggaaaagatcatatggagtaaagtcaatccaagaggataagggaaattaatttccttagatgacaaaacccactgcagcagagcaattcaaagacaaaaacgttagtcatgacgaaaagagagaaaccacaatctatgaatcgttacttgctacagattgtaaaacggtgaactctgatgcataagcaataacagagaggtcaaaagcaaacacaacacgatcaaacaaaagcaaacggatgttgaattctacacaaccgagggattctaaaatctgctagtcaacttcctagaaactagcacagtacattgcacataccagctcaattccttacgaaaactagcgatcggtttctacaaatcgaaagagcacaaaacaatacgatgcgagaacatagatccagggaaatatagattgtgagatttaaggtaaaccttattgaagaagatttgaccactagaaagagcgatatagagaagaatgtaagcataggtcacgaattcagctctcataaagcctttgctccgatccgccattgaaaccgattattatgatctcagattacggaataaaagttgtcgcttctggtttttatgtaacacttttccgagtgctttttgtttcttttccaatcgtcttctccttcactgagtatttcactttcccatcttctcaaatttcaacaacagctaaataagagcgacggtgacgactttaagtgggtcccactttttattatcctctctcattttatgggcttttctcacatttaaagcccaaatactgttgggtttataagctattgttatgtttcgtcaagcccatgaatttggttctacctcgcacacttttttttgtttcagtttcatcatccacccttggatatatgtccaatgaaaagaaatgaaaattattaagtattttttctcgagattgtgaacgataatatgaaagaaatgtaaggaacacacaagttgcttgtggattagaccacaacccatctgatatttgtccgcatctccacaaccattcttcacctccaacttctcatccatattataatccaacttgccaataattttttcaactgttacagattactacatcaacgaaatattaaacatttaaccatatataaaagttggagatatatgatataagcttttcttagcagtcccacccttcctctctcgagagagctccattccaatcaaagctgtgtaagattctgtgttctagaccaaacagagacgcgtctgtgttctggagattataaacatatgtctgataatcacaactgataactaactcggggttttttgctcttttgacagaaacacacttcagaagatggagatcactaacgttaccgagtatgatgcaatcgcaaaggcgaagttgcctaagatggtatatgactactatgcatctggtgcagaagatcaatggactcttcaagagaacagaaacgcttttgcaagaatcctgtgagtttttcttttcttaataagataagatacactttttgttattggttttcacaagagaactgagtttgatgtacataacttgggatgttttaacagcttccggcctcggattttgattgatgtgaacaaaattgatatggcgactaccgtcttggggttcaagatctcgatgccgatcatggttgctcctactgcctttcaaaagatggctcaccctgatggtaaaagacgtttttcttttttcctgaaacagtcatttctagagagttaaaacttgttttagtatcactagagacaaagactgaggcttactctaatggaaactaatgcaggggaatatgctacggctagagctgcgtctgctgctggaaccatcatggtatgttattatattcaaaagaagattttaaccgtcttggtgtttatagctgcttaatccaccaatccatgcataaccaagtttctggtttgagttattttcttccatgatgtttcagacactatcttcatgggctacttcaagtgttgaagaagttgcttccacagggccaggaatccgattcttccagctctatgtaagttgcttgatgaacaattctgatatacctgtggtcacacgtgatggttcacacgttatgattgttctgagtaggtatacaagaacaggaaggtggttgagcagctcgtgagaagagccgagaaagctgggttcaaagccattgctctcactgtagacaccccaaggctaggtcgcagagagtctgatatcaagaacaggtaaagccacatcaattgaaatgtgataagagttgattagactcgaatatgcaaacatatagctaaacaattatagagtaacgatgtgtgttcttctactacagattcactttgcctccaaacctgacattgaagaactttgaaggtcttgaccttggaaagatggacgaggcaagcatcgatcagatagtatccattacttaagtctgaatagtgtcaatgatc

SEQ ID NO: 418 - DNA, 84462 bp, Arabidopsis thaliana
gatcgctattatgaattcacttccaacagcttcccaagcttctttatagaactcagttgtgtaaccatctggaccgggcgatttatcacttggcatagaaaacagaactttttttatttctcatgtaaatcttccataccaataaagctgtatgctgcaaaatcatccattgcacctgagatatatccaaccttcatgtactcatcaaaggttgatacatgacccgtccgtgcccactttgctatctctaggtatgccttcacaaggatcttgagctgtgtgtatggactcaaagaactaatattaagagtctattaacctttttttttctttgtcaatcaagaatacactaagtcactaactgtatatatataatctctatatacaaatacaaatattgattaccttctctgttgattgtttcacgccgtaagatcttccttttggtctcatttctcgttcaatctctcctatgacctcaaacaaacttccgaggacgattcgtaaatagtctggtagttcatcactgacaccaatattccacctggtcataccaatatttttttccacgcttgcattaatttaaaagagaaagaaagagcatatacattgagagagagagagagagagagtacatctgcaaacattccgtaagagctgtaacttcgggaagagttgcagatgatgcatcatatgtatcatcaacaacaaccaccatcatcatgattttagtcacgatgattctcgcgagtgaatactgtggctcgaaatacgctgccacagacgccaagtgacactccacaagtctatccctaatgtaaggtaacttagatgcaagatctaagttcttccaccatctgaaaccatgcataaaagtaaatgaattggaaaaattgaaaccgagaccgatgttattaacaagatggaagaagagtatgtcacttggtgagagttttgagttcttggatgtaatgaaactggcaaaagttgaagttaagctttgcaaacttgagcaggatctggtcgtgaccatcttcttgttcgtagtaagatatatattctcttgccactagtacttctatgttacagtatcgaggtgcgtataatgagttttgtatctgcttcaagagatggggactagcactggatgcgctattacttgccaaagactccaagtggtaacgcgtgaaactcagcgcttcgtccattataacttcagagggtgttccgagatgcgccacttcgaacaactgtagcattcctttaacatctctggctagatgctccttgaacctcccatcatcacctctgaatctatcaaaggcgtctacaataaaaccgtatatatagccaatcatatatataagtaaacatatacataatatacgaattaatatgttgcatgcatgtatgcgattcaaggaaaatgatatactcttaccacaagacatcttgtgaccgtaaaatctaaagacctcaaaaatgttggagattgtttccaaatcatcttccccaactattatgtcttccaactttatgaaactttgtttaaggatctctcgaatctccttatcaaaatgataagagatcccaaggctgataagtaaatgaatgagacgaatcttctccttgtcgctgctgtgagaggatatgagcatgtctctcacgagcggcttcgtagtttcaatctctttttctagctctttaaactcctagaaaattaataataataaaataagtggctggtcaagcaagaatcatgtattctgctgcaagataagtgaatatagggtcatatcattcacttacagtgatgttgagggaaacagagagaaagtgatctccccaaagagagggagaaaagtgcgtcgaaggacgactaccttcaagatcattagaccgtacaacgaacaaattctgttttgtggggctccaagatagagtgtggctgtgaagcaaacggcgaggaaagagagagaggttgttcttaagacagagaggagatttgtgaaggtgaaataaagttctgtgaccaaaacccattcttgttgcttccatgttttatcacagtcgtcgagagggagagagagatagctattctgttttacttgaagtactctgttattaggttaggtttctatttcaaaaactacttcatatctgccggctgctgctcttattcccgttaagttaacaaaggaagctaaacatttttgtgtaaaaagtaaaaagtaataatattaaggaaatttatgtatacaagaaaatccgggaaaagtgggatactttatcacgttcgtattttcgaaaaatgtgttccctcctaagtcctaattttcaactaaattataatgcaagatccggaagttaatatacaaacacgatgtcgagaacaccatgacgccatcaaaattcaaattcgaattgagttaatgattttgggatgattttgttttctgaaatgtattgaaatcatgccttattggatatagtatttgttgaagttattagactattattaatggatcgatcatatataaaaatgttatgatcaaatgtcctgaaatttatactaatcacatactaagatttctaatagtaattctgcaaaattatctcaaatcattttaaatccgtctaaatctccacagatattttaaatattcatataaccaaaatcactaagccggtatagtcttttttttttaatgtaatgttaaattatattcaaatgaaaaatatcattattacaacaagtgcagctttggattgaaaacagctgaaaatctacaaatcaagagaggttaattgttggattcaaaccacagttgtagtcccttatcatatcgtcgatcgcccatctgtctttagtgatgatttggacacatacttcgatctctgcagctttacatatataatacatataatccagtgatgctttgtgatcacgtttgtattactccaagaaaggtgatgctttgtgattatctgctttgcgctaaaagtggatcctgagtctcttatcttcaatacgaatatgtgaagctgcagagatctctttcatctctatttaaggagatgttcccattgactttttagtgtcagcgttttttcagttcacttgaatttcttaacaacatctttaatcagggattctccatatcttaaatagttacgttctgcttcctagtaacttggaaatagaggttaaaaacaaaaacaatccctaaagctacactcttcaagttcgtctctatctctgcttctatatgtgatgcatctcagctcatactcaatacgtctagtccattaatttaactgcttttaacgttactatacagagcttaacaatatactaatcttatcttcggttattgttggacccatatgtgaaccgggaaaaatgggagggacaaagtcatacaatcatttaagttgatttatggagaatacaagctatcatgtttttcagttaaccggtcacctgacctgttcaatgtcttaagtgcattaaattgagtattccctcaaagttacgacataaccgtctttacgatcatgtcctgtaacaagaaccacatcgggtcaactgatctggtataggcctgtgtagatacggagattggtcttaagatagagaggcacactcttaacgtgagctagcttaagaatgaacaaattcaacatggttagaagttttacgagttaaccatgcaacaaaatgactttatattaaattaaaaattaagaatattttagatattcagtcttgaggcaggtaacagagtcataaatttcttcttagaattggtgtgtgttgcacgtcattatgaaaggggtattgggtggacgtacaaggaggtcataaagtgttcgattttgcctttgggttcactgtatccatcaccctccgtgtacatcacatcgaagaggcgtgcaaagttgaggcatcgcagcagaacctggcgtggcacatggtcatgtgagttcatgaactcctccataaccacttttttgttgttgctgtatattttacgcaactcttgggatgcttcttctttggtgactccatattgtttcatgtaacagttgagcccattagccacctctcctctgtttatctcggtctacaaatatcatttattcatgagaactaaaaaaacaaaaatcacaagaaaaccaaagacatccctatatttaatgtgccgtgtacctcgtaggttcctacgtcatttgctaaacggaacattacatttagcgcttggatgattaggggattggaactgagccactcaaaagcttccttttcactgacatcttccattcctataaagcaatatcctgcataaccatccatcccagctgtcaccaacccaactttcatgtactcatcaaaggatggtacgtcgcccgttcgtgcccactctgttaactgtttgtccgcctttgctacgttcttgaactgtgttttagaatccaagaactaattagattccactaactatacatatacattaattggcttcatattcagcttatttggctacattaccctttccaacacttgtttcacgccgtatgatcgtcctttcggtctcatttcttgttcaatctctcccataacttcaaacacactttcgaggactgttcgtaaatagtccggaagtttatcatcggcaccaatattcaacctggtcatgccaagatttttacacgattgaataaataaataaagaagaagaaagaggcatatatttatgaataaacacataaatatagcaagcacctctgcaaacattcggtaagaaccgcaacttcgggtacagttgcatgtgcatcataagtgtcatccacaacaaccatggtcatgatgattttagccactatgatcctcccaagagaatagtgtggctcgaagtacggccccaaacccccgagatggctctctacaagtctatccctaatgtaaggtaacttagatgcaagatctaggtccttccaccatctgcaaccataaaagtgactgaattggggaaattgaaaccgagactaatgtcatcaacaaaaagattggagatgagtatgtcacttggtgagagttttgagttcttggatataatgaaactggcaaaagttgaagttaagctttgcaaacttgagcaggatcttgttgtgaccttcttcttgttcgtagtaagatatatattctcttgccactagtacttctatgttacagtatcgaggtatgtataatgagttttgtatatgcttcaagagatggggagttgcaccggatacgttaccacctatccaagaatccaagtgattctgggcgaaactcgatgcttcgtccattatatcttcagagggtgttcctagatgcgcgacttcgaacaactgtagcattcctctaacatctttggctagactctccttgaacctcccatcttcacctctgaatctatcaaaggcatctacaataaaaccgtatagccaaattatatactgttaagtaattaaatacatatgtccttttatgaatatgctgcatgcatgcatgcgaatcaaggaaagtgatattcttaccacaagacatcttgtgaccgtatagtctaaagacctcaaacatgatggagattgtctccaaatcatcttccccaactattatgtcatccaactttgtgaaactgtgtttaaggatatcttgaatctccttatcaaaatgataagagctcccgaggctaacgagcaaatggattagacgaatcttctccttgtcgctgctttgagaagacatgagcatgtctttcaccagtggcttcatagtttcaatctctctttctagttcatcaaattcctagaaattgaagacaaaattggcttgtcaagaaccatgttttctgctacaagattcgagaaaaaaaagaagttcatatgaatgcacttacaccgcggtcgagggaaacagagagaaagtgatctccccaaagagagggagaaaagtacgttgaaggacgactaccctcaagatcatcactactctttgtagaccttacacataccaagtggtgtttttttgccggtttcaggggaagagtgtgcttttgaagcaaacgctgaggaaagagagagaggttggacgtgagacagagaggaacgttgtgaacgttaggaagaccaaaaaacgttcttgttgcgtccatgttgttactcttaactctgtttagagaagaagtaatatctagagaaactctgtttttaatgtttgatgtctatttcaaattactctgtttgattggacacatttgtgaaacatagggagagaaatgtcagatgttcattgaatttggttaaatggcttggaatccaagctatcatgttaatttacttcccatgtgcaaaaaactcgcaattgttgcttgcttccacactgctattgccgaaaacatacatatgatattgatatttagaggtgtactctgtttctaatgtttgatttccatttcaaactactctgttttattttgtttgggctggacacatatgtgagtgaacattaaaagcattcacaggcgcacatatgattgaattagttgagaatgttagacaatcatattaatcaatcatatttaatatgattgaattatgttgagaatgttagacaatcatttaatatgattgaattgattgagaatccaagcaatcaatgttcaatctctatctctatctcataattgcattaaattctttccaagttacgacaaagcagtgtttgtgagtatcaaggtctgctctgcaacaagaaccacatcgggtcaactgtggttttggtccggtacatacgaaggctgaggcacactttcaacatgagctggctttttgggttccgaaattcgttcttgcgaagcttcagtaaccaaaaaatacaaatctatattctctgtttttggttgaagtacattgtttactatagtaggagatctttcaaactctggttttaaataaagctaacctgcgctcacattttagttctgatttgtccgaatccttacgctaagatttagttcctatgagcaaaccgtattgatatttttccaacattacattattaagattcaaaaacataatacaacttgaaaacacatgagagagatgatcacacagcattgatgatttataaaaaacaagaccatagatccaagtaaaaggacttgttagaagattagatgcattgatcagtccatgaaaagtatcagttgtgtctgcaagcaatgtagctggcaagagccaccaaaggcgccgccttacttggatcaaaccctagaagctgttcctctgcttctctcctcagtttctctgcaacttccctggatccctccaaacctatcagccttggatacgtcagctttccggccattacgtcttttccggctgtcttacccaattcctcagtagattttgttacgtcgagaatgtcatcaacaacctgaaacagtagtccaatacacctagcatactttctaagcttttcgatttcttgctctgttccacctcccattataacccctaaaactgccgctgcctccaacaatgccgccgttttgtggagatggatgaactctagatgctccaatccaaccttgtctggattcaatctttcgctggctaggtctatcatttgtccagcaactagccctgtagtccctatggccctggccagctcaaccacggcgcgaatcatcttctcgggagcgaccaacccactcgacacaaccgtcatgtgctcaaacgccaatgcaaggagtgcatcacccgccaaaaccgccatgtcttctccatataccttgtttgagcaaaagttggttcaacactagttcagcattatctctgagccttcatataattaaacaacataccttgtgattggtgggcttgcctctacggaggtcggcattgtccatgcacggaagatcgtcatgaatgagagagcttgtgtggatcatctcgaccgcgcaagcggctgacatggcagtagcctcgtcgccccccacaagctcacaagcggcaatgcagagcagaggcctcacacgttttccgcccgctagcaaagagtacctgaccgcttcttggatagtaaggggtttcagaagcggtacggaaacgtcgagagccgcatttacagactcggctttgcggatcatatacaacttgaaatcaaaagcagagttgttatcgttgctttttccctctggttgaatcatgtgccctgcgtcttgtgaggtgagggcagaagagagagataaaacggtgcgttttcggagactcttgacggaagatatggagttgtctcttcttcctctggattggctgaagagggaggatgagctgagatgaacagtagtagccatggccgatccaagagtaattgtgtttgccaattaatagcatgtggagctcttaataggtttattggatttggaaatagtatgaattaaaaaatgcattatcttccaacaaagtagtatgaattacgggatgaataaacaaggttataatatttaaatgcaatatggttataagttttacgatccttacttccttagccatgagattttgaactttataaaaaatacgacatggttataagcgcacaacatgtggtaatcaaattttccaaattttaatattgttttaaaatttggttaaactactctgtttgaactttgaaccaagaaaaaagaaagataaagtactctgttttggttaaactatgtttgtatcgaagaactcgattttatgtttgatttctatttcgaaagcagtctctttgcactctatttttcgttaatctcgaaagaaaactcgttctcaagtttcagttccactcacctgaatcccacatatgtcattgacgaggctgaaacattaatgaatgtatcttatcttcgacttggtttcaatacacataggaaaatacttacaactttgataagtcttcaaagaggaattggtagtatgaattacggaatgaataaagaaggttagaatacaacatggttataagttttacgagtttacctttgttcagtcctttagtccatgactcatgagattgtgaactataaaatatgcaacatggctataatgtggcaatcaatacttgcgaattttgatactgtctaaaatattttcctatagaatattaataaactaaatttaattggaaaagtgattacattcaaaatctattagttttgattaaacgataaattatgtggtgaatttgctatacaactaaattggtgaataaaacttgcagaaaagacatggtgacatttttggtttcaggaagtcacaaaacaaccattcttgctactctcataagaatttttttttttgtagaaattatctgccttggcgtaacagtgaataaacagagaacccaaaaggctacacaacatcaccaaataggaaaaacggagtcagaaaatttcttcttaagagattattaaaaaagaaaaaagaagaagaagcaagggttaacttagaattggtgtgtgtagttcgacgtcattatgaaaggggtattgggtggacgtacaaggaggtcataaagtgttcgattttgcctttgggctcactgtatccatcaccctctgtgtatatcacatcgaagaggcgtgcaaagtttaggcatcgcagcagaacctggcgcggtacacggtcatgtgagttcatgaactcctccacaaccacttttttgttgtatatgtacattttacgcaactcacgggatgcttcttccttggtgactccatattgtttcatgtaacagttgagcccattagccacctctcctctgtttatctcggtctacaaatatcatttgttcatgaaagactaaaagaagaggaaaacagaaaccactagaaaaccaatgagatctctaagatttgcggtgtacctcgtaggttcctacgtcatttgctatacggaacagtacattcagagcgtcgatgagtaggggattggaattgagccactcaaaagcttccttctcattgatatcttccattcctataaagcaatatcctgcataatcacccatcccagctgtcaccaatccaaccttcatgtactcatcaaaggttggtacgtggcctttccgtgcccactctgtcaactgtttgtacgccttcgcaatgatcttgaactgatgtttggaatcaaagaactaattagagtccactaactatacatgtacattggttagtttcatgttcagcttatacattaccctttccaacacttgtttcacgctgtatgatcttcctttcggtgacatttcttgttcaatctctcccataacttcaaacacactttcgaggacgattctcaaatagcctgatagtttatcatcggcaccaatattcaacctggtcatgccaagatttttcacacgcttgaataaattttaaagatatgaataaacacacacacacatatatatagcacctctgaaaatattccgtaagaaccgtagcttcgggtatagttgcatgtgcatcatatgtgtcatccgcaacaacgattatcatgatggtcttagccactatgatcctcccaagagaatactgtggctcgaagtacggtcccagacccccgagatggctctctacagatctatccctaatgtaaggtagtttagatgcaagatctaagtccttccaccatctgcaaccataaaaagaaaatcaattgggagatcgagaccaatgttatgaacaaggttgaagatgagaatgtcacttggtgagagttttgatttcttggatgtaatgacactggcaaaagttgaagttaagttttgcaaactttagcaggatctcgttgtaaccttcttcttgttcgtagtaagatatatattctcttgctactagtacttctatgttacagtatcgaggtatgtacaatgagttttgtatatgcttcaagatgtggggacttgcactggatacgttaccacttgtcaaagactccaagtgattccgcgtaaacctcaatgcttcatccattatatcttcagagagtgttcctagatgcgcgacttcgaacaactgtagcattcctctaacatctttagctagactctctttaaacctcccatctccacctctgaatctatcaaaggcatctacaataataataataaagaaaaccgtatatccactataagtaattaaacatggttcatcaatgtatttatgtgaataaaggaaactgatatttttaccacaagacatcttatgaccgtatagcctaaagacctcaaacataatggagattgtttccaaatcatcttcctcaactattatgccatccaactttgtgaaactgtgtttaaggatatcttgaatctccttatcaaaatgataagagctcccgaggctaacgagcaaatggatgagacgaatcttctccttgtcgctgctttgagaagacatgagcatgtctttcaccagcggcttcatagtttcaatctctctttctagttcaacaaattcctagaaaatgaatacaaattggctagtcagtaaccatgttttctgcaacatgattcttgaaaaaaggctcatatgaatacacttacagcgtggtcgagggaaacagagagaaagtgatctccccaaagagaaggagaaaagtacgtcgaaggacgactagtctcaagatcatcactactcttagtagaccttacacataccaagtggtgtatctttaccggtttcagggaaagattgtgcttgtcaagcaaacgctgaggaatgagagagaggttgggcgtgagagagagaggaacgctaagaccaccaaaacccattcttgttgcttccatgttgttactgtaaaaaggataaagacgaaaaactatttagagaaactctgttcttaatgtttgcgctgatgcttcaaactttcaaatggctgatttgaataaaacaaaataaagtaactacgaatcgtaattagtggttttttttttttttttttatggttggacacatattgcgagggaaaatgtcagacgaagatttagtttgatttagtgggaaaatccaagctattattaaattctgtaatgtttgggttgggcacattagtgaacattaaaagcattcattagacaaatcatttaatatgactgaattatgttgagaatgttagacaatcatttaatatgattgaattaattgagaatccaagcaatcaatgttcaatctctatctctgactggcattaagttcgttccaagttacgatacagcagtgtttgtgaatatcatggtctgcattcaacaagaaccacatcgggtcaactgtggtttttgtctggaattcgttcttgctgctgcttcaataacaaaaattcagatctttatactctgttttgggtgaagaaaacccataagctaaacttgcgctcacgttttagttctgatcatctgaatccttacgctacgatttagttcctatgagcaaatcttattgatatttttcgaacattacattattaagattcaaaaacataatacaacttgaaaacaaatgagagagatgatcacacggcatagatgatttataagaaacaagaccatagatctaagtaaaaggacttgttaggagattgatgcattgaggatatgatcagtccattcagttgtgtctgcaagcgatgtagctagcaagagccaccagaggcgccgccttacttggatcaaaccctagaagttgttcctctgcttctctcctcagtttctctgcaacttcctttgatctctccaaacctatcagccttggatacgtcagctttccagccattacgtcttttcctgcagtctttcccaattcctcagtagattttgttacgtcgagaatgtcatcaaccacctgaaacagtagtccaatacacctagcatactttctaagcttttcgatctcttcctctgttccacctcccattataacccctaaaaccgccgctgcctccaacaatgccgccgttttgtggagatggatgaactctagatgctccaatccaaccttgtctggattcagtctttcgctggctaggtctatcatttgtccagcaactagccctgtagtccctatggccctggccagctcaaccaccgcgcgaatcatcctctcgggagcgaccaacccactcgacacaaccgtcatgtgctcaaacgccaatgcaaggagtgcatcacctgccaaaaccgccatgtcttctccatataccttgtttgagcaaaaattggtccaacacgagtgaatatttactaaaatcaatgaacgattcaaatctagtgagcatttctttgagcctttatatgatttaacaacataccttgtggttggtgggcttgcctctgcggaggtcggcattgtccatgcacggaagatcgtcatgaataagagagcttgtgtggatcatctcaaccgcgcaagcagctgacatggcagtagcctcgtcgcctcccacaagctcgcagacggcaatgcagagcagaggcctcacacgttttccgcccgctagcaatgagtaccgcacggcttcctggacagtgaggggttctcggagcggtacagaaacgtcgagagccgcatttacagattcggctttgcggatcatatacaacttgaaatcaaaagcagagttgtgatcattgcattttccctctggtggaatcatgtctctgccaccttgtgaggtgagggcagaagagggagacaaacctgtgcgttttttgagactcttgacggaagatatggagttgtctcttcttcctctggattggatgaagagggagaatgagctgagatgaacagtagtagccatggcctatccaccgtctctaatagaactttataaatgtggagctcttaataggtttttctttcttcttaataggtttcttgtagttggaagcaatgagggtcaacatcttcagcttcactgttattttgaattgtaatttctgcaaacaatatagtatgaatatttttcaattatgggatgaaaaagtaaacaatctatgtacatactttaacaaagtaagaagtttaaaataatgattagaataattgaatgcaaatcagatttcgtttaagtagtgataggaggaaattctaataaaaagattgacatcacaagtagagaaaatcaagtaccccaatttgtgaagtccgatcctagaacataatgattgtcttaacgtttatgccacttgatcagagtaagtgaaatacagagaattaattaagtacttacagttcataatcgatttgttctaggagaatatgtaagtgaattttgaactaacaagttacacgccatgctcatcttcacaattctgcagttcatagaagttagatcaatgcagccaaagcagatgttgtgacaaacacacactactgagagcacagagctttggatgaaacttttttcctaaagcatacatcttattaaaccaacgaagcgcctcctcatgctctccactgctgacaaacacagatactataacggtacagttgatattgtccttatttagctaacactaagaacaactccacaaatttagagaggactccttttcctagaaaatccatttggttatatttgccaaggaaaccacatctttcttctaaaaaaggttcataagcttcaaatatttggtcatgctcagactctagaggaaatggaagaaacgaacccaaaaatcttcccacaggctttaaacatgacagcaaaagtgcttcaattaactaaaacctcaacttgtctcaattatcagaaaacaaaccaaacccatctctgaaacaagcttcaatcatatatatagcagttcatgcaaccatatttttctcagggctcctctctggcttcaacaaaaaagttcccatcaaacagcaagctaatacgatctcagaattctcttctaccacaccctgaaaaaaagatgctaatagcctcgtttaatttgattattttcaaataaccacttatctaggcgttcgaagaaaccataaatattcccccttttacctaacgctaagtcacgtttttctcaggcatagaagcgaacaccacgtagtagtcttcctccgacatcgaactataacaagtttagttgtggttctctcaggcatttcatcgaacactttgtctgctttgatcatcttaccatttttcatacatcgcagcacaagtaattatatttcaaaacgacatacacctgaaagattcttccagatttgatattccagaggaaacgccacaagtataaacccatgtggttgaaatcgcccgcatgagttgattccacggaaaggcgggaaaatatcgagggtttctatcagcgcaaacgcaagcccgtcgtatatatagtaattaaagggtattttatctccatcatacgttaccgttacttcttaatttgtattagatccttaattaattaacttggtcaacaccatgcatattgacctgacatgtatatttatttattttgcttatgttctcaaaaaaagatttcaaatcgattattcatcttctcaaatgtttgtattaattaattagaagggaaaaaacacgaaatttctgtaataatagtttgatgcgtggtttgatattataagcttgtaaatgtttacaagacgactttaccataaactccgtatacttttagttttaagaatcaaaaaccatgttctattagatcactatatatgatataacccataaaataatttccgatataatttttgacaccatatcaacattaaaaactaaaaagtttttttgtcaaatatagtataggactctaggaggtaatccgacaaatatattggagaataattggagaagattaaagaagagcaaaagagaggtgtagacatgtgaaccgagcgataattgatgcgacgaagaaggagtgggtcggtccactataagaaccaccactcgtgctaaacgctatgatgcttcgaattggatctcatttattcggtcaaatcatttcttctccaacgtccaacacccacatgtgacacgtacgtaccttatcaagcatatcgtatacgaccccctaaattaaagtttcctttttgtatatctttatttatcaattttgtgtcggtacgtgtattgtgattgtgacatccatttgcattcttagcctgcatcatatttatttcaagcctatatacatggtagtgtcccgaaccgtttttattggcgtggtaattgttcatttgtacaaattataaaacttatgaaattgttatttattagtttgatttagacttttaatttattctaaagtagatatatatatatatatatatatatagcttttacaaatgctgagacatcacacacgaatttgattttagttctctagtctatgataactcataaaataactggatttctccattgattactaatcatatgaacttgtagaattttgatattttttcttaagatatccgaatcattccatttaatctattatacaaatgatgatggtttatgaattaaaaagatgatggcattggtgtgtgaattgaattttgacatttcatttaatttattctttcatatacaaatcaattcctcaagaataaaatcttccataaaataattactttatggatatgtttttttatagtagtggttttttctttgtctacatattatccgaagcatttaaaaaagttctccttataaaaattaaataattctacgtccgttgatttgttcctaaattaaatgcaaacacgagtaaagtagatgtctcggctttgtttctttgcctgtcctaaaaccatatctataagtgggttgtgcattgtaccaaacttgaaagatcttgcctatacgcatattccacttgtacatttggaatttgacattcaactaactttattattatataaacatgcccaagaattaatttcattcagtcatgtctcatcgatggtccattatcagttgttaggccaaaagctatactatcctattcttataatttattgttaactattattatcatcatcaatatcatcatatcacattacatatgatcacatgattggtcgtgtagtgtggggggacatcttctctcatacgccaatatgcctaattaattaattaacctttctctatatataagacgttagttttggctcaagccataacatatttccaaagttatatactatatttgatcttcttgaactctttctctcttctcacaaatggcgtctacgcaatatggttttgaacatcaaggcggcatggagattatcaacgatgagcttatcttgtcgtttttggaagaagaatcgcccgtcgaaaatcatagtagcatcaacaaagaggaagaagagaaactaaaccgtgtgattaggtcgctagaagtggagatcaacatgagttctccaaccatagaagctaggaaaatgaatatgcaacagacgatatccggtcttgaagatgattttgggtggcttaacgactttgatattggtatgatttcgttgcaaaatgatgatgagatgatgaattggtgtacggaactttcttacatggatggtgtggtagatagtggtgttcttgagattgaaggtggtgattattattctcatattaactatgcactcacatttgaggaaccaactctttctctatggcaagagaataatgatgtagttatgtattgattgatttcgtgaagtcataatataacaaaggctgtttcgtaatccgttaacccccaaaaaaagaaggaataagaggctgtttcattaatctttaacaaattaaaaggaaagaagaaagggaggctgttttaatcagttatctaatcttttaaattttatgtatgtattcgtaaatgttatgtatgttgacgttacatgtttttatatatatatatatatattatgattgttgagaaagcaataccaatatacatagaattattttaaaagattctcgtgattatcaagactagcatgcatcaagatgtaactgtagcggccggatgcaaacatatgaaagttcaaatgttttttgttttttgtttttaatgattaatgtttttacaaagtatattttaaccataatataacttgatgtaaaaaaacatgatcgtgctaattacggtaacttttaggaagtttttttttctccctttctatccaatgaatacccgttgacgatagccagaactacaaatttgtacattttgttgaatagaaatagtcgaatatttaaatggtataaaattaaaagaaatttgaaacgacattagccattgaattcccaccaaaatatttattggattttgttattcatgaatcatgattacataatggatgcatattcgcataattaatttatgataaaaaggggtagactctagaggcatgtccactgtcatatcaaatgatagtaacataacttacataagtgatcaaatgggctggtttatttgagactcttggtgtggaatgaatgaatttggttatagaatcttgaacgtaatcataatttctgagtgaaaatcatgtttattttcatagcaaaaaaaaaaaatcatgtttattgactttagaaatatacataacaacttcttttttttttttttggtaatgagagctttttttttgtcggcaacatgaaatacgggagtttggattcagatcgtgacacataaacaatatccgtacatagtgctgattggaggtgaaagtttttttttaataaaattttaaaccataagatattaaaaatttattggataaagatgatttgaaaactaaaaagggttaaagcatagtatattgatttgcttataaactgcataacataacataaggcccactttaaccaaaacataaggcccataagatatgggcttttgattaaacatagtggtggatatactcaaaagtccatttctatatatcaggcacagacatcagctcatcacactaaatagtgatacacacttttggttagtagttcgtaactagcatcaattaagcttcactacaggcctatcacctttttttttttcgggaggcctatcacctatgcattcattatacaccggttaatgtatagaaattaaattattgtttccagtacatcaattatccataaatctagtggctatttttagaatataggttgttgaataaataacgtaggagtaattttaagacaaacaataaaaatacaaaaagaaaacttgagtttggtggtgttttttaaaaaaagaattggttttgatttgtacaccaagttatttttgtatagtcctttagtatattcttagtgactaagaaatagatacaaatgcacatcaagtatatgctttatattccaattcattagaaaaagatttggctgctttacagtgaataaactttttcaatgttttttcttttcccatgcacgttgatggtgtagattaacaaacacttttttttttcccatcaacaaaactagtaaaactacatgtgccaaaatgcctgtttctgcttatcttattaactttcactttaattaagtatgtaatttgtttgtttcggagaaaaaagcttacttaattaaaaagctaagctttccaactttaatctttctgacatttaagaccaattatgcaaactaattaacacttccctctattgattgatttaatataataaataataaatctcaactttcttctatatgaatatgacaatgatttcaaggatttaatcacatcatgtactaataaaaatttggacctactacttacaagttacaattaggaatccaaattacatttcttccaaaatcgaggtttattattattttattttgtttgtatgtgaattaattaacccaattagactaataaaaaaagccggtcaatatttatatttcttccaaatatactatatcacctatttataaattactaaaagagctctatgacgtaactttaaatagcaaaaggctacagtaaagtgaaaataaattgtttcacatatccaacgatgaaaaaaaatgacaaaaaaataatcatggtttttttaaaacaaaaattcgccgcaaattctattactgtaaatcaagaattttatcatctatctaactcctaaatttttttaaaaagaatattttctaaaagttttctctagttattaaaatacatattgttattgttactgagaaataaataaatccatataataaattaacctatagttttccctctcaaaaaagaacggccaactaaataaaagaaagcaaaaagccaaaaagaggaaatcgcacccattcatcattctctcttcaaaaaattccgccatggaaactaacctcactaagcaatttcctctttatataactccttccttctccactcctctcttccctccttccgatgcttccctccaaaaccccaccgacgacctaatccctagaacacgaatcagcttaattcgtctgattctgattgattttctcccaaaacatgtctcacgaaatcgtccccgttgatcccattgatgttcctagcacgagttactcacggccaattctgggtcctcgtgaagattcgccggaacgtgctaccgagttcacgagatccctaacttttcgggaacatgtgtcgtcggagccttttgatagcgagaggcttccagcgacattagcttccgagattcagaggtttcttcgtattgctaacttggttgagtctgaggaacctcgaattgcttatctatgtgagttcactctctcctcttccctaattttgtaggtcaatatttcactgagtttttcttcgaaattcaagctttcttgttgaagaatcatacttgagtaccaatgttgaaattctgtcgctgcaggccgatttcatgctttcgagatagcccaccacatggatagaaactctaccggaagaggtgtacggcagttcaaaacttctcttcttcaaaggcttgaactggcaagtcatcaaacagatgagtagaaagtttttgaataagtcatgaaatttctaaaaaatcatcactttacttttgcaggatgaagagttcactgtgagaagaagaaaggagaagagtgatgttcgggaactcaaacgtgtttatcatgcttacaaggaatatattatcagacatggtgcagctttcaatttggataacaggtatctaatgactgtagctagttgaagttcaatttcagcgagctaacactaacctttggaatttttatcttgatagtcagcgagagaagttgattaacgcacgcagaattgcttctgttttgtatgaagttctcaagacagtcacaagtggcgctggcccgcaggttcttgtctaatctttttgtttctctccaccagaatctatataactttgcattgatttcaattttgcatgtctaacttgaaatatttttgttcctggtaggccattgcggatagagaaagtattcgagcaaaatctgaattttatgtgccgtataacattcttcctctcgataaaggaggggtacaccaagcaattatgcatctgcctgaggtataaagatacatggcctcattgggaaacagaattgttgccacttgcttattatgattttccattgtagtatagttatgtaactcagcatattgaaattttaatggtgaaatgttcctttatgtcctaaaatacagattaaagctgctgttgcaattgtacgtaacactcgcgggttgcctcctccagaggaatttcagagacaccagccttttctggatttatttgaatttctgcagtatgcctttgggttccaggtacttgtcaggaacttgctatcggtattgtaaagactgtaattacacatggtgaccagactttcaattttttttgctgctagaatggaaatgttgccaatcagagagagcatctgattctactactcagtaacaccattatacggcaaccacagaagcagtcttcagctccaaaggtgttgtattatttcgactctttattaattgattaagttctccatctttgaaactgacattatcttaattttttgtaaccagtctggtgatgaggcagtagatgcattgatgaagaagttttttaagaactacacgaactggtgcaaatttcttgggagaaaaaataacattaggtaatttttcatcttttcactttcgatgtttttcatctctttagcccatttatttctaactgttccgtctcacgatctacctgcaggttgccctatgtgaaacaggaagccctacaatataaaacattgtatataggactctaccttctcatatggggagaggcgtcgaacttgaggttcatgccagagtgcctgtgttatattttccaccacgtaagtggaaaattctgtttctatgttattaatacatcttcttagaaagttcatcagtcagtctgatcaatattcacaatgttgatgttgatggtaattcagatggcatatgaattgcatggagttttaaccggtgcagttagtatgataactggggagaaggttgctccagcatatggtggaggacacgaatctttccttgcggatgtagttactcccatatacatggttgtccaaaaggtgaatttctgtttgaggaagtgcttgaattaactttaaagtgagtagtcaattgtatagtatatgcctgcaggaagctgagaagaataagaatggaactgctgatcattctatgtggagaaactacgatgatctgaacgagttcttctggtcagaatattcaccatattacatctctttgctaccatatctgtgtttaaaagccgtgaacatcactaatcagttttttacgtcttccacaggtctcttgaatgcttcgaaataggttggccaatgcgtcccgagcacgattttttctgtgtagaatcatcagaaaccagtaaaccagggagatggcgaggaatgcttagatttcgcaagcagacaaagaaaacggatgaagaaatagaggatgacgaagaacttggggtacatgtttttgtaactcatggatctcttcccctgattatgcatttgcatatacacactaagtaacctaaagaataatggaagctttattcatcagtagcctgttcatttgtgtcatagcagtatggtgttcctagcttgttcaagagactacggagcatattatcgcttaatatctaagtaagcacactattaaaattggtcaattggcgtgtgaacggcttccaaagtcagaattcagaaagaacaataaatggggtcgtcagtaggactaacattcttaggttcagcaaattgcattgcttttgaattcataacaaattctcttgtatgtttcaaaacgctacatagttatatatctcatgtgatcttctcgtcactgcaggttctcagtgaggaacaacctaaaccaacctcaagatggctggggaagacaaattttgtagagactcgttccttttggcagatattccggagctttgacagaatgtggagtttctttgttttgtccctacaggttcttcttctgctttttcatcattcaaattacattcccagtagatttgcaaatgatgaatttcctatttctctttcaggcattgataattatggcttgtcatgatgtgggatctccactccaagtgtttaatgctaatatattcgaagacgtcatgagcattttcattacctcagcaattctaaagcttataaaaggttatcagccatttcttcaaaattaaacgtaagatacaatacttactgctaacattttatggggattgttgcaggtattcttgacataatcttcaagtggaaagcaagaaacacaatgccgatcaatgaaaagaagaagcggttggtgaagttgggctttgctgcgatgtggactattattctaccagtgctgtattctcattcaagaaggaaatacatttgttatttcacaaattacaaaacctggcttggtgaatggtgtttttctccatacatggtggcagtcacgatatacctgacaggaagtgcaattgagttggtcttgtttttcgttcctgccatcagcaaatacattgagacctccaatcatggcatctttaaaactttgtcttggtggggacaggtacttaaatctcagaaactccacatttttgagcaaatttctcacggttgagcatgaaagcacattaatgtttcgaacaatgttttcagttagtctgttttacttttggtgcatttcaaactcactttacaagttaccatccgattactttctaagctgctagccgatttgtttgcagcctaggttatatgttgggcgaggaatgcaagaaactcaggtgtcacaattcaagtatgccccgagccaaatttcctctatatttgtttagttagtctagtcatttctatttttctgtggtttttatttttatttctgttcagatacactttcttctggattctggttctcctgaccaagtttgctttcagctatgcatttgaggtaacgaactgatgtattttccagataggtgctactgatacctgatgttgtatgtgttgagttcaaacagtttcttacattttcatgatctggaaattcagataaagcctctaatagaacctacacgactgataatgaaagttggtgtgcggaattatgaatggcatgaaattttcccagaaggtttactcttatactttattttttctcttctgttgtaaattatgtattgcagcacactaaagaactttttgttttctccttttatagtgaagagtaatgctgctgcaattgttgcagtatgggcgccaataatggtggtgagttctcagtaggtgaatttccatccccatgcataccttcaattctgagacaaatgctaaactttcaggtctatttcatggatacacaaatatggtattcagtttactgtacgatctttggtggactgtatggtgttctgcaccaccttggtgaggtaagcacatgtttctgctatgcgtgagttgtcattttttgcattttcctgccaggtgtgctgtttccagagttaacatgttcctctatttcttttcagattcgaactttaggcatgttgagaggccggtttcatactttaccttcagctttcaatgcatcccttattccacactcaacaaaagatgagaaaaggagaaaacaaagaggttttttccccttcaatttaggcagggtaagagattgtgtgaatcgaccatgtgtatatgcccaaagactaaactatacatcttttaatgagctggactatatatgagtttcataaaaaagtcgtgtactttgctttgcaggggtctgatggccagaaaaatagtatggccaagtttgtcttggtctggaaccaagtcattaacagtttcagaacagaagatctgataagtaacaagtaaattgctcccttctgtattgcttgcatgtaaagttctgagtcagaaacttctgacatataaacatagctaataagtgtatatttttatcttcagggaattagatttgatgacgatgccgctgtcatcggaggtattatcaggaatcatccgttggcccattttcctccttgcaaataaggtacattttaaaatattttctacacaattgttttggtggaacttcggtttgttggtaaatatagctgccccatcttactagttttcaacagctctgagcattgcaaaagattttgtcgggaaggatgaggttctctatcgaaggattcggaaagacgagtacatgtactacgcagtaaaagagtgctatgaatctttgaagtacattcttcagattcttgttgttggtgatcttgagaaaaagtaatgccttctagtagcctcctctagttacaacttttgctttttttctgctggctgcggtatttaatttatatatttgatattggctcaggattatatctggtataataaacgagatagaggaaagcatcagacagtcaagtttgcttgaagaatttaagatggctgagctcccagcgttgcatgacaaatgtattgagctggttcaactcctggtaattatcttgtggcgttgtgtcagctgttttcttataaatgtagtagttccaatgggtatttttaatacgtaagttcttctgtacattccaggttgagggaagtgccgagcaactccaggttgagaaaagcgaagaactgcatggtaaacttgtaaaggctcttcaggatatctttgagctagtaacaaatgatatgatggtacatggtgacaggttagtgaatttcgaagttatgaaacccctgttgcttttagttctctttctgtgaaggattgaacaggctaaacttccttaataattcttcgaatgtttagaattctggatttgctccagtctcgggaggggtcaggagaagacacaggtatttttatgagggttatagaaccacagttgtttgaatcctacggagaatggagatgcattcattttccgctgccagatagtgcttcattgagtgaacaggtaccatatgagcgtgctgcaatgtgttcttaaatgatccaaccctgcgaaaatgctgcactgtgctgatatttctatgttggttttgtcagatccagcgttttctgttattgttaactgtcaaagatagtgcaatggacataccagagaacttagatgctcggcggcgcctatctttctttgctacttcgcttttcatggatatgcccgatgctccgaaagtacgcaatatgatgtcattcaggtctgccttcacgactttaccttaaaaagatatacaaattattactttagtctctaggaaactagaaaaggagtacatgcttggatcatcaattgatgactaacactttggttgcagtgttttgacaccgcattatcaggaggatattaactattcaacgaacgaactacattccaccaagtctagtgtgtcaatcatcttttatatgcagaagatttttccaggtaagtcacaatacgtgttcattttgatttgtgactgtcttctctgtttgtgtttcaaggttctaatttttgaattgttagatgagtggaaaaactttcttgagcgaatgggatgtgataatttagacgccttaaagaaagagggtaaagaagaagagcttcgaaactgggcatcatttcgtggacaaacattgagtagaacaggtgagacgaataagtgtatgtgaaaattgtctaattgacccttatcacactttgatagcgaactaacaaaattttgttttgttttcatggttaatacagttcgtggtatgatgtattgccgagaagctctgaaattgcaagccttccttgacatggcagatgacgagggtttgtcagcttgattctagcctatgatctttgcaatttctttggttgattccaatatactcctgtttctcctctagatattcttgaaggatacaaggacgtggaacgaagtaacagacctttagccgcacaacttgatgcattggcagatatgaaattcacgtatgttgtttcttgccaaatgtttggagcccaaaaatcatctggggatcctcacgcgcaggatatacttgacctgatgataaagtaagcttttaaaattgtacatgatctcagttagatttagtagccaaagttgtacatgcttccctaaagcactgttacatgactgttgcacttaggtatccatctctccgtgttgcatacgttgaggagagggaagaaatcgtgttggatgttccaaagaaggtttactactctatattggtaaaagctgttaacggtttcgatcaggtatcaataactttcctacaatgcttgataatttgatgtacaagttgaactgtaaaatcatagtaacagtcgatgaccaaacttgattttgataatctaggaaatttaccgtgtcaaacttcctggaccacctaacattggagagggaaagcctgagaatcaaaatcacgccatagttttcactcgaggtgaagcacttcagacgatcgacatgaaccaagtaagttttctgcctcttggatttacaatataattaatgaaccgcctttgtgtcttctaaacttctgacataaatgataggatcactacctggaagaggctttcaaaatgagaaatctccttcaagaatttcttcgaaaccgtggaagaagacctccaacaattcttggtttaagggaacacatattcaccggaaggtttgttccacacatgcatacatgcatataaataccattctccccgtaacaaccagaacatggtatatctcataaacatggaatttactgagtttctgatattgcagtgtttcttctctagcatggttcatgtcatatcaagaaaccagttttgtcacaatcggtcaaaggcttcttgctaatcctctcaggcaataacccttaagtcctaaacccacaaaatcacagtttccacttgctgcggctacaaaaacctaactttttttttcactgatttatagagtccggtttcactatgggcatccagatgtcttcgacagaatatttcacataacaaggggtggcatcagtaaatcatcgagaactattaacttaagcgaggacgttttcgcaggtatgaaatcacatattaaagagttgtctcagcgatttcataagatttacttgtaattacattcttctttgtattatgtaggttataatactaccttacgacgtggatgcataacctacaatgagtacctccaagttggaaaaggtcgtgatgttggcctcaatcaaatctcaaagtttgaggccaaggtggctaacggaaacagtgaacagactattagccgtgacatataccgtttaggacaacgttttgatttcttcagaatgttgtcttgttatttcacaaccattggattctacttcagtagcttggtaacgttcataaaactttagctgaataattgtttcagttgtagatgagctctaatttcttttgacgtgtgtacagatttccgtgatcgggatttatatttatctctatggtcaactctacctcgtactcagtgggttgcagaagacgcttattcttgaggccaaggtgaaaaacataaaatcattggaaacagcccttgcctctcaatcatttatccagctaggtctcttgaccggtctaccaatggtgatggagattgggttggagaaaggatttcttatagcctttcaagatttcatactcatgcagctacagcttgctgcattcttcttcactttctctctaggaactaaaacgcattactttggcagaacaattctccatggaggtgccaaatacagacccacagggcgtaaagtagtggtgttccatgccaacttcagtgaaaattacagattatattctcgaagccatttcatcaaaggttttgagctcatgattcttctggtcgtctacgagttgttcaagcatacatctcaaagcaacatggcttactcattcatcactttctcagtgtggttcatgtcttttacttggttatgcgccccgtttctcttcaacccttcaggctttacctgggaaataatagtcggtgactggagagactggaacaggtggatcaaagagcaaggtggaatagggattcagcaagacaagagctggcaatcttggtggaacgacgagcaagcccatctacgtggctctggtgttggagctcgctgtttggagataattttgtccctcaggttctttgtgtatcagtatggtttggtatatcaccttgacattacccaaagcaacacaaatatcatagtctacgcgctttcttgggtcgtgattctcgccacattcttcacagtcaaggtaaaatctctctttctcttgctgtgaataataagaagatgcataaaaacagaaccaaactcaagctaaacaatattttctgttttctctcgcaggcagtagacctaggaagacaactcttcagcacaagaaagcatctcgtgtttcggttcttcaaagtcttcgtcttcgtgagcatacttacaatcataatcactctagcaaacatctgtcacctctctgtcaaggaccttctagtctcttgcttagctttcttgcccactggttggggtctgattctggtaccacaaatgaatctacctctcactgtttctaaaaagaatatcacatttactttcttatgacatcccttaaatcgttgttgcagattgcacaagcggttaggccaaagatagaaggaacgagcttatgggagttcacacaggttcttgctcgagcttatgattatggaatgggcgttgttctgtttgcaccaatggctatcttagcatggcttcctattatttctgcgtttcagactcgttttctattcaacgaagcttttaacagaagacttcaaattcaacctattcttgcagggaagaagaagaatcgatgaacatattcctcttttctttcttccactcttctgcttttgtacatgttgtaactatttcacttattatttgctctgtacaaaaatccggttcataccaaatatatcactgttgttcaacatagtgaattaggagtcttgtacattaaaaccgctccgaaccaaagtggaatcctaattgctgctacaacttggaagcgaatcaaaatgttcggtacatttgtcttgtaaaccggaactaaaccacaatttaatcaaacaaactttctgaaccgaaatatctgaatactttaaccacttggtttaatttcttcttggaccgttttggtttcaaaatcatatttatacagttactagttcaagagtttgtgtagcaaaaacaaacaatgattcttcggaggcttgttctgtctgcaacatcgaattcaaatcccagaagaagccaatcactttcatcttctggtgttcgtattctctcatcatcatcttcagatagatatacgtcgtcctcgcaacgatattccggtgacgatagactcgccaggctaaggcacaaggactggttagccccaaacgaagttttgaaaatcttcgacaatgtcaaagatccgagcttcctgctgccagcttaccagcattactctaaacggaaagactatcaaccaacggaatctctctacgcccttatgatcaacaagtttggccaagctaaaatgtacgatgaaatcgaagaagtaatgagaactataaagcttgagaaaagatgtcgtttctcagaggagtttttctacaatttgatgaggatttacgggaacttagccggaagaatcaaccgagcgatcgagatattgttcggtatgccggattttggatgctggccaagttctaagagtttcaatttcatactgaatttacttgtttccgcgaagttgttcgatgagattcataagatctttgtgagtgctcctaagctaggtgttgagatcgatgcttgttgcttgaatatactcatcaaaggactctgtgagagtgggaatttagaagctgcactccaactgctcgacgaatttcctcaacaaaaatcacggcctaatgtgatgacgttttctcctttgattcgtggtttctgtaataagggaaagttcgaagaagcttttaaattgttggagaggatggagaaggaacgaatcgaaccagatactatcacgtttaacattttgatttcagggcttaggaagaaaggtagagttgaagaagggattgatcttttagagagaatgaaggtaaaggggtgtgaaccaaatcctgggacttatcaggaggtgttgtatggtctcttggataaaaagaggaacttggaagctaaagagatgatgagtcagatgatttcatggggtatgagacccagttttctgtcttacaagaagatggttttggggctttgtgaaacgaagtcggttgtggaaatggactgggttttgaggcaaatggtgaatcatggttttgttccaaagacattgatgtggtggaaagttgttcagtgtgttgtttcaaagaacaatgatgactctcaagcaaatttggatcgtattactgcttgctaggaaactcctggttaaggtttttatacattctgctgtattgtttaaaagatagaacatgctgagcactgaagctgtctgatcttcaagtagaagaaaacagaagaagcaaacagattctcgaaagtaagacgaagactcaaaactaaaaagctgtacaagagtcctttggagtacatctacaactaacaaaatcaaatttttcatcctcaagcttctgattatttacctatgattccttttcgattcttgggggtggtgactttctcggctccagcaaaagagttcctggcatcactatatgtagtttccaagtttgctaaatttttctttgtttccttgtttttcgaatcgtctttggagttcgcggatgtatttacattatcatcttcacctgccttgacagtctttccttcaagttttgctcttcttagtgtccccaggtcctgcacattgctaaatgcagatttgtcatcagaagtttcacttagacattcagagtcttgctctgacacagttgaacactcgtcatctcttgatttccttgatcctttatgcgaaaaagcatgcttaaggtgtcttgcagacttttcagcatgttttagaatgctttttgcaacatccttcatgtgtctcttgtgctgactgtcttcagaatcaaagctctcaccttttggacttcttcctgtgagaggccccgatagcctgtcttcaacgatgaacttaactccaacatccttttgatttaacgccttcaaattaatccgaggagacctgatatcctcttcaatgctccctgtatgatgacattcttccttttttccattcttatggaacactaaaccgattttcttcagcccccaaccaacagacttcatctcgctcttcccttcctgatttttatcagtgctgctgctttcattgttgggcgacgtagatgcagtggaacggacactgccagcgcactgtattttgttatcaaggcatcgactcttgccttttcttggttcccaaatctgtgagacttcagttcctggttgatgtacccaaatcccagtctcttcttgtccttcgatgtttattggttccatattatcaggaacccttggagacttgtcagataccactgatgagaaggaacctttatttgtaacgtcggaagcaaaagaagcccacatgtcttccttacatattgtcactccttcaaacggatcatcgttcaactgtaaaagaatgcatattgcataagagttgatcatgaaactcttacgttaaagaaaactaaacagaagaaactcaatctacctttgcctcgtcctcaagtacggttatagcaaggtgcaatctccccattttaatgttctgaagaggcaaccacatatcatttctttggccgcctcgaaactctgcaatgttcactgaacagtcgccaagactgtcatcgctaaatcggtctttgtcttgaacttcaatgttaagaatatttgcggagtcccatgtgcagattggtatcttgaactcttcttgccatttgggagccaaggttttccatagtatcttggttttgaatctgtaagcgccaagctgccctttcacgtaaggatcagctaaacctgaagcatccaaaaccaagaagttcataaaacgtagttcaaactactaaagcggaggaaaataactccctgtgatttccagactaaccgtttagatctgatggtttaacatcacatgcttcaacgacttcaacaagagcgtgtgctactggttctttctcatcaacaaagaaccaattatctggaacaaacacagacaaagaaggtactcatatggactgattggatgaaggtttaagaagtttgaggaaccaataaaaagaagtacaagatagaagtcatggattgtgagcatctcctgcaatagttacctcctgactctgggctaacaaatttctccatatcaactaccagcatatttggctgcaaaattagacacaagcttcatgtagctagagtaattgtaatgcagtgtttgcttaactacagaggggattaatccagagcatccgaagagaaaggcgacaaacaacaagaatcttacctcaacaagagtctgctcaaatgcaacagacaaaagtttgtcctgattgagaaagaaagatattggttggagtgttagaagaggaaaaactcaaaaaatccagagaaagctcatcaggcgtcagtacttactagccatcctgcaatccctggaagcacagcaacatcaagtccatgagtggtaattggtttaacagtcatttggaaataaggtggctctgcaaaacacactcgtaaacgcccgagaaaaggccatcgacgaaggaacttcactccaatcaacaccttcaatagttaaagataccgatatgaagtaagatacttcattgaaggaagcgtgtaagtgaagctgcagaaaagaaaatgcactacctttccttcaacatgcattcctgtcaaatgcaactttgtccacattccaaacccaagtctttttcttaacttcacagcgagtattgcgctcatatcatctgctgtgaggaaattcattccaagttccagtacctgtacacactccaatataagttatactttctctatagaacttagagcttatagaactgaaattgtgcaactataccaagtgatcatcacccgtagattgccgtagaaccctaatatctgtcaacaaaggagggtttcttcccaaataaaggtgttgtatcacaacttttttctgcacaaattatcattccatcaatactaagtcggtttttcgactgtaaactgagctacagttagtggcctagctagtactactacaaagggctaactagacacaaaacgaaactggaaagactcaaaatttgaaagagttaccgcagtccaaggtctatacttgtccaagaaccaaggtatgatcggacgaagaatcttctgagaagcaatctgttccatacaaataggccatatcctctccacggcatgattcaaccaccgcaccgattcagaatcagatagaacctacaaagttgtatttaaaaaataaaaataaaaaaagattaccatttcatgcaaacaaaggtaaagtcagtatcttccaatacaagattgagaagaaccctagaacttgaacaaatgtatacacaaagcaacttaaagtcttaaacaacaaagtagaaaattacacgtctctggttagcttgcttcctctcttcaaactgcaatttcttcctcaatctcatcacatagcgttcatgaacctaaaagaaacccaccaaaacaatatttttcaccaaatccaataaaaattgaagctttaacatctaaaagaaacatttctccagagaaggaacaacacaccaggtaaagataaacgagagagaggacatagaaaaccgcgtgtgatcgattcaagtaagatagaacccaaagtaacagtaacacaatcaccacatgatggattaccgaacactccattattattatacttcctttggttacaaaacccagaagtgaacaacaaactagtccaaagattcttgcttttttttcttaaatccaaaggatcaaacaacaatctcatgaaacaaaaccatccgaaacgagtcgcacttcatgtgtgttggttaggaaaggacaaagaaacaagtaataagatgatttcagtttttgtttgttctcgtggattttgattagttagttcagagaaaaagacacagagacagaaccaaagaaaaaaaaaacatttcgatctaaatttactctgttttcttccgcgaagccaaagaaaaacgctgtcgttttttgaaaagcgaaacgcgtcaaccgcctgaaagagtgcaaacgtgtcagacacgtgtgaggagacaaggataaaggtcccactccaatgtcattgttcaattaatcgtgaattagacgatcctatccgttcatttttaaaagcattgatctgatggacggcttacaatttgacttgtttcatataatctcatctccatagaatatctacttttattagataacaatagctatctattctacattttatattaaaaataatgaaataattccactaaatggtcaacaaataatttaatattaaatgttattctaatctattgttatgtagaagaacaagtgggatatttttctatattcatctctctctttatctcttttattatataatcaaatatttttttgaacttgcataatcaaatattatgcatctcttatttgaacccaaaataaaaatgaaaatatgcaaattagaggtgcatgtcacttgttttaatagagaagaaaattgtcttttttaaaagtgaaaaattgaactaaaaagagtataatttataaggtgaataatagtggaaggtgcagtgtcaattgagaaagccattgcgactgtgacataaacattaaagccaatatgattaaacgatatatagttagagaatatagatacaagaaagaaattgaacaaaaaatttcatttccgtcggtgtttgtttttatatttaggaaaaaaaaagagaagcgaatgtttcccctgggattacgcaaatatcaaagattattataggaaaatctggttgaggaaagctgactaaccaccacataaaaagccacgtggcacatgcacttcccctagaaatacgaaactttaataagaagcatccagcaaaaccgaaatcttggttcaccaccgtctccagatcaaagaaaacagagaaacatctgtttttttgtttagtttgatctgttgagagatgacgagcggtggcgacgataaaaacagatctgtggtgacagatcatcaacatcaacaacagcctcctcctccgtttcaaggcgtctctaactatccaccgcagcagcagcctcccgccaccggttatcctcagcctgctcagccctacgcccaaggtttctttctttcctcatctctcattatatggacaacatcatcaaagctgtcgttttgttttgttttgtgttttgtttggtatagaagcttcattttattcttgatccattatatcgaagatcctttttgatcaactttttacctcatctaagatgctaagattcgcattggattaaaatttgattatttgaaaattcgagtgatccagtaattagagagaaattgtatattgcctcttctatgatataaatcaagatgctagattcacttgagaataatgacatgaagaaatgaatcttttttataaaaaaaaaaatcaggtttttgaaatagataatgcaaatagaaggttctcttttggcgtttacgtcttacaatttgacaaatgatttttttgcttagtattttgaacattgtggattcatttggaaacaaacatcagaatctcttatctcatctgccaaaatttctagctaaactgtagtttctcaaaaggattgtatcattattgcaacgtacacacaccacttggctgttctaaagctcgttttggttatctctagttttcatcaactatagtctttggtcgcaggttatgttgttaatggagtaagaccaacagaacacggtcgttgttgcggtatcggcattggctgggtattgtaagtgatctttatcatttatttttacctaacttctcttctcattacattcttgataatttttgagagttttttttggtttgatgtgtcttgaagattcatccttggtttcttcttcgctttgccctggtacatcggtttcttccttctattattctctaggaacccgcgtgagagaccaggatatatagcttgcgcagttggggtaagtccactactctatatatctctctcactcaacaagaaccatttctcttttctttatcacaaatataaatcaattctgactaacccttccttttcgcaggctgtttttgctaccattatcgtcatctttggaaccgtaagaggatcaggggtgtggtcatgaaggtgaagatgtcaacaatctgaatccgttgagattttgtttcagaagaagatcgatccataatgtttgtttacataatgtgtattgtctctagattacaaaacagtactgtatatgtttctttgaaaagttcttcttctgaaaacatactagtgtttgcattttcaaagaattttttttatataaaaaatttgcatttgtttagatgatacgaattcaaatgaatctgattataagctcatttagtaaatgtgtttgacctgaaccactgactcataaaaacacttgagctcatttgaccggcgacagtaaaaaagtaaatttaatttacccgatttacccgctgcaaatatttttgtaacgccaatgtaatgagaagaataattaaaggcccaagtaggaaaaagaaaagcccacagagacggcccctagggtttgtcctttagagaaacctcttttatagttttctcatgagcgccaccgtttagctcttttctctctgttttgctcttggctgattcgttggagcttgatctctccgtggaaatgggtggtttccgggtaagttacttctttagtctgtgtataggatacgtgattctgggtatttggacttctgaagatttgatttggagaatcatcaactgtgctcggtcggggatagtgtattataaggataaataggttctgattcgcttagaaagtatgaaactttttctatgtgcatccgttaaattaatatgaatttgaagtgtttatttccggatttggtttgttctgtatgaatctctaggatgattgttttagtgcttaatgtcttctaaaatgatcattgtgaatcattttaagcttcattagctatccttaggcccagagatcggtgttgtcttgtgactcactgagagagttgatatgatgtaaggattagggtctggtgctgtttaaggttttaccaaagctgatatttttgttggtttgtgattaattgattcaatgtacattgcagtttcaccagtatcaggtggttgggagagccctcccgacagagaacgatgagcaccctaagatctacaggatgaagctttggggtagaaatgaagtatgcgccaagtccaagttctggtgagccattcgatttgataccagtttgttaatgtaaactccattttgtcttgtttatttcctgatctaaaatggatttgctcgttgtatctaggtacttcatgaggaaactgaagaaggtgaagaaaagcaacggacagatgcttgccatcaatgaggtatggattgcattttacttagatatcttagatatgctgaaagatggctacttgtatctgatcttgttgttctactttattatagattttcgagaagaacccaacgaccatcaagaactacgggatctggttgcgttatcagagccgaactgggtaccacaacatgtacaaggagtaccgtgacacaacactcaatggtggagtggagcagatgtacactgagatggcttctcgtcatagagtgaggttcccttgcattcagatcatcaagactgcgactgtccctgcaaagctttgcaagagagagatcaccaagcagttccataactcgaagatcaagttccctcttgttttcaggaaggtcagaccaccaagcaggaagcttaagactacatacaaggcatcaaaacctaaccttttcatgtagaagcaaccgacatgattctcatcagaataggcttcttgttcctagtctgaacaaaacactggagttatcttcttttgaacatttttcaactttttttttgttctagatatgatacaatattaaggtgactcatctccaattttcgtcagtttccaaagttttgctgctttagtgtaatgttgcagaaagttcaaaactgtactatctcccactatcataaaccaatctgctttgtatgccaacgaccactaaactagcaacacttcattctcattcttgtatgaaactattctcgcaattccataaatgtcttcatctgcagtctggtttatgctacatgtccccggagctctcggcgtctgacacacacttcacccaaaaaggattgagagcagttcaattcatcatgctcagtggatcacttttcatgatttatcgattaaaaaaattgcaagtagacgagaacagatggaaaactcttacacgcaagtacacagaaaaagccccttttccggcaaaggatttggagtgtaacttgtataatcaaaactccagtgacagccaaaaagtctcaatctttataaagacccacaaaaacttgcggactccagagtgagtgtgagaatcggagatgtctttttcagtagtagcagctttaccggtgcttgtagcagtagtggtactgtggacatggcggatcgtgaagtgggtctggataaaaccaaagatgcttgagagttctttgaaaagacagggtcttaccggaactccttacactcctctcgtcggagatataaagaggaatgttgatatgatgatggaagcgagatctaaacccatcaatgtaacggatgatatcaccccacgtctccttcctcttgccttaaagatgctcaattctcacggtatagtgtcttttctttctttgtttcagcagagttgggaagtgaattgtgtagaatttagtttgacttgagatctctgttaggttgaattgttggtgcttgattgagttatgttggtggaacaggaaagactttcttcatatggattggaccacttccaacgattgtgataacgaatcctgagcagatcaaggaagtctttaataaagtcaacgactttgagaaagcttctacattccctttgatcagattgttagcaggtgggcttgcaagttacaagggagataaatgggcgagtcacaggaggatcatcaacccggcttttcacctcgaaaaaatcaaggttttggtttttttctgttgtttgaattacgttagactgtgcatatgtgtgtgtgatcgtttagtaaccttttgtttggtttacagaacatgatccctgcgttctaccattgttgcagcgaggttgtctgtcaatgggagaagctatttacagataaagaatcgcctcttgaagtcgatgtttggccttggcttgtgaatatgactgcggatgtcatctcacatactgcttttggaagtagctataaagaagggcagagaatatttcaactacaaggggaattggctgagcttatcgcacaagcttttaagaaatcttacatccctggatcgaggtaaaaccacgatctccattgtctctttgttctgttgcaaactaaagattttgagaatttgttgtttggtgtaggttttacccaacaaagagcaatagaaggatgaaagcaatagatagagaagtagacgtaatattgagaggtattgtgagcaaacgggagaaagcgagagaagctggagaaccagcaaacgatgatttgttggggatattgcttgaatccaattcagaggaatctcaaggaaatggaatgagcgtagaagatgtgatgaaagagtgcaagttgttttatttcgcgggacaagagacaacttcagtacttttggtgtggactatggttttattaagccatcaccaagactggcaagctcgcgcacgagaggaagtgatgcaagtactcggtgaaaataataaacctgatatggagtcccttaacaaccttaaagtcgtaagtgaagaaaacacaactttcaccattctcgtccatctaacaactgcgtttatagttaacaaagtcagttaaatttcaactgaaaggttgtctttgaatgttttttcaacagatgactatgatcttcaatgaggttttgaggctataccctccggtggctcagcttaaacgagttgtcaacaaagaaatgaagctcggagagttgacccttccagctggaattcaaatttacttaccaactattcttgtccagcgtgacaccgagctttggggcgatgatgcagcggattttaaacccgagcggttcagagacgggctctcaaaggcaacaaagaaccaggtctctttcttcccctttggatggggacctaggatttgcatcggtcagaattttgctatgttggaggcaaagatggcaatggctttgattctacaaaagttctccttcgagctctctccttcttatgttcacgcgcctcaaacagtcatgaccactcgtccccaattcggagctcatctaattctgcacaagctctgattttgtatatccatggatatgtcatcaaaagtctcatattatgtaacaaaaagatgtcatagaaagccctgtagccatatgttgtgaaattgtcaatatctttgtctgaaactagtcgctattctataaggtaaaagtcttcttcagtcaagtctaaggtcgttttctatcctggctgcattattaatcttgaaaagtctattccaagaagccaatttcaactctaccatctttagcatgtgttttagataagccaatcgttttttatgtcataggccagtggagaaagatttagcaaaaacataagtattttatggatttagataatctagaacattcgttgaattttcctctgcctcacactttaaaataacatcaaatctctatctatttatacaaacccttttcatctggcatcttcagttcagtaaaatagaagaaagcatctaacgaattttacaagtaagtgcgtttatgagtgatacaaagatatcagcagtagcagttgctgctgctgtagtggtggtaactacggttacggtatggatatggaaaggtctgaatgtagcttggcttagaccaaagaaaaatgaggcttatctaaagagacaaggtctctctggaactcctttcacctttcttgtcggagacattaaaagggaagccagtatggtggagcaagaaaagtccagacccatcaatctaactgatgattacacgcatcgtgtcatgcctctgatacaacagaccgttaaggatcatggtaagaaatggtttgatctgaactcaaaacagatatcctctgtttttctaatttatgcgttggttagtgttaatatcctctgtttctatggttggtttttgtttagggaagacatcttacatgtggatgggacctatagcgagtgtgattgtgacgaaaccagaacacatcaaagatgttctaaacagagtttacgatttcccgaagccgccagtgcacccaatcgttgagctcttcgcgactggagtcgcgctgtatgaaggagagaaatggtctaagcacaggaagattataaacccttcttttcatcttgaaaagctcaaggtcttacttacatcagttcttatggtttcacactttttaccaatccttatctgattgtttgcttttttctttattttgtagattatgatacctgcattctacgagagctgcagcgagatgataagtaaatgggagaagttggtgaccgagcaaggatcatcgaatgagatcgatgtttggccatatcttggagatttaacatcagatgtaatttcacgtactgcatttggtagtagctacgaggaaggtaagagaatctttgagcttcaagaagaacaaggccggcgagtgttaaaagctcttgagttggcttttatccctggaatgaggtaaacggtctttagtgttctttcgcttttataaatatggaaagatcatatgcttcttctcattgtttaggtttctaccaacaaagaacaatttgaggatgagacaaattaacaaagaagtgaaatctagactgagagagatcatcatgaaaagacagaggggtatggatacaggggaggctccaaagaatgatctgttaggaatacttttggaatcgaattctggagatcatggtatgagtatcgaagatgtggtagaagagtgcaggctgtttcacttcgcgggccaagaaaccaccgcggtgctgctcgtgtggactatgataatgctgagccatcaccaaaaatggcaggatcaagctagagaagagatattaaaagtcattgggaagaacaacaaacctaattttgatgcactctctcgactcaaaacagtaagtactcttgtgtatttttctgataatcagaggattaccaaaacttagacttacttttcttttgacagatgagcatgatcttgaacgaagttttgaggttatacccaccagggatactacttggtcgaaccgtagagaaagaaacaaagcttggtgaagacatgacactaccaggtggtgcacaagtagtgattcctgttcttatggttcatcgtgatcccgagctctggggtgaagatgtgcatgaattcaatcctgaaagattcgcagatggtatctcaaaagccacaaagaaccaagtttcgtttcttccgtttggatggggaccaagattctgtcctggccagaattttgctttgatggaagctaagatggcacttgtcttgattctgcagagattctcctttgagctgtctccttcgtacactcacgcacctcatacggttcttacacttcatcctcagtttggtgctccgttgatcttccacatgctctgaaatcgagtcacagagtacaccaaatttcgaaattcctctgtcttttttgtttttcttaaatcaaatttcagtagcatatataacccaataataccacgatgaaatcaagttcgattcaaacatttagggaatattctcagagaacatatcataaacatttgagcatgaacacgtgatttctataataactttcctattatgttaatatagaattttttacttgactaattactttccataaaaacttgagaatactaaacatatgaccattttattttatttgcaaaaacaattgatgactcgtaataagttaattcatttactgcatgtgtttctcttagaataagatggatttcgcatggcttattattgattaagtcattaataagtctgaagtataaaagtataatatataacaataatggcatattagttaattgtttaaccaagaatacaaagacttgaggcatggaagacagatgtggccagaggtcgtgaggaacctgagtaaaggccaaagttcgacggttacaaacaatattttattgtccgaacacaaatctataagtactaaagacaaatcagcacatgcattttcttcatcaaaattctcaaaaattttaagagaccaaaaacatcagcaaatggagatagtaattgcatcattggctttagttgttgtattgtggtgtatatggagaattttggagtgggtttggcttaaacctaagatgcttgagagttacctgagaagacaaggtcttgtcggaactcgttacacgcctcttgtaggagatgtgagaaggagttttagcatgttgaaggaagcaagatccaaaccgatgaaaccaacggatgatctcatctcacttgtcatgccttactcttttcacatgctcaacacttacggttgagattttaaattctttttgtatttactagaggtctaaacggttcttcttctaatatatatgcatgtatgtatctgtggctacaacagggaagacatttttcacatggtcaggacccatacctgccataacaataatgaatccacagctgatcaaagaagtgtacaacaagttttatgatttcgagaagacgcacacgtttcctttgacttcattgctaactgatggacttgctaatgccgatggagataaatgggtgaaacaccggaagattatcaacccggcattccattttgagaagattaaggtttcaaatcctcttctctaatattgtcacaaaaccatgcatgttaatattgcttctggctgacgagtgaatggcctttttttgtgacctgattatgattttgtgtatagaatatggtccctacgttttataaaagttgcatcgaggtcatgtgtgaatgggagaagttagtttcagataaagggtcgtcgtgcgagcttgatgtttggccatggattgtgaatatgaccggagatgtgatctctcgaaccgcttttggtagcagttacaaagaaggacagaggatattcatattacaagcagaattagcccacctcatcatactagctcttggaaagaattacattcctgcataccggtaagaaactttacttgttttggtctctaattacttagcatgactcttggttacaatactcttcttggaactgtgaatttcattcttctttgtttttgtatgtgtaggcatttcccaactaagaataacagaaggatgaaaacaatagtcaaagaaatccaagtcatactaagagggatcattagccatagagaaaaggcgagagacgctggagaagcaccgagtgacgatttgttaggtatacttcttaaatcgaattcagagcaaagtaaaggaaatggactgaacatggaagaaatcatggaagagtgcaagttgttttattttgcgggacaagagaccacttcagtacttttggcttggactatggttttgttaagccaacaccaagactggcaagctcgtgcacgagaggaagtgatgcaagtttttggccataacaaacctgatctacaaggcattaaccaactcaaagttgtaagtattaaccaaaccaaaaaaaaatcaagttgatgcatttcttcaattttgttttgatgattttgttcctacagatgacaatgattatatatgaagtcctgaggctatatcctccagtaatccagatgaacagagcgactcacaaagagataaagctaggtgatatgacactaccaggcggtattcaagtccatatgcctgttctgctaatccaccgtgacactaagctttggggcgatgatgcagcggagttcaagcccgagaggttcaaagacgggatcgcaaaggcaacaaagaaccaggtctgcttcttgcctttcgggtggggaccgaggatttgcatcggtcagaacttcgctctgttggaagcaaagatggctctggctttgattcttcagagattctccttcgagctttcaccttcctatgttcattcaccttacagagtcttcactatacatccacagtgtggggctcatcttatcctgcacaagctttgatactatactccacgtgatgttatcaaaacttatacatatgagaaacaaaatttcatagaggaatttattcaagataatagtcatattaaccatgttttgaattgagaatgcttccctaataacaactaatccatctatttttgagtattattttataccaaatagaaatgccttagtggaagagatgatatttaaataagaatctacaaatttggggaaaaaatctataaagtttaaaatctctcaacttttgaaatacacagttgtaactccccaataaaagcaaaattgatcaattagtgactcaagtaaagcaaaatatcaatgagtcaaaataaaacaattttgtccaaaacacaaactatacagtattttaaaacatgaggggtggtaatatccatatccataccttcttcgaaactatctctcttctctgggagagaaaaatggagatatcagttgcatgcgtaacagtttctgtagttgtagttgttgtgtcatggtgggtatggagaactttacagtgggtttggtttaaaccaaagatgcttgaaagttacttgagaagacaaggtcttgccggaactccttacacacctcttatcggtgatttgaagaggaacgtcaacatgttgacggaggcaacatccaaacccatcaaactaaccgaagatatcacacctcgtgtcctgcctcatcccttccaaatgctcaagactcacggtatgtgtcctggttggccttttgcttcctctctgttttaaactgttgatcaagagaaaaagagtttcaaattttgtatatctatgtggtttgaaacaggaaggactttctttacatggcttggacccaaaccaaccatcaccataatggatccagagctaatcaaagaagtgttcaacaaagtttatgattatccgaaggcgcaaacgtttcttttgggcagactaatagccactggaatcattaattacgatggtgataaatgggcgaaacaccgaagaatcatcaaccctgcttttcatatagagaagatcaaggtttaaggctttatttttcagtcatgaatcaagttgtatgctcattttattctgaactaatttgtgcattctaacttctatgtatagaatatggtacctgcgttccaccagagctgcagcgatgttgttggcgaatggagcaagttagtgtcggataaagggtcgtcgtcctgtgaggtagacgtttggccttggcttgtgagtatgactggagatgtgatctctcgtactgcttttggcagcagctacaaagaagggcagaggatctttgagctacaagcagaactagtacatctcatcttacaagctttttggaaagtttacatccctggatatcggtaataaaagatctcaacctgcctggttttagaacttcactagtgctgcaaactattacagattgtgaaccatgatgtgtcatatactcatattctctctgtcttctgtttgtgtagttatctccctacgaagagtaatagaaggatgaaagcagcagctagagaaatccaagttatactgaaagggatcgttaacaaaaggttaagggcgagagaagctgggaaagcagcaccaaacgacgatttgttgggaatacttcttgaatcaaatttggggcaagccaaaggaaatggaatgagtactgaggatgtgatggaggagtgcaagttgttctatttcgccgggcaagagacaacttcggtacttctggtctgggcaatggtgctgttaagccaccaccaagattggcaggctcgtgcacgagaggaagtgaagcaagtttttggcgataaagaacctgatacagaatgtcttagccagctcaaagttgtaagtataaaccaaatcataaaccttcaggtgactttagtacttttattgtgtttagatggttttgctgaatgtttccaacagatgacaatgatattatatgaggttctcaggctatatcctcctgtaactcacctgacccgagcgattgacaaagagatgaagctaggtgacttgacactaccagccggtgttcatatcagtctacctataatgctagtccaacgcgaccccatgctgtggggtactgatgcagcagaatttaagcctgagagattcaaagacggtctttcaaaggcaacaaagagccaagtctccttctttccatttgcatggggaccgaggatatgcatcggccagaattttgccatgttagaggcaaagatggcaatggcgttgattctacagacattcaccttcgagctttctccttcctatgttcatgcgcctcaaacagtcgttaccattcacccgcagttcggtgcacatcttattctgcgcaagctataattctataaccacatgtgctgttgtcaaataaacataggaaaataatccagatcataatataaaactcaaatctttttcttatttgaagtcagaactttgtcctcacatatgtcttgagaaaccaaaatatttccaataaaaagagtgaaacgcatggaccaatagatttcttcctcttttcgtcgcttttcacacaaagtccaaatatgcttctgcgctttggtggcatgtgactgtgagggtccaagtaaagcaaaagatcaattaagcacaacaaaataattgtccaaaccaccaaaatataaaatataaaataatttgtgaccatcatcaccacatccatatcttctccgatattctaaaccctgagaatggtcacaaattctctaactctctctctctctctctagtagaaaacatggagatatcagttgcatcggtaacagtttctgtagctgtagttgttgtgtcgtggtgggtatggagaactttacagtgggtttggtttaaaccaaagatgcttgagagttacctgagaagacaaggtcttgctggaactccttacacgcctcttgtcggtgatttgaagaagaattttagcatgcgggctgaggcaagatccaaacccatcaacctaacggatgatatcacaccacgtatcgtaccttatccgttgcaaatgctcaagactcatggtatgcttccttgttggcatcttgattcctctttgtttagaactattgtagagtatctagaaaaggtttcaactttcgtatctctatgtggttgaaacagggaggactttctttacatggtttggagccataccaacaatcaccataatggatcctgagcaaatcacagaagtgctcaacaaagtttatgatttccagaaggcacatacgtttcctctgggcagattaatagccactggagtccttagttatgatggtgataaatgggcgaaacaccgaagaatcatcaacccggctttccaccttgagaagatcaaggtttaaaggctttatcttccatagtccccaatcagattagattgctttatgtatgtatgttcatttggctctgaaccaaattgtgccttctgcttctatgtatagaatatggtacctgcgttccaccagagctgcagcgagattgtttgcaaatgggacaagttagtgtcggataaagagtcatcatgtgaggtagatgtttggcctgggcttgtgagtatgactgcagatgtgatctcccgtactgcttttggcagcagctgcgtagaagggcagaggatatttgagctccaagcagaactagcacagctcatcattcaaacggttaggaaagctttcatccctggatataggtaatgaaaaactcaacttatctgatttaatataggtccttctgagcttgactcttgatcttaaaatgtcgcaatctattccttaaagatatgaaccgtgttaacattatctttctgccaatctttttctgtagttatctcccaacaaaaggtaacagaaggatgaaagcaaaagcaagagaaatccaagttatactgagagggatcgttaacaaaaggttaagggccagagaagctggtgaagcaccaaacgacgatttactgggaatacttcttgaatcgaatttggggcaaacgaaaggaaacggaatgagtaccgaggatctgatggaggagtgcaagttgttctatttcgtcgggcaagagacaacatcagtacttctggtttggacaatggttctgttaagtcaacaccaagattggcaggctcgtgcacgagaagaagtgaagcaagtgtttggcgataaagaacctgatgcagaaggactcaaccagctcaaagttgtaagtaaaagcaaatcataaacctcttggtgacttttgttgtgttttgatgatttttgatgaatgatttgatcccacgcagatgacgatgatattatatgaggtccttaggctatatcctccaatacctcagctgagcagagccattcacaaagagatggagcttggagatctgacactaccaggcggcgttctgatcaatctacctatccttctagtccaacgcgacacggagctgtggggaaacgatgcaggagagttcaagccagatagattcaaagacggtctctcaaaggcaacaaagaaccaagcctccttctttccttttgcgtggggatcgaggatctgcattggccagaattttgcattgcttgaggcaaagatggcaatggcattgatactccagagattctcctttgagctttctccttcctatgttcacgcaccttacacagtcttcaccattcacccacagttcggtgctcctcttatcatgcacaagctctaatcgttcgtagcaacccattttgttgttatcaaatatactttccattcacagatgaaacaattccatatcagtctacctataatgctagtccaacgcgacaccatgatgtgggaattcaagcctgagagattcaaagacggtctttcaaaggcaacaaagagccacgtctccttctttccatttgcatggggaccgaagatatgcatcggccagaattttgccatgttggaggcaaagatggcaatggcgttgattctacagagattctccttcgagctttctccttcctatgttcatgcgcctcaaatagtcgtcaccattcacccacagttcggtgcacatcttatcctgcgcaagctgtaattctagaatcccatgtgctcttgtcagataaacagaggaaaataaaccagatcatagtataaaactcaaatctttttattaattgaattcagaactttgtgctcacatatgtcttgacaaaccaaaatatttccaagaaaaagagtgaaacgcatggaccaatatatgtcttcctattttcgtcgcttttcacacgaagtccaaatttgcttcttgcgccttggtggcacgactgtgagggtccaagtaaagcaaaaattaattagtcattacaaaataattgcccaaaatatcaaaatataaagtatttaagacatcaggggtgatgtcatcaccacatccatatcttctccgaaattctaaacatttatacatcctgagaatggtcacaaattctctacctctctctctctctctctctggtagagaaaatggagatatcagttgcatcggtaacagtttctgtagctgtagttgttgtgtcatggtgggtatggagaactttacagcgggtttggcttaaaccaaagatgcttgagagttacctgagaagacaaggtcttgccggaactccttacacgcctcttgtcggtgatttgaagagaaattttagcatgctggctgaggcaagatccaaacccatcaacctaacagatgatatcacaccacgtatcgtgccttatccgttgcaaatgctcaagactcatggtatgcttcccggttggcatcttgattcctctttgtttagaactattttgtagagtatctagaaaaagtttcaactttcgtatctctatgtggttgaaacagggaggactttctttacatggtttggacccataccaacaatcaccataatggatcctgagcaaatcaaagaagtgttcaacaaagtttatgatttccagaaggcacatacgtttcctctgggcagattaatagcggctggactcgttagttatgatggtgataaatggacaaaacaccgaagaatcatcaacccggctttccaccttgagaagatcaaagtttataagctttcttttccgtagtcccagtttagctttatgtatgtatgtccatttggttctgaaccaatttgtgtcctctgcttttatgtacagaatatggtacctgcgttccaccagagctgcagcgagattgttggcgaatgggacaagttagtgacggataaacagtcatcctgtgaggtggatatttggccttggcttgtgagtatgactgcagatgtgatctcccgtactgcatttggcagcagctacaaagaagggcagaggatatttgagctccaagcggaattagcacagctcatcattcaagcttttcggaaagctattatccctggatatcggtaataaaatcccaaacttgtctgcttttagaacaaggccttttagagcttcagtagtgctgcattctactagagactttgaaccatgttttgtaataaaaaccctaacttgtctctctgtcgtctgttcgtgtagttatttccctacaaagggtaatagaaggatgaaagcagcagctagagaaatcaaatttatactgagagggatcgttaacaaaaggcttagggcaagagaagctggggaagcaccaagtgacgatttgctgggtatacttcttgaatcgaatttgggacaaacaaaaggaaatggaatgagtaccgaggaactgatggaggagtgcaagttgttctatttcgctgggcaagagactactacagtacttctggtttggacaatggtgttgttaagccaacaccaagattggcaggctcgtgcaagagaagaagtgaagcaagtttttggcgataaagaacctgatgcagaaggcttgaaccagctcaaagttgtaagtaaaccgaaccaaaaaccttcaagtgacgtgagttcttttgttgcattgaagctgaaaatttgatccctcacagatgacgatgatattatatgaagtccttaggctatatcctccagtagtccagctgacccgagccattcacaaagagatgcagctaggtgacctgacactaccaggcggcgttcagataagtctaccaattctgctaatccaacgcgacagggagctgtggggaaacgatgcaggggagttcaagccagatagattcaaagacggtctctcaaaggcaacaaagaaccaagtctccttctttccttttgcgtggggaccgaggatctgcattggccaaaattttgcactgcttgaggcaaagatggcaatgacactgattctacggaaattctcctttgagctttctccttcttatgttcacgcgccttacacagtcctcactactcacccacagttcggtgctcctcttatcttgcacaagctctaatcgtataaactccttgttcacaaatatactttccaatttccatacacagatgaaacaactccatattatcatacaaaactcaaatcttgatacggttttgaagtcacagaactcacggaacaaatctcagttgtgaaacaaaaacccaagactatagacaagagatcacaaaccctttttttgagaattgactcagtatttgttcttcatcaacgactattctcttccggttactgattagaagcggcaacgcttgtatccagagaagccgtagccaaaacacttcataccaatcaaacatgttggattacgtcgtgatttcgcctcaacaatgctcaaccaaatcttacagtctctttgaaacagagtaacccatagaataatcgaacgacagatgagattctccaaatcgatcgcttctgaattcgctaaaaaccccaatttcttcatcaacggtgatattcgcggaggagaggttctatatgacggcgcaatgttataatttgagaaaatgtctgaaaactccctttttgtcaagagctaacctcatatctccccaacgaaaacagaaaggaattttgatttatttttaattcgttttgtatggattttacttgtataccccaactgaaatcgaatatttacaataaaaatttggatctattcgatccagacccgatccattatcccaaagagaatatattttattggatctctcttctattcttcggtttctttttcttttgaaaacgaaactgaaacttctccttctcaatttcaaaagcttttcgatttatgttcctcaaacctcaaaccgctctcgatttcaatcctctcccttctctactcaaattctcaacaagaatcctaatctcttctttctcagaatcttttcttctccttctttaaccctaaccctaatgccgctgaaaacaatgctgagaggagtaggaacgaaggagaattcaacgacggaggagcctccgccgggaacgaagccaatcgatgctgtcacaaaggcaacgacggagcctccgatgacgacggaggagccatcagcgtcgaagcaaaatccggtcgtaattgagggaagaggagttgaagaagaacaaatcccgaccataatcacgaccgtagtggaagaaggagagaagtctgacaacaatgaggaagaaaattctgagaaggatgagaaagaagagagtgaagaagaagagagtgaagaagaagagaaagaagaagaagagaaagaggaagaggagaaagaagaagaggggaatgttgccggaggaggatcctccgatgatagtagtagaaccttgggcaaagagtcctcctccgatgagaatatggatgatgagactgcagtgggaaagcaagtggatattccggcggctatggtaaggatttctcaagtatttgaatggtgtgaaactggtagaacaggataatactatgatttctgtagaaaactgtcattactaggatataactatgtgtatgaattctgggtaacattggtagtactaagatagaactatgtgtatgatttctgggtaatactgtcattactaggatataactatgcgtttctgggtaatattgtcattactagaaaataactacgtgtatgatttctgggtaatactgtcattactaggatataactatgtgtctgattctaggtaacgtcggtagtaatatgaatgaatgtttgttgcagaagatcaacgagatgggccaagagaatgatggggatccgaaagagaaggatggtgatctagagaaagatggtgatcaagagaaggacccgaaagagaaggacccaaaagagaaggatccgaaagagaaggacccaaagagaaggacccgaatggtccttcaaaacccgtggaagcaaacttcacaagaaggaccactcagagaaccaagagttgaatttggttgtacttgttaggatttgaatttggaatgtttggttttaggatttgaatgtggtttgttttgtttggatttgactccggatttgttatgttaggatttgaatttgataagttttttttgaatatcaatttggatatgaattggaatttgatatgttaggatttaacgataatactgagaatacaagagaatactaggatttaacgataatactgagaatccaagagaatactaagatttaacgataatactgagaatacaagggaaaactaagacttaacgataatattgagaatacaagagaatactaagatttaacgataatacagagaatacaagggaaaactatgatttaacgataaaactgggaatacaaaggaatacttaatgacgataatactggaaatacaagggaatactcaataaaagtcttacaaaccaaagacagaaattaagttcacacaaacccaataattcctcactttccacaacaaactctccacaaagtccccatctttttttggatctcatccaactccgaacgcatttcttggttagagtactccaagctttgaatcttttggtgatggttatcaacttgctctatcccatagctttatcccaaagtttccgaatgtataacccatcattctacaaaacatgaattcttaatagaaatcaattattctaaaacaagattgatgatatttatatcttcaatttaccttatacacgatgcatttatagtatctttttcctttgtcaccatcgttctcagagattttgtcaaggatttgtccaccacaaggacaaattgccggaattccttccatcattgcaacttcttcaagttgctgtattatcctcttagcgctcttcatctcatcataccatggatcactctcacacaatcgatccataaatgattggagagaagaatttttgagtgagagagaatgaagagaatgaagagaaattgagatcgggagagagagagagagagagagagagagagtgaatttcgagagagagagagagagagagagagagagagagagagagagagagagagagagagagagagagtttatttcgatagagataaatgatttcgagagagagagaagatattttgtgggaaattggttttggggggaatttggttttgggggaaaatttgttttgttttgggaggaaattgaaattggagggaaagttaatttttggggggaaaggtgttttccacgtgggcgcagatatttagacatgtgcgccgtttttttaaagttagttgtactctagtttttggttgtacaaaatgcccacatagttgtattttttgtgttttccagtttaggcagtattacatatcttttaagatgatttatctagttgttcagattaaggaagtctatcattatagaattctaaaggtttaatgtaattatatgtagacaatatatgaaattgtaaaatttcaatcttaagttggagtttatatcaaacgtgagcttaaaagtataaggaatatgtaggatagtgtctattaaaatgtgttttgaccaaatattttttttcctaatttaatttgttttaattcatttttaagagttcttcatctttgcataatctatttaatatttgatgtttgaaacaaacataaattcgaattttaatatccttcaatagtattcccttgtatttccagtattatcttgtaatcatagtattcccttgttttcccagtattatcgtctaatcatagtattcccgtgtattctcagtattattgttaaatcattgtattctcctgtattctcagtataacccttatgccaataaattaaaacatagtattactgaaggaaagtctagtgttacatagctgcacaacacgaataaggtttacaaatcataaaatcaaatattatgggtgccaaataacaaccattgcagcgactgcctcggcctccttttgtctgagtcttttgacgttttggatgtctttctccggtggaaagaaacctaagcacttctgttctacccttcttctttttccgaggcagaggtaataccttcaacgctttgatgtcatccgggatatcccactgtgatctattcgggacaaaataaatagtcctataatacgctaatgcccacaactccgcccaataattctttgaaaccaattcatgtaattccatatctcgagttcttgttgtatcgtgatccaatctcaggatcttgagtatcatcaacctccactattgcctcattttgttctgtttcttgtccctccaattcgcccatcacgatggcagcattatctctcatttcatcatcatttgaacccaaatcagcatagttcttaccaatagaacttttattgacgacctccactctcgacagttacttgggcaattccggtggagtgatgacgtcaacagtcaaaggatatctactaaccatttcacctgaagatatatagacaccgacatcctcatcatcactaatgtgtatctcttgagttggtcccaacatcactgcattgcacttcatttgcaatttaaccatacttttatctaatccaagcttcgtgcaaatcctactttctaacatggagagagttattttccctcctggtgtattcatcaacaagttgtacgctcgatctttccatataaaatatataatcaccttctccaccattgtatcctacaaaatcaatacaaaaacctctatcagatatactagttatactacaattctgggtaacacaagtataactagttatactacacatatctgtataatacagttataactaataatagtacatgtaaatgggtaatactactgtacctaagaaatactacatgtaaatggttaatactagtgcaactaagtcatactacatacatctggataaaactagagctacgggtaatactacatatatatttttcaattgaatcatgtgcaattctactcagttctaccagttgtatttcccgacaataactcaaatcgcatggtttcgggttcaaaactacaattcactctgattcagttgttgtaatccatttcttacccattttacagatctattcaacccaggcagtatgcataaacttccaatgtgcatacccaaacacaatttgcttaatctcaaatctaattgacaacaatctcctagttttctaggttcaaaacttcaatattaagctctatgcagctcgagtaagataccttttctttctatctcgacgcaactcgtcggagggagaggatacgacaacaatggcgactgaaatcaaatttcgatgatgagagcgatgagagctcgagcgagaagaagctgagaggagagagagaggagaggcaagagagagtcgagagagagtcgagagattttttttttcctgttttattttttttttcttttcaaaaactaaataatttaaaaatgaataaaataaagaaggagagggtaaattcgtcaactcacaattcattaatagagtgggggatatgaagacaaaaataggatacaagaggttagtgtttggcaaaaaaggagttataagattatttctcttataatttagactgaacgacgccgttcgaatagtttttttaatcattgtttttttccgttccaaactatgtcgtttgatcaaactcaatttgtgctaccaattattaatttgtgtcatacttatgctaagaccatgctaatcttcttcttttttcttttttgaagctaatgtactcggaggaacaatcgatatatccacttcaaaactgaagctatttctaggtgatttaagatttttaacatcgttaatgagtatttcatgggaagttcactataaattataaagtaaccctataattatggttattggtgagttaattatattcagtagcactttaaaaagaaatgtacgttcagtccagaacaattacagcttacgatcgaaatctgaaatcaaatcactctaactttaaaaaaaaaaaaaaaccttaaatgtgtaggtttttcttttggaatgaaaaagaataatccttgcgtaataagatagcaattgattgaaaaacaaaatagctcatgtcggcctatacactataatattctagacacgtccctttctgttggttgttaactaaaatagctcatggcggctattacaaaatgcaccacttgagatgactatgaaggtacaacaaaataaatatttgtcatatgtgagagcaaactaattggaaaaacaggatgagattgagatcataacaaatgagcaatactaaaatacactaaaccaggtttagtaaaccttatgtccttatcagagttttacgccattttatatagtttgtgtttttgagggagttgtatattatttctgacgttggagggatttagtagttttacttttcttttctttttttttgtcgttttacttttttttttgatatttctttatttcacgtttctatttaacttagagttttttttatatatttatgtttttagtttcttctctacatatataaaaattcttaagttatttgtaagatacgttttattatctaattaataaaagtaaagagttttttttctctaattggtagaatttcaagaatttcaatcctttcaagttcgacagtttgacataatacttgttattcctatcatagacataatgcttgttattcctagatattctaaatgtgtcaatttctcaaaacattgtaattctcaaatttaaatatgaaagtttttagttatttttcttttttgaaaaaaaactcttacggtgatcatcgacaattttgttacgatgatcgtaaaacaatattgttacgatgatcgacagtttttattcattatgatatattttagatattaataagaagcatatcctaagatctaagttaagaaaaatttagatattttatgtgattatttatcagttttaaatgaatatgttaaatttactttaatcagtgtttgtttagctaatgtgctgagaccggagagtgctaagatacaaggtctaaaagtaaaaaaataaaatatatagatattaatttatttttaataatagatattttaggtttttgtatatataacagcatttggtctataaaatatatgagcagggcctgactttaatgcaaaaacaacagtagcctatgtacatgtacaaaaaagtcgttttagtcaaatgtgaaaatcaaatgattttgtaattatttttgttttaaagaaatgtcaaaaagttgaagacgttcatgtcagagcatctttactggtgatatatccaatatggatgtctaaaacattttttatagttaacttattatatatttttttgtttggtcaacattatattatattttaatacgagtaactaagaaacaggatggagttaggcgagatgtcaaattttgtttattacggcttcgtggcaagggactgtgaaccacgacatcaggggtgatgtaatcaactaatcaccgcatccatatcttctccaaaagtttcaactttatgttcctagaacttttagcaaattatctacctctatctttctctcttctttaagagaaaaaaaaatggagatatcagtttcttcggtaacattttcactagctgtagttgttgtgtcttggtgggtatggagaacgttaaagtgggtttggttcacaccaaagatgcttgagcgttccctgagaagacaaggtctttccggaacttcttacacgcctctaatcggcgattttaaaaagatgatcagcatgttcattgaggcaacatccaaacccatcaaaccaacagatgatatcacccctcgtgtcatgcctcatcccttgcaaatgctcaagactcatggtatccttccatagttcgcttcttgattcttctctgtttagaacttataacaaaactgttgcaaagtatctgatctatatataaacttttgtatctttattatgctcttggaacaggaaggactaacttaacatggtttggaccaataccaacaatcaccataatggatcctgagcaaatcaaggaagtgttcaacaaagtctatgacttccagaaggcgcatacgtttcctttaagcaaaatactaggcacgggactcgttagttatgatggcgataaatgggcgcaacaccgaagaatcatcaatccggctttccaccttgagaagatcaaggtttaaggctttatttctcagtcacatatcaagttgtattttttcatttggctcttctgacccaacttttgcgtggatctgcttctatctattatatatagaatatggtacatgtgttccacgaaagctgcagcgagcttgttggtgagtgggacaagttagtctcggataaagggtcctcatgtgaggtggacgtgtggcctgggcttacgagtatgactgcagatgtgatctcccgtactgcttttggtagcagctacagagaaggacacaggatatttgaactccaggcagaactagcacagctagtcatgcaagcttttcagaaattttttattcccggatatatgtaatgaaaaaactctacttgtctagctttaatatagtgcttttaaatctggattcttgatctttaacttttagtgctgcaatctattagagatatgacctgtgttgtcataatcatgtgcttattgtttgtgtagttatctcccaacaaagggtaatagaaggatgaaaacagcagccagagaaatccaagatatactgagagggatcattaacaaaagggaaagggcaagagaatctggagaagcaccaagcgaggatttgctaggtatacttcttgaatcaaacttggggcaaacggaagggaatggaatgagtaccgaggatatgatggaagaatgcaagttgttctatttggccgggcaagagacaacatcagtacttctggtttggacaatggttctgttgagccaacaccaagattggcaggctcgtgcacgagaggaagtgaagcaagtttttggcgataaacaacctgatacagaaggccttaaccaactcaaagttgtaagtataaaccaaattttttataaaacaaactttttcaaatgacttcactacttttgttgcattttgatgatttaagctgatccctcacagatgacgatgatattatatgaggtccttaggctttatcctcctgtagtccagctgacccgagccattcacaaagagatgaagctcggagatctgactttaccaggcggtgttcagatcagtctacctgttctgcttgtccatcgcgacacggagctgtggggaaacgatgcaggggagttcaagcctgagagattcaaagacggcctctcaaaagcaacaaagaaccaagtctccttctttccctttgcgtggggaccaaggatctgcattggccagaattttacattgcttgaggcaaagatggcaatgagtttgattctacagagattctccttcgagctttctccttcctatgttcacgcgccttacacaatcatcaccctttacccacagttcggagctcatcttatgctgcacaagctctaatcacataaccccttgttttgttatcaaataaactcattatctttttatgtatccaagtcagaactcgtgtcatagtttaataaaacccttcaagatgtgtcaaaccctggattgcaatataatcatcgactgttgcttgacacttcttttcaaacatcactaacaagagacaaactatgtctttattaactctgattcttcctccctaataattatgtgttgcaccaaaagatattagaccgaactcgtgtctctcaaactattatgaaaacttcccacattaacattaccaaaacacttggaattcatatctttatttgaaaagcaagacccgagatacagaaatgatcgaaatgaataatacagtctcacaacagaagaaactaaataaaacacttccagagatacagaacaaaaacaaagggaacagagagatatgtaacttttttttttattgaagtaaaatattataacaacccgttgaagaaatacagaacaaaaacaaagggaacagagagatttaaagtttactttttattttatgtcgacaaaacaaaatacttcaagttcaatgtttaggtaccaaaaaacccattgattggatggtggtggtaaatgacaaagacacgtcacaaagttgaagacgttcgtcccttgcccgccagtcaagttatgacttatgagagtcacataaccaatattaatatatctcctattttgtctacttttttttacagaagtccaaatttggttcttgcgccttcgtggcacgcaaaatatcgattacttcaaaagaattatatcaacacaaacactataaagtatataagacatcatcggtgatgtcatcaccacatccatatcttttccaaagttttcaaccttttattccccgaaattttttagcaaattctctacctctatctctctcttctctgggaggaaaaatggagatatcggttgcatcggtaacaatatcagtagttctagctgttgtgtcatggtggatatggagaactttacagtgggtttggtttaagccaaagatgcttgagcattacctgagaagacaaggtcttgccggaacaccttacacgcctctagtcggcgatttgaagaagaatttcaccatgttgtcggaggcaaggtccaaacccctcaaactaacggatgacatctcacctcgtgtcgtgccttatcccttgcaaatgttcaagacttacggtatgcttcctgttatggtatctctcttcactgtttagaagtttagaactgttgcagagtatctgatgtagagaacaggtttcaacttttgtattgctattatgtggttggaacaggaaggacttactttacatggtttggacctatcccaaccatcacaataatggatcctgagcaaatcaaggaagtgttcaacaaagtttatgatttccaaaagccgcatacatttcctttggccacaattatagctaaaggactcgctaattatgatggtgataaatgggcaaaacaccgaagaatcatcaacccggcttttcatatagagaagatcaaggtttagtaacccggaatcaagttagattgtttatatgtatgtacattcgtttggctctgacccaactttgtgattctatgtttagaatatggtacctgcgttccaccagagctgtagggaagttgttggcgaatgggatcagttagtatcggataaagggtcgtcatgtgaggtagacgtttggcctgggcttgtgagtatgactgcagatgtgatctctcgtactgcatttggcagcagctacaaagaagggcagaggatatttgagctccaagcagaactagcacagctcatcattcaagcttttaggaaagctttcatccctggatataggtaatgaaaaactaaacttgtcttctagtactgcaatctattaaagtagaacggtgctctcagaatctttgagccaattttttgtgtagttatctcccaacaaaaagtaacagaagaatgaaagcagcagccagagaaatccaagttatactaagagggatcgtaaacaaaaggttaagggccagagaagctggtgaagcaccaagcgacgatttgctgggaatacttcttgaatcgaatttgaggcaaacggaaggaaacggaatgagtaccgaggatctgatggaggagtgcaagttgttctatttcgccgggcaagagacaacatcagtacttctggtttggacaatggtgctgttaagccaacaccaagattggcaggctcgtgcacgagaagaagtgaagcaagtgtttggcgataaagaacctgatgcagaaggactcaaccagctcaaagttgtaagtaaaaccaaatcataaagctcttgctgacttttgctgtgttttgatggctgattcgatcccacgcagatgacgatgatattatatgaggtccttaggctatatcctccagtaacccagctgactcgagccattcacaaagagctgaagctaggcgatctgaccctaccaggcggtgttcagatcagtctacctattctgctagtccaacacgacatcgagctgtggggaaacgacgcagcagagttcaatcctgacagatttaaagatggtctttcaaaggcaacaaagagccaagtctccttctttccctttgcgtggggaccgaggatatgcataggccagaactttgccctgttagaggcaaaaatggcaatggcattgattctgcggaggttctcgtttgagatttctccttcctatgttcacgcaccatacacagtcatcaccattcacccacagttcggtgctcagcttatcatgcacaagctctaatcagacaacacatttgtgttgttgtcaaatatacaataaacttgttatacagagatgaatcgagatagatcataatacaaaactcaaatctttccttttatgttcaaatcagcactcgtgtcacacagattataacccttgaagcagtgattcccaaggaacaaatctctgttgtgaaactaaaacccaagataaaaggatcgaaatttacgactcgcccagtatttgttcttcataagccataaccaaacatgcaatgccaatcagacgagtcgattaccttttgaaattgtgctcaacagtgctcgcctaaaatcttagaatctcttgaaattttgaaacagagcaccaatagaaaaatcgataacaacattggagattccccaaaatcatcgcttcagaacgccctacggtttgactcgctaaacccccaccctccggaaccctaatttcagagaacaaatcgagagatcaacggcgagattcgcgacaaggttctgacagcgtttaagttcggactgaacgacaacgctgttaagtgttcgactgttggtttttactttttactctttccgtttatctaaacgacgtcgggtggtcctgcgcttgaggtgaaaattcaatttattggctttgggcttgaggtgaattcaattttattggtttgtgaaaacatgtttagatatgaccatgttttcaaaaaccaaaaaaactagacaaaaacatctcccagactattgcaatttttgacataaaactagtcttttctcaagttttatttggaaaaaaaaaaaactactttaatccatcggatctaaagtttctgattccaaatccggatagtttttctggttgggccttttgtaactggagagctacatgtaaagtttaatagccttcccatttgagagaattatagtattaaaattattatgtttttgttaaaaaaactactttcatattttcctctaaatataatgcacggtatataccctgacgtggatttcggcttttatttagtttcggctcgtgcggtgcaaggaaattcttctagtcatcatcagccaccaaaactggcttctcaattagggctcttggtcaatccttaaaagttctattgattttcatcgactacacttttttggcgaatttatgtgattgaagtggaatctaagattgaggttctttgtggtcttcggttctcgatacatcatcataaggtattgaaagttaattttcttattcttgttaggatttctaactaagataggtcaaaatataacctagatctctcgtatctctatctatatatacgtcacaaggtattgagaattcactcatagcttctgaatttcgcggtgtcgtgtttctgtctcatcatcggggttttgataaagatgtctcagtccaaagtagctatgaaaaaagattcgatgaggaagaataagaaattggttataaatattgctctagataaagaagttcttgcttcgagagtggaagctgatcatgatcttggttctgtaagagatgagaaagagaggcttgaatcatcagagagacgaagagaggtttgttccaaagctgaagatattgttgataaggccattgataatcattctagggttagaggagatgggattatgcgggaagctgatgtcgggacagggttatcgggcgcgttaaaccgtcttagagagcaaggaactttcaaggaggaaggcaaggttgttggtgttaaggacaataatcatgaagatgacagattcaaagatagatttaaggatatacagattcagagggtgaacaagtggggaaggataatgactgagaaagaagcgtatcggtcactgtgtcatggattccatgggaagggacctgggaagaagaagcaagagaaacagaggaagaagcatgaagataagtcaaaacagatggaatcttcagagagatctgtggaaagaataagagaaattcatgccatatccaagactccttacattgttctctagtcataaacttctctttgattacgataatctcaaagacatttaattaagaacttcataaatttggtattttgctttgatattcttaagagttcttggatgtttttacatcacataaaacattgcttttcacctatatatgttaccatttattttggtataatctaacgtttttgcattcttctttggaattatattttggttttattagggaaacgattttcaatgcatcccgagacagagcaagcctgtttagttccatcttccaagaagactaagctatgcagtgagaactttgaagacaaattcagcagcttgcttgagagtgttgttagcataattcttagtcaacttccaactgctgaagctgttagtacttctgtgttatcaaagtcatggaagaacatttggacaaacatcacagatttacattttgatgatacaaagcagagggatccgagtgattctcgatttactgacttcgttgagcgtgtggttggcgacattggaagtccgcacattagcagtttctatctatgctctgttaatactttcgatgagactcttctcttctcgtggttatcaaaggtactaaagcgcaatcttcagagacttgttgtcacttgcaacgatctagagatcatcagtttttcttcactttttcctagttttgtttcgcttgtggagttaaggctccgtacaaaaagcattcttgacatttcggctcccgctattctcccgaaccttaagttccttagtctcgaggatgctagaatcttcaacatgtcttctgtctcaaagaacctcgttctgaactttcctgtcttggaaacttttgaagcctcttattgccgctgctttagaaccgatactgtgatcatagactctccattgcttaggatctttgagatgttcaagtgtacatctgaacacgtacctaatccttctcaagtgtgtaagatcagggtgttagcttcaaagcttgagaaaatcacattctgtggagacgaaccccgaaaaatccatctgtcttttccaccgtctttacctgatgcttatcttgccctcagcagatccgagtggcccaagacgtttctacgtagcttcacatgcgtgacgagtttggctctcgtggttagataaaaattacattacatcttcctcttaacttttcaaagcttttaatggctcaagtcactcacaactctttatctcaatgccctttcttagcttagcaaggattttcatgtgatggcagtacccaaattcagccagttggtatacctgcatttgatatacgacatgacacaacattttagattaatgcagttccttaaatccgcaccaatactcgagatgctcagcatccgcgtaagtcttaactatatcgaatgttgtgacagtaccaatatcttttctctttggctgatcttgcccttttccggtgaaacaaccaggacctgacatctcctcgttcaacacctactgcaaagtccttgaaggaactacgttcagtagaatctccggattgcgttacaacaatgctcaaagtcctgcagatcaggaactttaagccaaacaggctacagatatcagtgttgaggtacgtgttggacaatgctgagattcttggatcagtcatcctttcctcgcccaatccaatcacagaagaagagaaagcaagaatcttggcttttcctaaagcctctccccatgcctctgtcttgttcgaatgaccaaaagttgaccttttgcaattctcagttccttgtgggttacggcaaagttattatctttgtttcgatcatcactgaaactttgatattaaaactctatgtggattctctgattcaaagaaaagaatatgccttttggacaagttttaaagacagaaacaagtgttgttgatgtgcccttaaccacatgcaacttcttctgccactcccacttggaccacttctatgcattatattatgatttgtttatatgatgcagcatcctctattgtcttcttttatcacctagtttattgcattattttttgtatagtaatataattatttagactaaatcttatgataagaaatggtcctctgtttttctggttttaaagattgaaaaagaagttttggagttatgtgtaaaagatacttttattttagttgatgtaataggtgacacaaacttattagcgtaataattttgatagtgatgtgttttaaatattgaactataaattaggttcgttgattttagaaggccaccaaacaaaacaagaaaaagttctgcttggcagagatatttcggctcttataatttacaccactttagaataaatccaaaatcaaagaaaagttatgtttcatgtggtcgattttgtcatctctactgtcttgattgttttaaacggtaaaaatagtaagtgaaaacaaatagaaaaaccgtaatttatgatcattctagtggatttctgttggtttagtttttttttttttttgggtgtgtttgttgttagtatatattatcagttagatttacagttaagtgatgttttttattggtttgcactttgcagctagtaaccaaaaaatatatatactataaactaattttcaattattgaagttgcttaatccgaactagaagaactccaaaaaggtatataatctgaatctgatcaaggtcaacaaaccggagagtcatattttatgttcaaaatttttgtgatacttgttgatacttcagcggtgacatattatattgagcaactcccaaacgtatgggaacattttgtgatacccgagttatataaaccaaaaatgtaagactaaatcagccattttttgtgcagtgacgtcgagacaccgaggttcacgttttggtaatacaacctattaacaaatacaaaatataaaagagacaattggagaagtttattatttaaaaagggtcaccggaacgaagaaagcgtgatggaaaatgaaagttcaactttagcttaaatgttaaattattatcacttatttgacaccttgccttacatttttattaatatatacaatttgtgtggcttacgagttgagattctttttcatctataatatgtaaataagtctttttcatgcttttagctaatggaccgactttatatctcacccatatgtttacaaaaatctaaacttgaagaattaaattattcatccaataaacttatatcaaagtctttaatattaaacttataataaaccatgagttaacgtaattacgtcaacaatataggctaaaaatgtgaatggcgaagttaaaatatagtacattttagtccaaccctaacagaaaacttagtctcttcgttttttttattatcaaattaattaattactcaaatacagtataaacaatcgatcatttgcataaatttgaccttgacatcgataataattaattttcacaagtaatattatacttattttgttatttatttatgttacacttgaaagagagcccaacgaagacttgcaagtaagttacaattttatttaccttgagcttaacgttgtagcggcaacaacagtaactaaggaaggtcgcagatcacttgcggatgtcattatcctattttgacacttaatcactactatacattatacaagaaaaaaaaactaaaaactcttttatcatactattaaatttgcgacatgtgtatatacatatataacacatgtgaaattaatgttaacgatgattaggtaagttttactgctatgtaaacttgtcggatttattatgttatcttatctttatcaaatttattgaaccattaataatgacagagatcaatttaatatgttatcttatctttatcaaatttattgaattaccatttataatgacagagatcaagctaataacgacttaactgctctgagatctacacttttggtaaagttagatagaaaatcaaaattaccaataaatattacataatgtatttttaagaaaatagtggttgaatttttatgagtgaaataatttgagggtgacacctaaaaatattgaaattgcaacatagaaatattttaaatagtaaaaccggtccatcggtagttgcctcacaacgggtcaatttcaaaaagatcaccgacagtggacctaacaaaactatcaaccctcagagttttattaaattacgaaattgccatatcattcctcgtgacctgtaccccgtacccaataagtaccacgaaaattgctaaatttaggaaaatcacttcttcttctttttttttttgaagaaacaacaaaattagaatacacggaaattaaaaagaaatcacattgcttataaaaacatttctcatcttcagatttttattttcctatccgtcttttctccgatcgctggatcttgaagatctctagattttctcatctctctctgttcacggactctgtgtagatagagttcgtctgtttttcggagttcttgtgagaatctagggtttttttcttaaatctcgatcgggttttggtttctgtgatttttttttaaaatttgtgattcgaagaattgccattttctttgattagtcatattttttaattgcgatctctacatagagatcatcgaggggtttttaaattgaattttttgaaattgacgaagacgatagagttgttgagcggtattgatcttttggtgtgaagacgatagagtttaaatttgatttgaagaggatgcaaaaaactcaggagaagaaggttggttgcttcttattcatcggaggaccttatgattcctttgttcttgacatacgatttttgataatttatttgctaatgctatgtttcagaacatgaaagagatggagtttttcactgagtatggtgatgctaatcgttatcggattcttgaagttattgggaaaggaagctatggagttgtatgtgcagctattgatacacaaacaggagagaaagttgctattaagaagattaatgatgtttttgagcatgtctctgatgctcttcgtattctccgtgaggttaagcttctacggcttcttaggcaccctgatatagttgaaatcaaaagtatcatgcttccgccttctaagagggagtttaaagatatatatgttgtttttgagctcatggaatcagatcttcatcaagtcatcaaagctaatgatgatttgactcgtgagcatcaccagttttttctttatcagatgcttcgtgctttgaagtatatgcatacaggtgaaaattctatccttttttccctctctcagatttgaggtgattcgtaaacttcgtgatttaactggattctgtttggatgcagctaatgtttaccatcgtgatcttaaacccaagaacatactggcaaatgcaaactgcaagttgaaagtctgtgactttggacttgcaagagtgtcgtttaatgatacacctacgacagtcttttggacggtatgcacccttgtctacacattttgctgtaaactgttaattcagttctggtaatctctccagtgtttttgatttccttctctttgtcttttttgttccaggattatgttgccacaagatggtacagggcacctgagctctgtggatcattctgttctaaggttgttgtaattcttcttctccttccttgtatgcttgttccatttttctgtgtggttgttacacgttagagttgtgtcctattggagatagaatgaaccacccacacatgaaaataattcgtgttcaacctcaggtagcctaggcacttttgtcagaattggtcgctcaatattctaatatgcagtttttatcttttgcagtatactccagcaattgacatttggagcattggctgcatcttcgctgaggtattaacagggaagcctttgtttccaggaaaaagtgttgtccatcagttagacttgattaccgatcttcttggcacaccaaaatcagagaccattgctggggtatgttctttttgcttccacattaccaagttcttttttctgctgggaggagactaataatatgtctctaatgcaggtgcgaaatgaaaaggctagaaaatatttgaacgaaatgaggaagaaaaatcttgtccccttttcgcaaaagtttcctaacgcagatcctttagcattgcgtcttctgcaaagactgttggcttttgatccaaaggataggccgactgctgcagaggtgtgtgttctgtcattatattgtcagttgttactagtagattctttttctttcgtccctattagaacaactgacttgcttctagtgcagtaagctctagttcatatttcagctccttacatggtgatgttaacactgtgatgttctttgacaggcgctggctgatccttattttaagtgccttgctaaggttgaaagagaaccctcttgtcagccgatttcgaagatggaatttgagtttgaaagaagaaggttgacaaaggatgacattagagaactaatatacagggagatactggaataccatccacagctgctcaaggattatatgaactctgaaggctcaagttttctatatcctaggtttgttacgtcttccccttataaaccatagtcatgtcattcatagcaaaataaatgcgagacactgcactctcttgttaatcatttaactgattaattcaattttacattgcagtgccatcggtcatttgaggaaacaatttgcgtacctagaggaaaatagtggcaaaagtgggccagtcatacctccagacaggaagcatgcttcacttccacggtatgttttctcatccattcataccatacatctctgttgattcagtatgacacttgtgattaatatttacctcttcatcttcgtagatctgcagttcattccagtgcagtaaactccaacgctcaacccagtttaaacgcatcagacagtcgacgtgtttctatcgaaccttcaagaaatggagtggttccatcaacttcagcatattcaactaaacctttagggcctccaccaagagtaccatcaggtaattcccgaattattatctatgaatgtaattgactttttctctggggatgaaaatttgtagcaatctcccatcacagttaaaatcataaatagatgcacagtattgttctcaaagtcaatcgccttccttatgtctaacaggtaaaccaggccgtgttgtggaatcatctgtaacttatgaaaatgacagaaacctcaaagagtcgtcctatgatgcaaggacatcatattacagaagcacagtactccctccacagaccgtatctcctaactgttacttccttccaaacaccatgaatcaagagaagcgcagtggtacagaagctgcatctcagccaaaaccgcagtttgtccccacccaatgcaactctgccaaaccagctgagctgaacccaaacccttatgtccaatcacaacacaaggtgggtattgatgctaagctgttgcatgcacaatcccaatatggtcctgctggagccgccgcggttgcagtagcagcacaccggaacattggagctgttgggtatggcatgtcttagaatttagcacattggcgctgttggctattgccagaaactcctcttgttatagtcgttatgtaatgtaagtattattcgatcaggcctgatttgaacacatttgagattgtaataaaaatggttcagttttaaccccaccaaacgtctcaacgaaatccaaatgtgctctcggaaactgctccggtaagcctggatcatccaggtgacatcttatgggaagagactaattgtggtctttcaagatcaggacgttgtttttcactatgtcaaaaagaagaaaggataacaacaaaaaaaagttgatgttagtacaaattgacctcttggctaataaaacagagcaatggccaaagaatttacaagtcctaagatgtggttggttcgtagatttttatagtccgtaaactattgtctttcgcacaacagaaatagtaaattattactcaatggttacaaacatatctgatgtctacctaaattagtcgtcgaccgtcatatactcatgaccgtgcatatgagaaatcactaggcttaaccaatcgtggatagatttaaattccgggtgagtctgattgccggtaaagaacgtgtgaacaccgttcttgagcacaatccagctgcaacctggtgtcttcttcacattctgttgtctcattgcgtctctaacgtccaacacttcctcgtacttcccagcttccacataaacattagacattaatacataaccgccacaatgctctggctcgagctcatgtagccgctttcctgccaccagtgcgagatctttgttcccgtggagacgacaagatgacaatattgaccgccagactacaggattatcgcaaatgggctttgatattgctaactcatatgcttcctctagcttgtctgcacggccaagcatgtctattacacaagcgtagtgatcacttgttgggagaatgttatataccgtctccatctgtgccaaaaaatttctcccttcgttcaaaaaaccagagtggctacacgcttgtagcaacccaacaaatgtgatttcatcgggtttgacaccggctctgcacatacatgaaaacatatccaaagctaactcaccgcagctctgcacaccatagccattaatcataatattccaagaagctgagtctttaaccctcattgagtcgaaaaccatccgagcgtccctcaagtccccgcatttcacgtacatatccatcaaagaattatgtataaattcattactagatttgcggtttagaagtccactgacgatcatgtacccatgaatctctctgccctgcctcagtgaagctagacgaccgcaggtgggcagaacagttgtcaatgtaacaatatcaggtcggattccagaacaaagcatcctttcgaaaagagctaatgttccatcatgatcaccacagtagtcatgaacacataaaacagagttccatgtaaacaggtctctctcatccattgcttcgaatatactgtttgcctcttctagccatttactcttcccatacatatcaatcaatgcatttgacacaacaatatcagaaccagatcccgttttcaccgcaaggccatggattgacctaccgttgtcaatatcccctgaaacagtaaatgctgataagacgcttgtaatggtatgcctgctcacacctacaccttcttcacgcattttactaaagactaataaagcatcctcaaatctaaaaatctgtgaatacccattaactaaagcattccaaagcacactgtcatctctatcaggcaattcatcgaacaccttctgagcatcctccactgacatgaacttcgagtaagaagtaactaagccactccccacataacaatcggaatcaaacccaagtttaaacgccaatccatgaaccttcttaacatcagaaagctccatagcatcgcttccttttagcaaactaggaaatgtatacttatcaggtaaaatcccattagctctcatttctctgtacgtctccatcgcatccaaaggagacccatttaccacaaacccagaaatcaaagcgttgtaaccaaatacatcgcgttcggatccaccaaagaccaacaccgcacgccgcatgagaccacacttagcgtacatgttaacgaggctcgtgccggcgcgtggcgaatcatccagaaacccttttctaaccatgaaaccgtggatctgttggccggaaacgtaatctttgcgctgtgcacagcgttgcaatgtggcgatacatgtagcaacattgtggtgctcgtatctcttcgggttttcttcgatttgcccagaaacagtcgaatataaagatgctaaagcagaagaaggctttatagctgcgaataaatctgggttccgtgggagaaatctcaaaattccggcagaacaattttgaatctcgatccgtagaaacgagacggtcattgttttagttccaccacgattatatttgaaatttacgtgagtgtgagtgagacttgcataagaaaataaaatctttagttgggaaaaaattcaataatataaatgggcttgagaaggaagcgagggataggcctttttctaaaataggcccatttaagctattaacaatcttcaaaagtaccacagcgcttaggtaaagaaagcagctgagtttatatatggttagagacgaagtagtgattgtcccttcggggacatccgataaaattggaacgatacagagaagattagcatggcccctgcgcaaggatgacacgcataaatcgagaaatggtccaaattttttttggcaaaaattttcagattttttcttcatctgtagatttctgggtttttttttccgtttcgtgaatcataagtgaagttttggatgcaaatctgcgcgaaaaaagttggacctgcaatgagcttatttagatagctaagacaaagtgattggtccgttgtttcagttctgattgtcagagagtttgtttcgagacggcgacaccaatgcgttttgttaaccagatttcgggtaagaaatgtatcgagagtttgtttcgagacggctacatcattttcttatgaagggtgaaattagatagaccaaagattgaaacacaacatttctttcacaaaaatataataaacttgatagcatttaggatcagctactctcactaatcagataaataagaagaacaaacgttttaaaacaatcaaatacatgagtggaagcttcagagttgcaagcaaaaaaagcatggtcttcaggtcatggcccttgagctttctcctactttttatcttcttctctggcaacaatcttgtactttccactttcctgttgctgacaaaaaaaagttaccatcaaaaattgagccctatacaaaacatccacaactacacagatcagaagaaagttggatacaaatcttaccctttcccaaagtttggtatgctcattacagaaaccaacaacaataccaccactcttcttcccttcacgatactcaatacaaagatcttcctttaacccacaagtaacatgaaaagccaacttacatctcatctccgaacactcaataacacaaccgcgtctaaccttacacaaataacacctatctttccatctcttactcaatacctcactacaacaaatcccttctcttccttcaggatcctcaaagtaaacttccggaacaaacaacgcacaagtaatatgagcccatctaccatcattcgtaggtttcatcgccccgcctttagttgtacacaagcagcaagagaagatcttttctcggttcttcgacgataaacactgtctacaaaaccaatcaccttctggaatagccttaacaagaggattcccatagcaagaagcatgaaccatcaaatcacaaccatcacagaacacaattggattcaatggatcaccatctgtactttgacatacagcacacataatcccatcttcatcttctacttctctatcagagagatctaaagcttttcctttccctagaggatctatattctctttatcatcatcttcttctacctctagactagattcaacatttagagttgactttttctcaattgatttctcttcaacataaggcttatactctacatttagatcaaaaggcgaaaaggggttaccaccaccggagagaagatcgggatcaatcgcccagatccttttcttcgccggaagacaatgataggtgggattggagttctctgcgtcgtcatcgtcataatcaacacgagtctgcttcctcttctttgccggcaactgcaacgacttcatctccggttggttcggtagctggtgctgttgagcagcttcgagatctctctgcaacagtcttaatcttttgagaggaggtagatcttgatattgagcatccatggcttcttagtttcagatctctgggtttgtgtgaatggaacagtcgtagatctcggagaaattaaaggcatgagaaattgatatttacccgccaattgacttctttgtgcgccaaatttctgaaatttgttccgattttaaaatttcgttaattttcttcttcttctgtttttggttcatcaactgaaactaaaattttagaattttacccgccaattgttaaaaagagcgagggaggtggtctcttatgggcctttattcggtccattgaagatgttaatgggcttatttaaattaaaaaaactgtggtttccaagtttcttacttaacaacactttaatatgttggctttgttcacaatctatcagagactatcagagtatacaaaagggaggctgctttaatttcatgagagtcgcttgaaaaatgggcgactttgactttgaatcttgactttttcatcgatgtccttgtccttgtggtggcggctgctgctgctgttgctgttgcggatcgtagccaccagcccacgcagcctgtggtccgtaaggaggaggataatagccaacaacgcctgtttgtgcctgaaccagcattgttatcatatcagcacattactttacatgtgtatgaatgtatgcacctaaaactacaagaataggagatatatgaagatagatgttgttcagttacatattctgtcacaggtttcatcgacatcagctcacattgttgacttagattggtctaataaatcgattaagccagttccgttttacatcagattgacttgttcgaactttaggctgtactattggctactgaaattcggtttaaattcaaagttcaaacaaagtgtgaaactgtgtagagagaattatggtgcgttcagacatatcatctactatgcacacgcaatgtaaaaaaatataaaaagtcaaaattttataacttactggattcatggtatagttgggttgataaggattcacaggatacccagcctcaggatttccatatccaccaccataagcaactccacctgatcaaaaccatgttttttgattaacattgctatatgcattcaactgttgatcgactgtctattgctagttattagttttcctttctacttgtgcatttaataggcattgtggtgactgcttataaaggtttacacttattcaagtttatcataccaggattcccaacaggaccattagcataagcactcgtttctgagttagcaatctctgctcgaagcttctccagttcccgagccattgcaactaatttatgctccataattttgccatgctcgtagttttccgcgtaccctttcttctcataatcaatagccgctctacaaaacagaaatcacagcttaacatacacattatcatcaatatgaacaaaggcaaatcttaaaaaagagactggtcaaaaccttgcgcgttgcagctcttgctttgtgttctcaatttctgcagttaacgttggtatctgctgcaaatctgctgtaagtctagctaaatcttgagtcatcaggtgaacctgactcgttagttcctgtctacctgaagtaaactctttgatatccgcacggatcttttgaatctcagctcgcatagcatcgacttcacgcaattccatttcggatcgcatagatttatcatacatctccctcatcataatctcttcctcagctctcaaggaatcaatgtaatgcattattctttgcaattcatgctgagcaacttctaactcctgtttaagcgcaacatgagtcgcagccagtctctggttatcagcgagtaagccctgaacatcttgattctgagcagcgagacgatcctccagaatcgaaaattgtggaggaagacctcttgcatctactctaaattgaggttctctactatcatcaatcatagaaggatgaggaggaggaggcactggtcctcctcctaagcctctaacgaaaggcggttgatgaaccggagcttgtaaaccactgtaagatccacctttcattgatggaggaggaggtccacgatttcttccagacattatcttaatgttcaatactacgcagaatcaaattctagtttcacttcctggaaaattcgagtgccaacagaggaaacgaaaaggtgtacaaactcagaatcacgaactgaccttcgacgacgaacaacagaagttttcacaaccggagaaaacaaattagggttcttaagatgacgcctagttcactaaatcggagatcgatcaactaaaaacttattataagaacgttcgcacaactgtagaaagaatctccgatttgctcaaggagatcaaaacccttccaattcgccggaaaagtagataaagcggaggtttcgtttactaatagtaatattttaaattactccttttagtaatttgtatttacacattatatctccatgatactacctgagtttcaatttgcaccaaaatgttttggatgtttcaatttgatccttcatctttaatttgtggtaccacaaggtccactaggtccacccaacaagaacatgaatagacattgtatggctcgtgatctcatcaaaaccttctgtccctacaagctatatagattccatactacaaatcatgcaagtaacctcaaatcttaaaaaaaaattaatcaaaatttgactacctacctgattacaatttgatcattcatttctttgctaatcttgaaccaaaattttgactaccttcctgattaactctcaacttaaaaacaatacggaaggttacacaactttccaaaaccttacaatcatacaaaacgttacaatcatacgactaataacaaatgttacatttaattttttttcgtatgcacaataaatttatatagtttgcgttacgaagactacaacggatatatttaataccccacttatatctatacccaacacaatgaatcaacaaggtgagatgaaagattttattgatgggtatatagaaactataggttataaataccataatgatgaataaatctataacggtggaattcacatgaagctcaccaatttcacctatatacttagctctcaagatagactactaaaaaagaccccaaatttagcaaaaaatggaagccttgtggaagttggaggagaaactgaagctaactacgaaagaagccgttgtgatc

SEQ ID NO: 419 - DNA, 79279 bp, Arabidopsis thaliana
aagcttcttgtctgctcttcatctttttttgttgttttaaccaaagaagtctacaaagtgaagctctattaatggtcctagatctaattttgcttttacttttctctttttgttcgatatagacattgttacaagtcctattcatccacttcttcacttttttttttgttatcttactaaagcattggtgatgaatctgcagatggagtctgtgaaaccattggatgttgtttcttcaggaaaaggaaaactcagacgcacatttgctaaagtcatcaacatgaaaaagctaaccggtgttgttccagaaggtaacaacaaggttgaaagagtgaagaagagccaagaaaaggtgaagttggataaagatttagcaaagaatgctgcaaatctgtctgagtcctttgacaagctggaggaagagtatgagaaaagactggccatggaggctcttcttgcaaagctgtttgctacgatttcttcgataaaatctggttatgcgcagttgcagtatgctcagtctccttatgatccaaatgggattcagaaagcagataacttggtagtagcagagctgaagacattatcagagctgaaacagagtttcttgaagaaacagcttgatcctaatcctgatagaactcttgttcttgcggagattcaagagctaagaagcgtcttaaagacttatgagatcatggggaagaagctggagtgtcagttaaagctcaaagactctgagatcatatttctcaaagaaaagtttcaagaatccatgactcagaacaagttgatggagaagagattaaaccaaagtggccaactttgcaatccattggatcataatcttcatctatcggcggtaagttcgacccatttcgttacttatctgcaccacactgtcaaatccatccgaggattcgtcaagttgatggttgagcagatgaaactcgctgcttgggacatcgatatggctgctgagttaattcagcctgatgtactctattacaagcaagaccacaagtgttttgccttggagcattatgtctgcaagataatgcttgaagcttttcaactaccttacttctcaaacgaatcatcgaagaagacgagcagagaagacaaagcaatgttctttgagagattcacagagcttagatcgatgaaaccaagagagtatttagcatctcggcctaaatcaagattggctaagttttgcagaactaagtatttgcagctcatacatccaaagatggagcaggcattcttcggacatttgcatcaaagaaaccaagtcactgcaggggagtttccagagacgagcttgtgcactgcgtttctcgaaatggcgaaaagggtttggcttttacattgccttgctttctccttcgatcctgaagcttcaatctttcaagtatctagaggttgcagattctccgaagtgtacatgaagagcgtgtcggaggaagcgtttttctcaccggagcaagaagaaagctcgtcggaaactgaaccgggggttgcgtttacggttgttcctgggtttagaattgggaaaacgacgatacaatgtgaggtctacctctcgcgttcatgtcaacgccgtcagagcagatagattccggtgatgacgtcacaggggtattagggtaatttatcttggggaactttttgggggtaggaaaatatatgagagaaaatttgttgaccgttggattaagagaagaggcaagtatgtatgttgcttgttgagatttatggtttttatttttatctttgtcaatattagagcagagagagagtcagaagcatctcttagctgttttccatcaaattattagatgttgtcactaccttatatcatatgtaaattattcgtaataattagtaactattgctattttcattattcgtgttatgttgtagttgatagtataatatgatatcaatatcatagtagtgaatcaaagaagaatgtacatatgattaaagtgagtaattcttgtatgagtggaatggagatatcagatatcttctaaaagtgatttcgaatcatggacttgtaaaatttttcttaatttttgactttttgatgaccaattcctctatttatttatttatttccacaaccgaccaaatattttcagataatatactctgatgggtccattgtattttgggccaaaaagcagtcctctattttatcaggatcagtgggaattgactcggttttgttctacttgtaatgggttatgacaaactgagaccaaaccagccattttacccctgcattcttattacaaaacggccaatgttatattgtcaactgaaatagttgagaaatacagtttacaaaaatttggcacctaaaaagagattgaaacattctacaaagcgataaaactttactttatctttgaccggacaataaatgataggcatttctagaattttaggaaaaaaatgaaaaaaaatcaaaatgtgaacgttgatacaataagaaagtcggtgaacaaaaaaaagataatataaaagcataatatagacaatataaaaattggttcgaccatcccaaacactacggaggacccaaaatatgagccaagagacagcgatagcaagcttcaagaaattccaacagtcatggatcgagcagctacgaaaccacctgaaccacctccgctccgcccaaaaccatcaccggaactctgctaccggtgatgaggaacggttaagggaggctgtggacagagtgatggaacactttagagaatatcacagggccaagtgggctgcgacggataaagacgtcatcgaagttatggcttctccttgggcttcagctcttgaacggtcgcttcagtgggtcggtggttggcgaccaaccaccttgttccatctggtttacactgagtcgagtattttatttgagtctcgtatcgttgatatacttcgtggctttcgcaccggtgatctcagtgatctctccccttctcagttcaggttctacacgaacccctaattagctactttgtttactaatcacaactactagtaaagatttttttatctaatttaataaaatatccttaagttacgttgtaatttgattgaagtaatatcgtgatttgcgcgtgttattgtttaccaaaactaatacaggttcactcctacacctagagatatcaaatatgtagattagtttagaacatacgatgtttatttgtttacttttcttaccaaaaatgttttagaaagtgaaaaacacatttgagggataacaataaatttgagagattaaaacacttattttactttcttttttttcaatgtgtaaacaataacatatggactaactaaacatattttgattacttaatatttaatatttagggttccatttgtcaaaggcaggacggtaagtgagctacaatgtgagaccgtgaaggaagagaatgcgataacggaagagttgtcggagtggcaagacgatgcgagtgaccttgtcatggggacatcgtcagatcccgaccagaggatccgacggctagcagaaatcgtccaccgaactgatgatctgcgactgagaacgatcacacgtgtggtggaggtcttgagtccgctccaacaagcggagtttcttgtcgctgcggctgagcttcgtacaggcgttgctggttgggggactagccacgaccgtcgtcgaagttccgaagtttaaagctaactaaaaccggtctaaaggtaatgagaatcgaggaagaaaaatagtttttggatattaattatatgtttttaccatgtttttggttatccagactgagtttggttttacatggttatgaaaacaaaaaaaactcatatgttatgtctctacggttgcaataaagatcaacccacgtgtggtgcttgttagtttaccttttttagttagaattttgtgtgtttgattttttttatgaggtaattatcggaccttattggggcttctgatagtttgtatataaaaaatactaaagacagagaatcggggacatgggtcattgttggtttctatagaccaagtggataaacagaaaacaaaaagtcagctacagaaaaagacatgaagtgaacgtggcactgccatgtctcttgaagacatgcaagaggacacttggtgtggtacgcgtcctcctatcacggtgtcgattccaaacattttgtttggtttagttttaagattcttcttcgaaagaatctcatttttaatcgaaagatatgatgacatgacaaatttcttcttacataaatttgctcttataatgtttattttcgtgtaagttttatatattttctaaaatattgaacttaaactagctagaccctttataaaaatactatcagcccttttatataatgctttggtgacaacagaacgacaagaaaaactgagaagagacctaaaaacgattatagcggttttgattggttgaagatgtgtcacaattttttttgtttatttcgtttcatttttatttaatatgctagtaaacctgttttttttttttaaaactgtattataaaaacgtgtcttgttaggcctttaaagcccaaataagcccaatgaaagaggaaaagaggagacactgagatttggcccaaactaacgcatatatttgtgttttacatttatacccctatgaccgacatcaatttaccgacagactctactttcgagaatggcgggaacgtgaactgaaccctaatcaccttttttctcgattccccaccaatggctatatgattacagtagcccccttcgtgtctcttcgtttccagttccctctttatataataaatcgctccactctctttttccgagaaagaacacagtatctcgtctacaacacctgtcacattttgagaacaacggcgaaaacaatgccggtggttgctgagtacgcgaagtcgaatcggtcgtcgtgtaggtcatgttcgaacaagatagctgtgaaatcgcttaggttagggttgattagcaaaggacgtggcggggttgacatgaccaggtggcaccatttcgattgttttccgactgattctgagtcgattgcttccgttgatgatattcaaggcttatccgctttagaggttagggtttccttacatttctgtattttggactccctaggttttttttcgtctaaagcttttcactttcggttatttgtgttaacgcttgtgcttatggttacagaaagaagatcaagatgctttgacgaaattggtggaacaatgtggtaaagtacctgcaaaaaaagtaagactttggaaagtgatgctctttagtctcatttgctcatatctacttttgcctaactgcttgtatcggtttaaacttaaagcagcctgatgagaagaaggggaaggctaaaaagcatataatggggccgaaggggcttacgaaggcggcaacatcttcaaaagttattgctgataatgcgaaatcgagcagatcatcatgcaacaggtgttctcagacaatcgtttcaaaggatctgagagtggggctggttactgaagactccaggggatttgatataacaagatggcatcacttgggttgttttcccattgattttcatccaattgattctgtggaggacattggtggatattcatcgcttgaggttagtttttgtttacatattaggaattttcagttcagtgtatagagcttttggatgattgcatatgacatgtggtaacttcgctaacaatatcttttttatttgattcatttgtcatactcaacagaaaggtgaccagatggaattaaagtatttggccgaagtaaacaagaaggataaaactttgatagatgtactatccatatcccttgtcataatattatagtctgtttctgcaaatgtagagaactttaccatttcaggctttttgaaactaacttcttacttcctttgctggcaggatgtccagaagatggatgaaggtgatgatgaagctatagctgataatgagctaacggaggagaccaaaaaaggaaaacattctcctgttgcaaaattggtggaacaacctggcgagcctgcaaaagaagtaagttctggaagcaacaatcttcttttatgcgaggaagaaatgatatgcagacttcagtcttattttccaacctagatgtagatttttgactgaaatacttcttttaactgcttgtatcggttaaggatgaggatgaagagagtaaaaagcctgcatcagatgaaataagtgagcagaagactaaggatgtgaaaaattctcctgattcttcaaaagttatttctgagtatgcgaaatcgagcagatcaacatgcaagaagtgctctcagactatcgctgcaaaggaactgaggttggggctagtgaccagaaacttccgtggctttgatatgaaacaatggcatcacttgggttgttttcctgtcgactctgatccaattgtttcggtagaggacattggtggattttcagaactgcaggttagtctgtatttaaagattcaggggatagagcttctagattattcatgtatcttctggtaactaggatcatttgaaacagatgctatttggaatatagatgttggtatatagttaatttattgtcaggttggcatgacatcgttgtcagtgtcgtgcaaaattaacacccaaacatgtatgtattccttgtttctgctaacacatctttatatttgatttatttttaattataaacagagtggtgatcaggatgcattaaaggaattggtccaacaatgcgggaagcagactttggtagatgtaatagcaaatccccttttcataatatttgttttctttggcgaaagcattctgtttaaaagttttatcatgtcttaaccagaaaataattttagaatttatgtctaaactaacttcttacttcatttcgttgcgggattgcagaagatggatgaagataatgatgacactgaagctaaaattaagctaactgaggagacaaacaaaagaaaacattctgaggttaataaatagcaataatcacatctttttatactataattttgttaaactggaatattccttgacctgtaatttattgtttcttataaaggttggggagatggtggaagaagatgaatcgctaactaaagcgaaacaacagatggctaaaacacataaggtatacaagcaatgataagtattgaataccttctaatggtagccactcttcattgtggagaaattatacttaatgattttaaaatattgtgttatgcaggtgaacatgagtgagtcaacttctcaggtcgaggttgaagcagaaatcactctttcagcgtctgatgtgaaggataagtacagggtaagcacttatagtgtctagtaggttaaagccatgtattcctgtgttaaatattcttcttggagtttgtagctttggcatttgatccctttttcgagttcttttatttttctggctgctaatcttcttgtttctcaggatgccaatctattaccaaaatggaaagcttttgagacagttatattccttgagcgggtgagaaatcatcttcagatatgatgtacatgatggtaatatattatggcctaatggtatgttcctttgttgcattttaacaggatgatggtcttaatgattcagaaaaaatagctgcatttgactttgatggatgccttgcaaaaacatctgtgaaaatgtaagtagctctttggtcacccataatattagtgtgttctctgtttttatggacatatgggcttttcattctatctcaagtgattgcatttctgcaatttttgtttatccttttaatggtgttatgcacgaacctcgtctttcaaggaaaatgagaaacattgtaatgtgtcataatgttttatattcccttctttctcagagtaggggcagatgcatggtccctaatgtatccttccattcctgagaaactgcaaagtctgcacgatcaaggctataagctggtattttattttcagctagaattaagtcttaggtactcaatagtattgtttatatagattatagagtagctgattttaaatgttcaacaggtcattttcacaaatgaatccaacattgatcgatggaagaacaagcggcaagctgctgtagattcgaaaattggacggctcaacagttttatcgagcgcgtgaaggtccccattcaggttaagtgctcttccgttttcataagtaagaacgtgattgtatctattcaagaacactgtgtcaacaaaccctagctattattatgagtaatgataagaaactatgatgtattcaatgccttgttctgtacttagttcatatggctttaatgatttgttccggcgtataggtataatcagagagaaaatagtgattctgtcttgcttgttcttattagttaacaccccaaattttcaaagtcttaaaagtgccaattccctacattgttgctgatactgtgaagattataaatggttttgttctgcaaacaggtgtttatagcctgtggagtctcaagttctggtggtaaaggtggtaaagatgacctttaccgcaaacccaaggctggaatgtggcaactcatgaagaagcattttaactctggaattgcaattgatatggataagttagttttctccccacctgctcctaaaaacttgaatttacctgaaacttctagcaatgctggaagattacactcatttgtccaccagccttactgattaaacactccgtttaagtccactagcacattttttgttgttgatactgacatctgtgctatgctcatcagatccttctacgttggggatgcagctggaagaaaaatggatcacagcgacgctgacatcaaatttgcacaggtatttattgcaaacgtcagacaatacccatcctttattttataagtcaccctatttacttttctgactttcctcatagacaactactttctttggttgcaggcgagtgggctaaagttttttaccccggaggaatactttatcccctcaagtacatcgccagggacttagctgtatcagtcttgtgcttgtgtttgcagtttgcaacttcttttgcttttttttttgtgatgaaactagtagctagcttttgtgataaaactagtagtgtgcttttgtgatcaaagtattagtatgtgttttaactctttttgtatattactgatatttaagcgtcaactagagcttattgaaccaggaaaaagaaactcctttgaacaggcaggattgcaaagtcaacataacaaaccactgataacaaaaaaagttcaaatttccgactcatttacatacatgggattgggaaagtttaaaatctcttatgatgctaataacatacatcaaaaattcactctccttttcactctttaatcagaagactcagacatgaaatcactccttctgaccaatctcgccttccaaaatggcgtgtcttgtcagaacaatctctttgacaaggtttctgtaaacaaagggcctaacagcagcacggagaaagagctcaggtggaatcctactcttctttatcttcttcatccaccttccatatcctactgtcttccattcttctggcttcacttttgccttcttacctctcatttccaactcatctccttcaatctctcccttttctcgttcctccaatgcctttaactgcttctcataaaacttatctgacaccaccatactcatctccgcaagcttctccatccgctccgcattgtttgtcgctttgttgaattgctcttcccagtacctctcatcctcttccggatccgactcctctatttcatcttccaaactgtcttcttcaacgtttccctccacatcgacaaccatgttatcatcatcatctacttcttccacctcaccatcatcatcatcatcatcatcatcatcatcgtcattgtcagcttcatcttcaatccattctgagaactcagccttctctgagcttccactaatgctaatctcatcctcatcttcatctggagcatcacaccctaactccatctcctccaactttgctttccattcttttgtatacggatgcaacagctcgttcgggtggtttccaagcaagaacttcaacactctggacttcttttcatcactcaacttctcataagcattcaccacatcatccacgaaagctgtctgtctcaccttcaacatcttacacaatcctccgtaataagtactcaactccactctaccttcatcatcctccacttcacacacaaatccagattccgtcaccgggtttaaataagggataagcgagttaaagaaatcttcttgaggctcaaacctacactgaaacacaggcttcttcacatacacaatatcaggtctaaaccaagccgcacattgacatatcaaagaccgagacttgttccctaatctccccatcaaattccacttatccaacctctgcttcttatccgcttccacaaccacttcactaaccaacgtccattgctcccacggtaactcactgagtctccatttcggatgcctgacaaacacccaaaaatacctcaaaccaacattcgaatccaactccttaaccctcttctgaaaagctatattcatctcatgctgctcaatcttctcaaactcttcatgattctccacttcaccaatcatagtaacacactcatcagagatagtaccacgaaccggatcaccaaccacaacaccacgccacgagtaaggtccaaactctccatacttgaaccaatcataaggatgacgcaatctcgggtcatccttatccataaaccgaaccatcctatcgtaaccaagcccaatcatctcaagctcctcctcagtaaacttatccggatgactactgagaatctgactccgactcttgtcagggttattatacaatctataaaacaaagattccgctagcttcttcgacttttcacgagcattcctcttcacctgcttcctcatatccgaatctccttctatccttccaccagatgaacctcctccaagctttttcttgctcctcccggccaatgcccgcacgtctcgccggaatccaccatcttctctgagcaaaagctccgaccttttgacactaaacgcataattcctctcggtaattgccggtaaaaccgaaacgatccttcgtaccccggaattgagtggagatttacggaaggaaaagctagggttcagggttttagaaaaggataaatcttgactcagcatttcttctcccgacacagcttagagatgacgtagcaactgtaataatataagccaaacgatacgacggcgttttgctactgcgccattagtaatcagaaaaagttaaaaaccttgtctttttttttttttttttggttcaatagattgattagcgatggcgaagaggatccacctgacggaactaggctgcatcgcgtgtgaggaacttactgagctcggtgcgggtaaagaaggatggctcgtgaacaatccaaaccttttgagtgcacttgattctcactctttagccctagccaatcgatttctcatattgattgtgaattggggtgatcctgatgcgcctcgtgtcaagatcagacctgatctgtctccgattgaggctgagtcgattacggcgatcgagtggttagtgtttgatgatgtcagagtcgtcgttgcggggacttcttgtggatatctcttggtttactctgttaccggtgatctgatccataagcaggtgaaattctgaaactttttggtctgcattgttaatttatcgataggtgatgtttgcttgaaatgctgaaacataggttttatgaacattgttgtctcaaaacattgtgcagttctttggttgggtacttgaagagatctttagcttagttcaagtgattttatggatgaattacttattttgtatgtgtttacagattgtacatcaaagccgtatattaaaaataagagttcgaggaactaagaaagatttgatgcaagagacatcctctgaggagatttgcattgtattgcctggtgttattgcccgctttgatggctctaacattcaggtattgttaaaaaaacattctattaaagtataatttgtttgaggtgatgttaagctaagttctgagatttgttttatttctgtcttcataattgtagagtatggttcagaaatgggttcaagagaagaattcgaacttttgggaccaaaagaatagaaagggagatgcagaagatactggtagcttgtaccaacgtctaccgtatcagatatggaatgtcaacaagaatggtgtgtgtgttgatgctactgtcactggcgtaatgcctcctccgttactggaactccaggtgagactagtgatgtctatttgattgtttcaaactaggaacacactgatactgcggacgtttttgaagtttattcctgtttataaatctggctgattttattctttgacagtcaagtcaacgttattattgtgcagtgaccattggagaggattctgtaatctcagcttacaggttggtaatatcttcattgatgttttccataggctgctttcatggtgttcttttgttggtcaaagaaatcttttatgatcacttttgttaattagagttattatgttatgtttctttggaaggctctcagaagatagagggagatcacttgttggagcgattctatcaaaagttgtgcctgcagctgcttcaacgatagcttctttctctaaactgatctggagaagtaatgatcaatcaccaaagcgaaagccagaagccaagactcagtcattcgctcgaggtaggtttcatgggtctttaatccctacaatttttgaacatccatctgtggtgcttaactttgttaaaaatgttggtacagcatcgtccttgacatgtataaaggactacccaaggaaaggagagaagctcacgttatccccgagtggaacattagctgccataacagattctcttggtcgaatacttctgctagacactcaagctcttgtagttgtccggctatggaaggtttgttttaacatcttaaatacttatttgcttaaatttcctctctgttttctttaaaatttgaactttctttgttagggttatcgtgatgcaagctgtgtgttcatggagatgttagccaaaaaagataaaggaaaatctgtgattcacacagaaccggtaaaaagtgattattgtctatgcttagccattcatgctccacgcaaaggcatcatcgaggtaacaacattgccatctctcaataacattatctttgttttgattgtattcttgattgattatgcactcaattgaaaccaggtgtggcagatgagaacggggccacgtcttctaacgattcaatgcgcaaaaggtagcaaattgttgcagccagcgtacaggtttggatcaaattcttcatcttctccttacattcctcttgaagtcttcttactcaatggagattccggccaagtctctatgctcaaccgatctctctcttaaaatatctctaaactaacatatcacgaatttgatatattcaccaactttcttcagtttttttctcaaaccttttgtcaatagctaagccaagtctctaattgattataagtgcaattgatgaacaagaactttgcaatgattcttaatgtgtagtagtaatcggtgtttatgtttatcttttgatagttggatttgatcatatgattgtaactagatacctaccgtctatagctttgctttaaagattcaaccaatagtttttattctatacgttttgctatggattttctagaaagtaacaatatatttatgatagatcttacattataaataaatgtatgtgtttagtaagaaataactcaataagtgtgcatcacaaaactagaatcaatgatcgaaatggatacagtaaagagagaattttgaatgatcgaaattctcgagtttctcaagtgtgtaggagggtaatttggtcattgtagtatatcacctaatggaagctctttttatattacaaggaatgttaaataatgatcccaagaaataatcaaatcagcatgttaatcactgactataatgtaaggttttgttttcttggaagcatcttaagtaaataaaaaaaaagattagtataataataatcattaagagaggctctttctttaaaatcagtttgattaccagacagagaccaaaagcaaaaacgtcatgacttcctctcttcctccactcatcttcttcttcaccgtcttcttcgtccactctctctccgccgtctccgatcttcacgaaaccagatcacgtttcaaacctcctcagttctctcctctcttcttctcctctcttccccaaaacgtcacaaaatcccctactcgctacttcgaggttcaaaaacctcccgttccaaatctcccgacagctcaacaaccgtgttcgtatcaaatcctccaccatgactttggctacacctacgctaaaccaccggttctctccaattacacactcccctctcactgctcctctcgagaattctccaaaatcgtcctcgaattcaaatccaccagccaaggaagacaattcgatcgtatcttcggtgtttggcttgacggcgttgagattctccggagctgcaccgccgagcctagaccaaacggaattgtttggtctgtcgagaaagatgtgaccaagtatcactctttgctcgtcaaaaacgagactcagattctctctgtttatcttggtaatcttatcgataaaacctatactggtgtttaccatgttgatgtcatcttccatttctatcaatccgaaagtaatcttcaagatgtttctggttatagctcttctaaagctgatatgatcctgccgatttcgagaaatcttccgttgaacgatggattgtggtttgaaattgtgaattcgaatgataccaagtataaggagtttgagattcctaggaatgtttatagagctgtgcttgaggtttatgtttcttttcatgagaatgatgagttttggtatggaaatcttcctaatgactatgttactgctaataatcttagtgttgctggtaatggaccttttagagaagttgtggttagtcttgacggtgatattgctggtgctgtttggcctttccctgttgttttcaccggtgggattaatcctttgctttggagaccaattactgctattggctcttttgatttgccgagttacgatatcgagatcacgccgttcttgggaagtttgttagatgggaagactcataaggtggggtttagtgttacaaatgctttgaatgtttggtatattgatgcgaatttgcatctttggttggatcaagagaaggagattgttgaagggaaggtgttggatttcagtagaagctctctggagattagctctgtctcggattttaaaggcttgaatggaaacttcaccacgaaagcaaagaggtcgataacttcggttgggttggttaaatcttctcatggggacattataactaatgctaatcaagaatttagctacgagaacaagatggttttaggtaaagatgggaacttgcagatcatagatcaattgatccaagctgatgatcgtattcatgccaagagagcctccagagagatctacgcagcgaaatctatcaagagttttcctttttacctcgactctgacactttggagcagcagaataacacatatctggcggtagcgaatgtctcgatggcattcaacgaggagagatcagagagcgacaaagggttgatgagaacgtttaagagcaagcttgaaaacaagcaagaagggcaaggagtaatggtggtgaagaataacttagtggtcagtggatatggaagcacacaacaagtgtataactatgttggaagtgaccaatgttacttcagaaacatcagtagttacaactacactattctctatgacaaggttgaatctgtttgcaagaagaaaacactgaagctgcctccacggctcgagcatttaccaagacaacaccccttacttgcttgatatatgaccagagacagtggagaaagaaagatcacaattaaaaataaacagttccttaatgtttcttcggttttttcaacttttcatacattgtctttctggtcaacaaggatcacagtgaaccggtatctgaactgaatgtaacagaaccggttaatgtcttaatgatttatcaaccgatcgatttgaatccatctcacagtgcaaaacagaatctgaattgtgtttgttctgcgcaaaacactctgctgtgacaattaaccgatcaatctgaattgatatcaaattgctcaataccgaaccagcgaatcgtaccggaaatattacccccaaaggccaaaggagaagcaacaaagaaatccggaaggtgggtcctagtattatccagatagatcatacgtggcatcattacagccgtcgaagtgattgacttaaaaaggtcaaaccttgaatctcatctctctcgtctcccctcggcgataaggaaatatctaaccagaccggcccaaggagcgggcaaaatcagaaagcatttgatcttcaaactcttgggttcttctctgattgaaaatgagcttatcatcgccaaccaggtccgataaagttccaatttttgttctttcgattactgttatgccaattttagtactttgcttttgctaaattctgttgtagacagtgcttgtagctcgtccagatgttactcctcgggattatcgtttccgattggatttggatcgaatcccatcaatgtgggattggtttgttacccaaaaagatacagtattgctgctcggaagttcgtagtggcttgctcctcctcctcttccggtacataatgatttatgctttttgatattgaaatgattttagtcgattcgggttactagctgctcattggaatgtcatatttttaattaagcctgagtttagatgttgagcatgaatgttgcccttgaaatgctctttttttcgcttgtgagcttgtggaatagattgaaatttccagttttgggtcacttcacttgaaatttagctaatcaggataaatgaatctgtagccttatacttttgtaagtctaaagaagctttctcacatttacacattttgttcaaaatgtgtaatcagatccacttttggttaaggctgcaaaagggcaagccataagtcgtcctccagcttggatgatgaggcaagcaggaaggtatatggctgtttaccaaaagctcgccaagaaacatccgtccttcagagagagatcagagaacactgatctaatagtggaaatctctttgcagccttggcaagcattcagaccagacggtgtcatcattttctctgacatcctcacccctttacctgcattcggtgtcccttttgatattgaagaggtaaaaggtcctgtaatccaatctcctatccgaactgaagaagatatgaagagattacatcccattgatttcgagaaactacagtttgttggagattctctcaagattttgagacgagaggtggttttcttcttcttcttagccttcccctagacttgaccaaatgtcttccagtttgtgaaaatggattcttgttttgaaaggttggggaacatgctgcggtgttgggtttcgttggagcgccttggacaattgcaacatatattgttgaaggaggaacaactcgaacatatacagtcataaagaatatgtgccacactgcaccagatgtattgagagctctattatctcatttaaccaaggccattaccgagtatgtggtttaccaagttgagcacggagctcactgcatacaaatattcgattcctggggtggccaactgactccggagatgtgggagcgctggtccaaaccatacattgaagaggtacaattaaatgctttcaacttgattacttgaaagttgaaacattttcttttcgcgttttaacgttttttttttctgccatttgggctcgccagatcatacatgctgtaaagaaaagatgtccagatacgccgatagttttctacatcaatggaaatggtggccttcttgagcgaatgaaaggaactggagctgatgttattggacttgactggactgtagatatggctgatggaaggaggcgattgggaagcgaggtaagtgtgcagggaaatgttgatccagcttacctattctctccgcttcctgctttgaccgaagaaattgaaaggtaggtcactttgttcagctgaataaaaaagtagtgcttataattcaaattaagaaactgaaagaaatgtatgttttgtgtcagagttgtgaagtgtgctggaccaaaagggcatattctcaatctaggacacggtgtcttggtagggacaccagaggaagccgtggctcatttctttgaaaccgctagaaacttggattaccaaacacttttccaaaatcatgttcctgcagaaaaagctgaacctgaattggttgtctgagaaatggtgactagacaagtgcctacgccgaagaatttgctgtttaagttttgtgaacatatgtctgaatctcttaaacttggtgcaggaatgagagaaaaagttccatgtctgacccttaatcgatgctagagttggtaacttgctatgagatatatgcgaagctgtccagtttttgtttggcttgcttgaggatttccaatcttctggaccaagctctgcttaacgtttaacaatgtattgagttgctcctaggcttcaaatgttgctgcttcttttggagatatgactctggttaaagtttaaccaaacattcatttatctggttaatctcaaacctttgctatgtttgttatcccacttttttcatatggttctttctagatctctgtatctggtgtgtcttctctcgtgatctcaacattcgatgtgaaaccaggtagattgtaatattgtatcatagactgcaaaagataacgcaaaagagaagtctctgatctcaacctgaatcagacttgttaggagtccctcttgtttggtttaattcaattttccggttcggatttctggattataaaccgaattaactacaaacggaaaaacgtaccgcgttattgcggtaaccagcaactttaattggcctatagtagaatcaaatgaaaagaaaagagcaattttttttttttttttttggttttttggttaaagaagaaaagagcaaattggaaaaacaaatagataagataatttatatgatttaaaagtcaaatgtaatcacaacatataaattttaacttataaaatatagtcacaccattgcctcatcgtatttgctttcatgaatcatcccaccacttgtaagctttattttattaagaatgaaaacggagaaatataaattgaacactatatactattgtcgtcaccctccccgaatgtttctgataaataatgttaactatcatctaatacgtcaaccggattatcaccgacactgaccccacacctaaccactgatgcacaagtttatattagtgtaggtatcatccacaatatattatccaataattgaaccttgttaatgtctttggttcataaagcgatctataatcaattcagcattattgctaaaattcaaattaagaagacggcatgatttgttaaaaccataaagaaatacaaaagggtcaatgataaaactgtttaaacgaatcagtctacccaagagccgtctctcgaatactagttttaaattcataagcgtatagagtttagtgattccagaacactttacaggccaaaatctaatatttcgatattttgaaacgacatttttagtcctataattaaatttgcaacgtattagattacttttaaaatgtgatactgcgaagaaaatgaatcaaaagattgaatcgaatattcgaacagacggacaagaacccacgaagcgatacagatcagaaactctgcttctttttttaacaagagatcacaaacttggttgacttgagttcatattataatgacgtactcagtgattcgaatattccataaatagtcgtaagaataaagaccttaatgtatacattgttcatttcgtatgccacattgacgaagatcactgatataaatttcaattatataaatgtaaaataacaaaacaaaaagttacatgttatcaaatagtgtcattagctaaataacatgttacttggccaccacatcacttttgttgagaaatttctaaaatttggctatttagtgcatataccctttaaaacttgttgtaaaagcaaggaagaggaaaaaagattgaacctatagcaaaggaaaaagaaaagagagtacatattcttaagtcttgattacaatattttgttcttcaacatattctcttagagttgagataacataaattataatatagatgctctattgggtagcagtagatagaagaacatatgctgaaaatcatttttatagatctagcaaatcacctttataaaggatccagatttttttttttttaactttttgaaagtcaacttgatcatatgtgaaagttagagtcagagatttatgcatcttcgtgcatagacaaaatgcatgcacgagctcacacgatcctgtttttttttcttaatgaggtaattttcttgctgtcatttttttttctaaagttaagattcatataaaaaccatatcaggtaattccttaattttgtgtaataattaagaaatcaggatcattagatctttgaccaccaaaactcaaatttgttcccaaatacactcagttaaagtactatctttaatcatttcatattcgttactttgtaaattagtacaaagtaagtaacaaattttagtttacccaatgaaatggaatgaagttaatgaaaatattcgttcttttagaatattcttctgctcttgacagtgtttaattatttaattttcttacttgaaaaaataaaattgaccaacaattatttttcttacctcatgtagataacttacaaaataaaacatatatatatgtatatatatatttattttcaactcagaaataaataattctaacgaaaaaatatgaaataataaaaaaatctgacttaaaaagcgcgcatcgctcatgccaacacactccctcgtctataaatacttcactctgctttcctcaatcacatccatctctgaatctgattccacatcttaaacccttattccctaaacatcgaatttggttccttctcccacaatccgcagagatttcttcttttcaggtttgtcaattcattttttttttcagtttgagttttgttttgttttttcgtgattttcggtcagtctaccaaatcccctgtttttccggcgattcagttgtcaacagattttgcttttctttttccctttttgtgtaaaaaaactcatttcctttttgatctgatgattacagaagaagtaagagggtggcgaagaagatttgattgatcggcgataatggcgggtcggaacatagagaagatggcatctattgatgctcagcttcggcaactcgttcctgctaaagtcagtgaagacgataagcttgttgagtacgatgctcttctccttgatcgctttctcgacattctccaggatttacacggcgaggatctccgtgaaacggtacacatccttcttctttggattgaatcgatacccatttgctagagatcctaaaaatctcatctttttgtttcgattagtgattttaagtttacccgattatttaacctacgtgttagttatgtataaaggatggaacttttttgtttagattcatttatgtattgataaaatgatcttgtgcacaggttcaagagttatacgagctttctgctgagtatgaagggaagcgtgagcctagcaagcttgaggagctagggagtgtcctaacgagtttggatcctggtgactcaattgttatctccaaggctttctctcacatgcttaacttagccaatttggctgaggaggtgcagattgctcaccgtcgcaggatcaagaagctgaagaaaggtgatttcgttgatgagagttctgcaactactgaatccgatattgaagagacttttaagaggctcgtttcggatcttggtaagtctcctgaagagatctttgatgccttgaagaatcagactgtggatctggttttgactgctcatcctactcagtctgtgcgtagatcattgcttcagaagcatgggaggttagtttttgacttagttgttttctggagagagtgagaaaactctgtttgcttgtgtgttgacctgacattaaatgttttctcaggataagggactgtcttgctcaactctatgcaaaggacattactcctgatgacaagcaggagctagatgagtctctgcaaagagaggtaagaactcaacctcactggattgtaacatgttgatttgatataatcctcggataatagatagattggcctttgaaactctccttttttgtttagattcaagctgcattccgaacagatgagattagaagaacacctccaaccccacaagatgaaatgagagctggaatgagttatttccacgagacaatctggaaaggtgtccccaagttcttgcgccgtgtggacacagctctgaaaaacattgggattgatgaacgtgttccttacaatgccccattgattcaattctcttcgtggatgggcggtgatcgtgatggtacatgcgtttttttggattactggcaaacgaatcactctcttgttttctcttgttcaccctctaatcgtcgtatctgaatttcaggtaatccgagggtcacacctgaggtcactagagatgtgtgcttgttggctagaatgatggctgccaatctctactataaccaaatcgagaatctgatgtttgaggtttttatctctttttacttgtactcatttcccggttttcattctttaagattctcttgattcattcgtgttcttcttggcagttatctatgtggcgttgcactgatgaattccgtgtgcgggcggatgaactgcacaggaactcaaggaaagatgctgcaaaacattacataggttagaagctttggacattttcttcttaaaagaaacacatactgcaagtatacaatggtattggttttgcattcttaacttattttttttctttaactcaatgcagaattctggaagacaattcctccaactgagccataccgtgtgattcttggtgatgtgagggataagctgtatcacacacgtgagcgttcccgccaattgctgagtaatggaatctcggatattcctgaagaagctaccttcactaatgtggaacaggtgagcaacctctatactctgaatttgttccttactaaattgtttcctgattttaacaacttgttagttcttgccattagagtttctatcattatccagccttacacttgtttccctcaataatattcacggaattcaattgtgtttactgttcttttattctatttatgcagttcttggagcctcttgagctctgttaccgatcactatgttcatgtggtgacagcccgatagctgatggaagccttcttgatttcttgaggcaagtctctacctttggactctcccttgtgagacttgacatcaggcaagagtctgaacgccacacagatgtcttggatgctatcaccaagcacttggacatcggttcctcctatagagactggtctgaagaaggccgacaggaatggcttcttgctgaactaagcggcaaacgtccacttttcggacctgatcttcccaaaaccgaagaaatttctgatgtcctggacacattcaaagtcatatctgagctgccttcagattgttttggagcttatattatctctatggcaacttcacctagtgatgtgcttgcggttgagcttttacagcgcgaatgccatgtgaaaaatccacttagagttgttccactctttgagaagctagctgatcttgaagcagctcctgccgctgttgcaagactcttttctatagactggtacaaaaaccgtattaacggtaaacaagaggttatgattggttactcagattcagggaaagatgcagggcgtctctcagctgcttgggagctatacaaagctcaagaagagcttgtgaaggttgctaagaaatatggagtgaagctaactatgttccatggccgtggtggcacagtcggaagaggaggtggtcctactcatcttgctatattgtctcagccaccagatacagttaatggctctcttcgagtcacggttcagggtgaagtcattgagcaatcatttggggaggcacacttatgctttagaacacttcaacgtttcacagcagctactctagagcacggaatgaaccctccgatttcaccaaaacccgagtggcgtgctttgcttgatgaaatggcggttgttgcaactgaggaataccgatctgtcgttttccaagaacctcgattcgtcgagtatttccgcctcgtaagtattcattcatatcaatccaaatttcaccaaagtttttgtgtgttttaagtacctaaaaccgttggtttggtttgcaggctactccggagctggagtatggacgtatgaatattggaagtagaccttcaaagcgaaaaccaagcggtgggatcgaatctctccgtgcaatcccatggatctttgcttggacgcaaacaagattccatcttcctgtatggttaggtttcggagcagcatttaggtatgcgatcaagaaggatgtgagaaaccttcacatgctgcaagatatgtataaacaatggccctttttccgagtcaccatcgatctaattgaaatggtgttcgccaagggagaccccgggatcgctgctttgtacgacaaacttcttgtctcagaagatttatgggcttttggagagaaactcagagccaactttgatgaaaccaagaacctcgtcctccaggtataacataacaaaaaacagggtcctctgtttcatatttgttgggtttgttcttgcaataacactaaacttgcgttgttgcagactgctggacataaagaccttcttgaaggagatccttacttgaaacagagactaaggctacgtgactcttacattacgaccctcaacgtttgccaagcctacacattgaagaggatccgtgatgcaaactacaatgtgactctgcgaccacacatttctaaagagatcatgcaatcaagcaaatcagcacaagagctcgtcaagcttaaccccacgagtgaatacgcgcctggacttgaggacacacttatcttaaccatgaagggtattgctgcaggattgcaaaacaccggttaagtgagtcagtgaaagaaaacaaaacttcgaatctctcttttttatctaccctttttaataatctctttttttctagaatccaaaataattacggttggattacagtttactttatgtatccaccgttgaaatcttaatcttccattgtatcaaacgtcactgactctgtttctggaagtgtaaacaagaacagagacagtgaatcttaatgttatcttctttgtctttttctttctggtctctgtctcagaatcgtttacatttgttaatacgtttaaattgcacgtcgtctaaagtctgactgtggtccctgaaacatgttaatagaactatgccgttaaagaagggaggtgctttgaggaaacgacaccattttttgttttgctgtttaagacacatggctcgcatttggtctgcatgtattatagcgtacagttctcactgtaacactgcttaagacttaattccaccctagtgttaatcaaagagacaaagaatacgtagacaaagactttttttattgatggaaaaatgttttgacaacatgaatgaatggttttctctctgcttattttatatggtttcaccacctaggtagccaaaatctgctctatttacacattactaatctctctctttcaatttctaaatctaacagagcaataaatgaatcaaatcagattactgacaagttctccccttttttttgtttttgtgaatattaagtgttttgagtttgctaaaggccatagtgcctcactgttttctccagcgcttccttgcttggacacacaatctctttcatccgaatcccaagtttgtatatcttaaatgttggcacaactctcactctttctgcattacccacttctggacattttacaatctccacctgttgaaagacaatttcacaagtaagtttacttgttctttggtttacatataaacagttgtttcaaagtttttgttttttcaccttgaggaaatgcaaagatgggtaacgaacacatagtgcgtccacgaaagtggatatctccttgcattgtggatcagaagctctaaaaaagtgtacaactgaaactcctgccaatgaagtatatgtacaacaagttaataatgaaagttcactgactataagagcatagaagattaagatatcacttaccaggacgagttaatgcagcttttaactcttcaagactagatatttcctcaacttcacctccaaattccatgtttagaactacttcgccgcgagatttctttaatgcaacttgagcatgaaataaagattcagcaatttccttgtcataaggcagttcctttcttaagatctcataatcactcactgcttcagcccatctttccaactacagtttcatcaaaaagaaacttagcgcaagtgaaatgcaaaactaagtcatcataccatatatattttaccttggtatataaagcagctctttgaagacgaggctttgtgtaactcggtagtataagcaatgcatggttacaatcttctattgagctctcccacattccaaccttaaagaaacaatctgctctgtaacataacagagtagcattggatggatcatacttaaggccttctgcataagctgatcttgcttcagtgtatctttctagttcataaagatcgttaccacgatcacgcgctctagttattaatctaacatttttatacaaaatttcaacttcattgttttgtggatcaatctttgaagctttctctgcagttacaactgcattttcaaacctgcaagaattcatcatcttcactccttttaccaatatgacatcacaataaaacaataatcaatcaacatgtgtataatttttcaccttcctagagccaactccatttgggatttgacaaaagatgtgtaagcttcagcgatcatatcgaaaaaccgagtatgtgagaaagaagctgggaatggttccactttggggacacattctagtactctttgagcatcatcaagccgaagaagtttcagtagtgcttcagctttacacatagctagctacaaaatttttatatatgtaaaacacttcatttattcataaagtaacacaaatcaacacaagaatctttgttctttacctgaggagaagaatcagctccagacgcaatggctgcacttacttcagtcaaaacaatactccattcaccgcgtcttcttgcatatgtgcatttgttcaagtgtttatctacttgttgaagcatcttcaccaccgttggatctaatggttcctccactgaatataaatgtatccctgcattatccacataacctaatctgcaaaccaagtaaagaccaaactgattatagatatcttttctcgaccaacattctataataaagattttgatgttacctaagaagcaatgaggctaaacggtgatgagcccttgcaaagtttggatctaatttgatagctatttcacattcattcacagcttcaccaatctgacccaaactcgacaatgcagctgcacggttgctatggtaagtagcattactcggtgatagctctattgctcgatcatacaacttcaaagcctcagcgaaacaacctttcctgaacatttcgttaccaaacctctttacttcttcaggattagaaccatatatagctatcttccacgatgtatatgcatcaggaccaccggtagagttattactgagagttaaaggcaaaacagaggaagaatcagacatcatcgttggcttcaccggagataagttgtttcctcgtataatgctaccgtaaccgtatgatttagcacctggtccaagaaccatgcttcttggtttttcttgagtcatgcctgtaatctgtaccttccccgatgggacaaggttcccggcgggaagtattttgaggctctgtttcgacgaaacagagcttttattaccagatggttttgtcgtaaccgaagctgagtttgatgatggtcttattatattcccggttttagcaccaacttgactgcttgcacgtgattgagcacgggcaggactatatgacccaccaaattgagcggcggaggagggagtagtactagactttgaagatttcgcggcggaagagagattgctagatttagacttagaggcggagggaacgggctgaacggaatctggttttcttgtaaccgggggagtatgtccggcatgacctgtgaccgatccagaagagctagaactgaaactactggtggaagaagagagtccactcggctgagtctgaagcggtgtaattggtgatccaagatcgacattaatagtatctggtttatcattgttattatcttccatattcaacgagtcacagagcttatcggcgacacagttagattctagtataggtttcttgagcttcgacattgttgtatcttagcaagattacaaaaaagaataagatacctgatgatgaccgttaatggcgaatacaaggtagagacgaaactgtaggatcataaatattctgatcaatgcatggaaaatgagagagaatagaaagattggatcttgcgatgtcgaagattgaattcagaaaagaaagaaaaaaagagagagagaaaagtttcagagaagaatagaagagaggtaggagacgaagaagatcagcgagtgacacaaaaaaataatttaatatgtgagtttaattaaattattttatttcatgccaacaaaaaaaaagtgatttatacttttatggtttgtcacattactatgtaatacaacattaagtaggaaatcttatactataaggataaaattaagttcgattttaagagaacattataggttgttattgattgtcatcagattttggtttaatttgttcttttgttgttatttgtaaaagaatttcacgagattttgcttagtcaaatgaaaactagtgtcactatgatctaaattttgcgatttgagaataaatttaggatttggttttagctattttaataatattcaattcttgactgaatccttctcgtggcttgcgctgcgactatgtccacgctacaacataacactctatgtatgtctctatacacaattataaaatgtgaaccttcataaaatcggctctgattatttaacacaaataattggaaatagtacttgttgacaaaaaatagtccccctactgcttcaccttcacgagacagttttcatttattttatcttctctttctcaatttcgaaggaatgtcttatcattaatttagtacacaataataaaaaatatatatataaataatctgctaatccaactttgttttatttggttttacgtaccacttgataaaatcctacgtgtgtcacatatgtaacgcatatatatggcaattcacataagcaagcgccaaggcgcatgcagaatcgtttcatctacgtatcggtcatgtagatatagcttaccgatggatcggttaagttttgtttcttttgtatatgcccacacgctttaaatacttatgtccaacacttctgttatacagtataaagatatagattgcaaaaaaaacaaagaaaaaagataaagattgtaaatcattaaaattggcctacttaattcttaattcacaatgctcgctttttactattttaacgtgaaatacagtggttggtgtgggtctaataaatttgaatatttgatcctattgacacttgggaggcaatctccgagtaaagcattcacaatactatacacattacacacaaatacatgcatgcacacatatatatgtgtgttactagaatcctatatatgtatatttacagctgttattacttatttagatgcgtaaaaataaatgcaaaatacatttttagataaatatacgaccatgaatatttacttggttggtaggttcatggacctacttctaattagataatggaggttgtgattaacatgtctagattttgtagtaagagtgggtaagtacgcacttaattctgtaacagaaagttacgcatttaattggctaatactataatattccattcgtttcgtagtcagtccatttcacacacaaaaaatgtcgtttcaacattttatttttgtttcacaaagagtatcattttttttttaatacagattttaaaagtaaatctcaatttttatctttattgattcggcttattacttagagagaaaaggctatatagtgtgttactaaatggtagaacataatttttattcttttttaaaaaaagagaatagaatttgtatatttttaatttgtgtgaaacagaaaatattatttgatgttttaacaacaatgcatactgattaatatatatattttgcaacaaaaacaacaacataaattagtccttgttttataccaacattttacgtaaacaactaaacatcactaattatttgaaaccataaacacaattcggatttaaataacaaagtatctacgcttcataatttcgaaagtatttacgtgtaaaagaatatgtgatgaaatatgtatgtaaatgtttaggaaggatcgaattttgagaattcatcggatgattgactttgattcgagagtgtttcgaataatattagatttgctggatattagtgaattttgtagtgaacaattcaaccactaatagataaaataatgttaattatgcttctcaattgagacatagttttcgttggattattctgcataaaatgttcaccaaaagttccatatagtcggttctatatagaattcggaaggattaaccattcctcaatgctcaattagagaactacttaacacttaaacacatactttggtaactttaaaatacaatggtgcttttctaacgacattcacccataactaatttggtgtgtatatctgatggtttttagtgaagccatgacgtttctaaatatgaggtaagactaatcatatcattgggcagcagtgtaagatgggtcctgatcttgttcttatttttatagtagtgtggggtttgacagcttttaacttgcttacacaaagatagttagattccaactttctcttatgtaaaaaccataacagaccccatttttttggctacttctactttagtttttaaattttcgcagacccaaagaaagatatttaacaaatatgataaaaattctcaatcttaatgtgacaacatttttataggaaaaaaatacttcacggacaagtaaacatcctaacttttggttttcttttagtaacaaatatattgattaagacttcacgacaaattaaatgccagctatattattgtcaataggttcatgtaatacttattagttgtctggttgtcaaaaaaaaaaaaacattctcttaactttcgatctctcatttctcccttttccctgtgtaagcctttaagattcacataaaatagtatatttatgtatgaaattctcaaactatgtagctttgatagtttcacactataacaatgtttaatcttatacttgtacaacaaggtatcgcccaaaacttgtgatacaccaaaattactaaccctagtttaaaaattccctaaagccgtctaagcgagatcaactctcgttgctttttcttgcattcccaccgaaaataacagatcagagtaagtgaaaagacttgcacaatctctgtgaagctacttcaatggtggacatgtcagagaaagagatctgcaaattgttacgcctcggatcttagatcattaaagaagaaaatattagatggcagaatggtagatcactcatcatccgatggcaaagtcgggctttttgagcagctctctagcatgtgaagttccaacatccttttctctgggttacagaggcctgcaccagtaacattttcaatccaaattgtgatcaattgttgtagaaatgcttatgcagtgtgactttagatccattcttcaagacggggacggagaaaaacgaacctgagcattttggtatatcccaaacagcaatggagtatggtgagcactctggttcacaaagggtgtgaaggttctcgtggttaacgttcattgccagcatccacgcacctatggtcacgtcctcattgctaaacatcctgaaactgtagtttgggaaaaaaaattaccttgtgaagatgaagtcctaatcgaagtatatcactcgtggagagttcaaagacaaataatattaaggggacagaacttgcctgttgttcttgagggcaaccaaactagtgacaacatcagcagaaagagcatatatggggccataagcatgaagaaagtactctttcccgagcagatctgccaaaggttcatacctgcaaaattccaaccaaaccacaagagattttctcaaaaggataagcatgattcgagtgttctgttagttgttcattataagttgtttctatgcttaccatttaagctttggatctgtgaaaaccggaccttttttcatgcatccaaggtatgtctgcgagtgaccccgctctttagccaacagtaaagacaaacgatctgtgaagaaaataacagcctcttaccaaatccagaactttactgagaacacagattgcaaaaaccagagaacagagaaatgcaatcaaattacctggcctcaagtatatatcatcatcagctttgacatagaattctgaatcatatagtgcatatgcagctttgaagaaagccaaactacacaacgaaaacacataaacaaagaccatgaattagagccttccgagttatctatcatatgagatatgaatagaaaaagaattagtctctaaactaacgttttgtaggggagcttactgtactcctcctcgatatcgagcagtataaagtcatcgtacattgcaacttcgcttctcagctcaaccattttggcctcgtctttggttttgcctataataaatctaatggctaatcctgttgattcttccaatctgcaaagaacaatggttttttcagtgagtgtactcagacgattgctaaattcagtctttaaatgatgcaaaagttcattactttgtgacaaattgattccagagaatcctaaagctatagcagaaatggatcggacggttgagagaaggttgaatcagtaccttcgaaggccttcgggatcggacggcatccatgtgttcctgagagctcgtctccggccagcagatctgaatccggtctggattccgacgaatcccatcactttgtgcctcttgacttcgccattaacgatactattaccagcgacgtcccagacgattttaacagtcttcggtggcaagttggtgaggcaggaccggccagataaccggagaccagggaaaaggatcgttgataatccgaaaaggaaaccggttagaccgatagcgagagaggtgaagacgatcaaaggcgtcgatcggcgcgtgaagaatgatggacgcgcgtgaaacagcttgggagaagatgacatgattttgtaacgacggatcctccagctacggcggatccactttctcggaagcgtttgtaacggtttttttgttttgttttgtttattcagatcaggtggatccgattatcggattcgggtcggatccttttgaaggtacacggatttatgtgtatgttttgtatggaaattgtgaataaatacaatttgagaactaggggtatgactaaatacaattttagaacattaatgataacaaaagttaggcaggtaattaattaatttgacccacaaatgaagactcttttatgtgaataaatacacaaattaagtagataagaataaataataaaaataaaaacaaaatagataagaacagcattctttgataataaaaaagttgattgtgttttacttgctaaaagttgttagtaggcaatacttattttgtttactaggggatgagggttgaaaactctcaccattggccatcattaggttacattcacttggatgaatatattgaattcaaaggactatatatagagagtactgtaccgaatttaagagaccatttttctctattttgggaaaccatcacaatagaatcttgttttttaagacggttccactagtcaaaggctcaaaacaaatgaagacaaattacagtatttaactcaatgatgaaagatgttgaaatcgttttcattactaagacattacatatcggagttgtttacacataattaagagttacaagaaacggcaaatgcaatatcttaaactagaaacttaacaaaaattacatagaaaatgttcttataccctctatcaagatatttggaaatgaatacactttcgatatcactcaaaaccctaccaactaattactaaatcttaccaaatcgttaacaattgttttagtttctataaaatctctaacaatcttttttaaatcatcagaatatccttgacccccaccaaatttattagatccacaaatcaataaaacagcaatgaaatagcttgatgaatcatattgtacagaacattcaaatgcataaaggaaagaaaaaatgaaaggattacgtaaacggtaaacgaaactaacacaaatggttgagagatggattttagggtttaggtcggaaacatggcacgacacaccggacaaatcccactacacctaagccaatcttcaccacacgtgcgatgaaacacgtgagaacacggcattcgacccgcagccacatccaatccaatccggatcttatccatgcatatcacacaccaactttcattctcaacaacaaccgtctccaagtgttgctccaccgcttcattgctcgccggggccaccgcaagtctcacatctacatcatcatcatcatcatcaggaaacctccacacaataacattgatgactacatctacctctttcacgttagagatcttatcacacttctttaaatcaaggatcgcatcaatgagttctgtaacaacatcaatataacgaggggctttaatcaaatcaagaatgtgacagacaatgacttgtatttgctccctatctccactgaaaagcaatcctttatcaaactcgtgagttcgatcaacgagtagagtttcaagatcgagaggattttcatcttctccatctgaatttacttcaggggcaagattgtaacataaatgaaacttgaacatcaagttttgggttctgccaaaatcgccttcatcgttatagatcggataatagtaaacgaagctgtcggggtctggattgacagcatcaaaaaccatgatttgttcggaaaaatgggcgttttgatatttggtatttagggttttgaggcttgataagacttgaaaatgaaaatgaaaatatagaatcctcttttatgcggtttccttatcttagtagggttttctttcaaaaaaaaaaaagtgacgagaggatatagagaaagaaacgatcatagttttttagtctaataatattattccgaatcctgagagctatcagagtcaagctgttcatcaacacaaagcaacatctcatcgctaacattatttactactcctagtcctagaccactaacttcttctaaagctgcagaggaagaagaagcccttgtcgtttcttttccttcttctgataactttgatacatctttctgcaaacattcttcttcttcttcttctcctatagagactactgttgttttatttggcctatcattggcattgctgtctcggcttgggttctctgtttctgaagttggttctgtttgatcggctccgagtggtacggggaagcctggggatggctcatcatctgaacctgctggaaccatctgatcacagctctcaacttgggtactcatgggagacccggctttgtctagacctggctctagatctgcttctttgtttgatgggttattgcgttctttagaaagacatacacctgtacaggagcaaaaatcaaatgaagttcgttcgagagagagggagagaggagttggctttacctttcatagtgctgggttttgtgctctcgtatagtgttttcttgagcagagttgtcccagggaataccatcaagtttattcttttgagagcatcacgctcttcatcatccatgggtttgaagccaaaaccttcagtccaagtttccactaaactcggcaatgcagctaccacaagcttctccactttgagagacataagcatctgcagccaaaaccaatgaatagttttatctattgatagcccagggatcaagacaagactggaagagagatcatatgagctaagggattatcaaggtcagcatatgagcggtgctgtatgtctatcattgtactaagtttagacattattaatgtggatgtagcttcaagaacaaccacatggttacattctaaatatcgtacctcttcaatggcagccacgaggattctacacatgccctgtcggcgatatttgctgcacgtagctacaagaggcatctctgcaatagttactccgtgcaccctggatatagtaaaatggggtttatatgtaactcgttccagtggatggaagtgaaagaatagttctaagcatccatttggtgatagtgtcaaattttgtttcattgcctggaggttctagaagacataccaaacactttgatagccatgagattactgttttttcagcatgaattcgagtttcttcatactaacctgatagatgctactgagatcatcacatcatccttttccacaaccactgtgtaaaacccatcaaagtctaaccgagcaaatgttgacctttaagtgcaacaaagattcaaaaaaggtaagacaaagcgatgaaaatgaagagcagaactgaaggtacagaagtaacaaacagaaatctaagtgtgcaagctaatgacaaaaggacgttacccccagttgtatagcacatgaggtatcatgtcaataccagttcttggatctaccatagacagaaagctttcctccataattgatagggcaacagctaatttcgagttgcattcagccttcagcgccaaccttcgggcagaatgaaccattccatcttcttgaaaacatttaagaattgaccaagacagaccatcagcattagggttaatgatcccaacacgagaactaagaccattgtacacctgcattacacgagctacttaatgagaaccttgaaagttgtgaagcagctgtaacatgctaacatcttctttgtttatatgtcaaagagcccaagagcagcgaaaaatatactattattctcaatgtaaatttaaaaactacccattagttgtttaagtcacagtgactaggtatgattaataccttctcgcaatttttaccacaaaagtaggtctctggaaaaagctttctgcgtttacttatcccttgcaaacatgttccatgatctgataacataaaggtaacaatcatcagccaaagtggatttcataccaaaataactaatgtgggatccaactgtcgcgagaggcataactccaaaagtgagttttacaaagtgtcaattactaaagaaagaaaattggagaagtgctgagcctggcagaaaaccaccatctacaactgttactgatgaacagtgacatcaatcgtgataaaatctcagtgagacatgatagaagagaattcaaatcaggggtttcctttcatgtgataaagaaataaatcatagtttctaagagattgcgagctgtaagatgattacatttatgcgcacactgggaacatttaaagtcctgagagcgttcagcattatcactaaccaactcgctgcatatccaacatgtgcagctcgagcaataccaacttccttcagggagcacctgggtagaaaaagcaaaagcaatacagcaactctctttagagggtaccaatttaaggtaaaatatcctagttatactaatgccgtgtaagttactagagttgaattagtaagaatcacagaatcagccaagaagtttcacccatgtgtatgttttgcaaagagttaattaccgggataaataatagttaaaatgtaaatataccctggaatgagtcagacaatacctgcattgataagcacgcctgatggaaggtagatggacaattatcacagcagatcagctcacccccatcaccacaaactccacaagaatcatcatttggatcatcatcagaggctttctctaatctccatccatttcttcgcgccttatactcagcagaccaagcttccagctgacatgaagcgaaaggctttcctgaccccatgaaaagattcagacatggacagttctggttaaatccagcatggttcttgaattcagaaagtgacacagtcttgttgcaacatgtacaaaccactccatctttagttaccaggcctgtttttaccacagtatcatcatctggatctcgtaactggattacttcgtctctagaaattactttggtagctatcaaccatgataagacagttctaggacccaaaatagaccaatttccttgaaaaaaatgattttccacattgcttgagcttcggggaagcaacctgcaccctcccctattgtttcttttctttgttctagcctttggcttctgtgttttctttttctggcttgatctgctgaacttacctttgtttctggttattgtcgaccccataaggtcatcatcttgagtatagtgcttcctagctttctttcttcctttctttgaattgcaacatgaattattcatcttctcattcctcaacctttcatcccgacttccctttgagacgaggtgaatgttgcccatctctttatcctggaattcaaagctattgagagaattagaatctagtgaatcatgttggtccaaggaagctggtttgatatcggatattttctttgatcttctgtgtaagttctttctcataacactttcatgcatgtcttctgctatcaattttgaagctacaatgcccttgctagcctcctgctcatgagtcccagagatttccttaccaattatgctctgcctctctagtcttgaagaaactttttgagaggaaattttagtttgcacctcaagatctgaatgtatctcttggttagcatccacgtcatgaacaagatgactgccttcagatactgtcagcacactttcaggacagcctgaaatcaggttcaaacaaattgtatcttctttcttcaacttgtctggatttgaattccttgcaacttcaactttatttccttttcttaaagaaccaacttgcttagaaatgaagacaacaaccacaaaaggctctaaggcactccaccaaagtgcccgtgtgttagcaagatttaaatttttcatgttctcctcgatgtccaacagtgtaagagagagatcggaccagaagtcattaataccagtccatttcttagtaccagtatccattaacttacgatcagctaataggatcccacccaatgctttccaagctgacccaaattcacgaaatttccgtccctctggcgatatgtaaaatgtgtctacatgtttcctacctgctgatctttcgcgcttctcaattttccatctggcagcagttagaaccttacagacatacttgtagagaagaggacgggggtcctctttaggatcaatctttaggcaggttttagacataattaactcattaggagatactttagatccgttgttcaactgtagcgggaagcaagccttctcactatgcggcgtagaagcacctacagagatcattctggttgcgaagctctcctgagaaacaggagaggcaatagctttaaattcctttccatcgcatttgtccaagtttagtgacttacactttccagacacaatgccacccagataaacttctcttccctttactatgctgtgcttcaacaaatatgagctagttgaaacacccttgttagatgattcaactaaatggagaggtatcgtctctctagctatgtccgaagttggaaaaccatgcaaagcagatcccttttcgtcccttgcatccaaatgcttattacctgaaagcttcactctcttagctttagtgttaaaatctgaaccatctcttgaagcagatgcctcaaaaccttgtggacatgcatatccactagttaccacagagttggaactcagagaggaattgacattcttactggaatcacattcgaagttaatggctccagtaacgagacatcttttagtagtatttccaggatcacttccaaagaaaacttctctgaatatctgatgatcctcatatgacccttcaaagcagtcacctcctaacatctcaatctcagctccgggaagcatctccacaaactaactgcatattccacttcaccttaacttaaaaggaaggttgtagatagatacctgcaattatataaagtaatgaataaactcacagaacccaaaagtttggaactcgacatcctaatccaaaacacatacccataagcggaagcggattcaaaacaagataaaatcagagatccttctagaaaggccaaaactttgaagcctagagcaaaacgatagaccagatttcatgaaattgagatgttataatgactaattacatccaaaaagaaagctcaaaaattgggaaatgcaggacattaccagcatgcagaatgaaatcagagctgtgaaatcggagaaatggcttcttctcactgaaatagactcatttcgtcgcccttatcctctccaaccgcaagtgggaaacgcattttcattccatttcacgttctctgcactcacacactctctctccttgatctctatctcacacacagaaagaacaacaatttgtctatctttttagctttttctataattgtggaagaaacccacctctgattcggtgttaaatctctcaaccaaaattcatcagatagataaattctgacgaactttttttcacctctctgaatctgcctctatcactttgttgtgcacagtgtgtgtatacttattattggctatttctttctcttctcgttttttttctttttttcttttctataaattgtgtgctgtcaccaaaaaggcatcttcgtgtttttattttatttttccttcgttatactgaaaaagtcattcttcatttttcaccttaagattctgtctcctctctgataacaacggaccagcagttatagtatatggagtacttaaattcgtttaattacacaaattaaaacccaaatattcgtcgtttttttcttctgttatcaaattcttaatcctgttaatgacgatcgtatcactataagccaatattaatgactatggttttaagttcttgacaaagtttttttttactaaattcgccacagacaaaaactgttctgacaaaaataacagacaaactaaaatgaaaaaaaaggttagcatatttaattgccaggtttctaactgttcttctgttgtcgttttaaatcatttcagcttatgtttttgtcctttaaaattcagtcatcaccgattgtaacaggttttgtcttaatatgtataatcaatatctgttaagtggattggatgctttgtaatttgcgcggggaatctttacgtgtcttaacgataacaaatactgtactatcaaataggtgcatgcgatgatggacataagtcgtattttaacctattttgttgtgtgaacagattagttattgcatgttttgtattaactatatataggaatacggctctgaatctttgtttcttcttattcgattttgatatatgaaaattccaaaaagtacatgtaccagtacgatgaaaacgactgtgttatgtgaaagtatttgtttttaaaaaaaaaaatatttagaggggatcaattctagatacttttttcatttttaaggtttaactatggttaaaaagaaacgattcttttttaaaagggtagatggtagacctcatttgctaattttgatccacataagtcaataacaaataattcggctcgcttgcgaagctaatgcatgagccacgtgttttgctttatatttggctttctgtattgagacattcttcttcatcctaattgtgaatggaatatgttggacccaacgaagccatcaaacatggttaaaacacacaaacatgtgatttaatctagtttaatttcgtctattacaatataagtgaattttgacacacatccttggattatatctaaaacgttaagtttgttaaaaacactttggaccggataatgggtattgatcatttattgtttgttgcatgttgggttagaaattagagatcataacaaaaatcatgatttcaggctgtccattttgaaaaatgtgtgtgtttgtgttaatttgaatacaccgattcatccaaaaaccatctgaacagtctcttaattagtttaccgtgtatatatatcatatttatgggatcatatttggttaagtttaactagtagtttcaaatttcgcgttaatagctatttgaaagggtaggagtactttttcgaccggttaacactcccatataaagcccataaattattggaacgctacaaaattaacaaaacatctcttcagaagttcgtccggtttactctactacaaagtacatgtatcaaaaacgacaacacgtgcttccacaaaattaagaaccaggacgtgatgtcgttgttgtaatacttttttctcgccaacttcacgccgtcttagtttaccgaaaccaaagtggctttttctgattttatccaatacaatgacgtggaaagactcaaaagaagctttcgccacgttccaccaatgaatgttcgacacgtatcgtcgagtttctttttctttatgcttacgtcatcgcacacgtctatcttcttttggttaaagtgataaaaaggaaagtcgtaaatggcttcgtcactgagtctttcctactattttaaccccattagtgacactcctttcttctccactacactccatttctctttcttcttgactcgaccatcgtttctctaatctccgcaactatggcttcatttacgaaaacggtgtgtggggtttcacgatcccgagatcatacttttttccctcctcgtacgtaacgatttttttttgtgattattaatccaaggttttttggcgtctcttttaggttttgatccctattgcgcacggtacggagcctctagaagcggtggcgatgattaccgtgttgcgtcgaggtggtgctgacgtgacggtggcgtctgttgagactcaggttggcgttgatgcttgtcatggcatcaagatggtcgctgatactcttctctctgatattaccgactctgttttcgaccttattgtgctccccgtaagtctctctgctgatttaacattgtccatttgttttgtttctttgtgtgtaatctaagaactaaggacagccaataagtggatcgatcaattatcaattagctcacttaactaaagtttcgaaagtgatgtttatagttcctactaagaacgatggtttttagatgtatctgttgcaacttttgttctctgaaacaacttcatagattcttgttttctgaaagatttcataattgtgttgctgatatactttttgatatgattgggaaaagggagggcttcccggtggcgagactcttaaaaactgtaaatctttagagaacatggtcaagaaacaagactctgatggccgacttaacgcagctatatgttgtgctcctgccttggctcttggtacttggggtctactagaaggcaagaaagtaagtcagaagtgatcagtatatttccaagggcgtttatttatctttttttcaggccttgtaatgtcttgttattacatggggtttcttgcaggcaacgggttaccctgtttttatggagaaacttgcggctacttgtgcaactgctgttgagtcaagagtgcaaattgatggaagaatagtgaccagtcgtggaccaggaaccaccattgaattctccatcacgcttatagagcagttgtttgggaaagaaaaagctgatgaagtctccagtatcttggtatgttttgtctctgcctcttttatcaaccgctgtggtacgtgttcatgtcacctcctcgtagacttacttgttatccttttgaaatcagctgcttcgtcctaaccctggtgaggagtttacttttactgagcttaaccaaacaaactggtcatttgaagatacaccacaggtaaatgttcagttgcctctccacttggcccttttaacatttttccaagacaggctttgtttgatccgttatacagattcctaggaacatgctgtgttgtaaagcttttgtctttcttgatcaatagtcttttatgagtcagagagataatgttttcccttttcagattctcgtacccattgcagaggagtcagaggaaattgaagctatagcgcttgtagatatcctgaggcgggcaaaagcaaatgtagtgattgctgcagttggtaacagtttggaagttgaaggatctcgcaaagctaagctagtagcagaagttcttcttgatgaggttgcagagaagtcgtttgatctgattgtgttacctgtgagtattgctaacttccaaaatgtgaatatactatttagtcttaaattaaattttaatattctatgatgacaaataaccaaaaacataatccaacttctttgatgaactacagggcggtcttaacggtgctcaaagattcgcaagctgcgagaagctagttaatatgttaaggaaacaggcagaagcaaacaaaccatatggaggaatctgcgcatcgcctgcttacgtcttcgagcctaatggtttactcaaggtgcataaatcaaacagtactagaattgtagtttcttgttctatcttttaagtcattaaactgagatataagagacatgttttgtatagggtaagaaggctactactcacccagtggtgagcgacaaactttcggacaagagtcacattgagcacagagtcgtggtagatggaaatgtcataacaagcagagctccagggactgcaatggagttttcacttgccattgtcgaaaagttttacgggcgagagaaagctcttcagctcggaaaggcaacacttgtgtgatttcaaacaatgaaagtatgagagtggcttgaataaaaagaaggctttgccttttagttatctctctccattagtaattacttactttatgatatatgacatatgagcttggcttagtgattggtgtgtaactttatgcctttataaatgaataaacgagatttttctatgtatgttgccgatattttctttaaacctctgcaagagctagagggtgtgctggagaaaaaaattattttatggagaaagatattttagtcacacattttcaccaaattgaccttacaataactctaaaatacgaatttgcccctatgtttagctttggaatatttcatatttgtaaaccatttaataatatgattattaccaatttagtgaaaataaaatcttcagtcttctcttcttgtataaaaatagcttttttatcatttgaaaacagagtaatgtcactaatttcttggcgaaaatgtgtttatttgtaacttaaggtaaaataggggcaattttgttgaatctgataagatcagggggtagtaccgtagatttcgctgtccagttcagttatgaaatacctaaaatgccctcgactcataatctactattaaaccctcataaaacccttgatttcatttctagctcatctgttttcacactctctcctagggttttatctgcgaagcccaatctagagcttccatggcgacgcataccatttctcgatccattctttgccgaccggcgaaatctctttcgtttctgttcacgcgatcctttgcttcatctgctcctctcgccaaatctccggcgtcttctctgctcagccggtcccgtcctctggtcgccgctttttcctccgttttccgtggcggccttgtgtctgtcaaaggtctctcgacgcaggctacatcgtcttctctgaacgacccgaatcccaactggtcgaacaggccacctaaggagacgatcctgctcgatggttgcgatttcgagcactggcttgtcgtcgtggagccacctcagggtgagcctactagagatgaaatcattgatagctacatcaaaaccctagctcagattgttggcaggtaaatccccaattcaaaactctctctctctctctctctctctgtgtatgttcttctagggattttaggttaaataagtgagaaatccactactgtgtatgacggatctgtgtgtttacttagatcatttttggagctgtaacatgatatatctcgttttggacatttcagtgaagacgaagctaggatgaagatctactcggtttcaactaggtgctactatgcttttggggcacttgtgtcagaagatctttctcacaagttaaaaggttaactcttgcctttgttgggttttagttttcctcatttctgtgttataatctgccttctaactttcttctgtaactctccagagttgtcaaatgtgcgctgggttcttcctgactcttacctggatgtgaggaacaaagactatggaggtaggcttaagtgtattatctgtatcataacctgggtttgaaattggggtagttgctttgctcgtccattatacttttgctgggtttgaaattttcaagggaaactacctgttgctagtcttcgctctgtggactcgttacttgctccatgcttttgtgttagattgacacatggggcgacttctatttatagttaattaacattgtgggtgcatctgttagatttgatttagtgatatctattgtgagactggtgttgtagaagtcgcagtgatgttgctttggtgagagtttaaatctttctggtgatcctattagagagttagtttgatgcgtttttgtatatattgactttcaggggaacctttcatcgatgggaaggctgttccttatgatcctaagtaccacgaggagtggataaggaacaatgctagagcaaatgaaaggaacagacgcaatgaccgtcctcgcaacaatgatagaagcagaaactttgagaggagaagagagaacatggcaggaggccctcctcctcaacgtcctcccatgggaggccctcctcctcctccgcacatcggtggctctgcacctcctccgcctcatatgggtggctctgcacctcctccacctcacatggggcagaactatggaccaccaccaccaaacaacatgggaggaccaaggcatccaccaccttatggagcaccaccgcaaaacaacatgggaggaccgaggccacctcagaactatggaggaacaccacctcccaactatggaggagcaccaccagcaaacaacatgggaggagcaccaccaccaaactatggaggaggaccaccacctcaatatggagcagtaccaccacctcaatacggaggagcacccccacagaacaacaactaccagcagcagggtagtggaatgcagcagccacagtaccagaacaactacccacctaaccgggatggcagtggcaacccctaccagggttaaagcagttgaagcagtcgtgggtttcctttttaatcatgcattctgggctgtgtatagataatttgaggaagagagagtgcagtagcaagactttaaaactccttttatctcgagtgtttatcagtctgggattatgtgagagagaatagcctaagttactgtggcatggttagaacttttcactcttgcgtttctttttagtagtttatatcctaaatcgatctcaagttcttccttgtgatgcttgctactcttatgtccactcctggttctgcattaaacgggatttagtaacatgtctcccacaggctattgttttgtgtctttctttggcttcttcctagtcttaatttctaattccccaatcatgtttacatgggaatgggatactcatattataacaggaagaatgacaaatgtcatcaatatcatatttctttcgacaaacttgacagaacacacaatttgatgatgagagagagaagcgggtgtgaagtaacaagatgggctttgtgttctttatcccggcccatcattctaaatttcagcccaaaatggaaaatctcgtaaccgtataaagccctcgcttccctcatatgtttttccgccgtcacatattttcccctcttttttttcgtgtcagattcgctttctctacggctggactagaaggattagggatttaccggtgaaagaataactccagagataaatctgtaaccatggatatgatgaagaagcgtaagctcgatgagaacggtaacggactcaataccaacggtggcggaaccattggtccaactcgattgtcgccgcaagacgcgaggaagattatcgagcgattcaccactgatcagctgctcgacttattgcaagaggctatcgtacgccatcccgacgtgcttgaatctgtccgattaaccgccgactctgatatctcgcagcggaagctattcatccgtggtctcgcggcggatactactacggaaggtctccgttcgcttttttccagttacggagatctagaagaagctattgtgatccttgacaaggtcactgggaaatcgaaagggtatggtttcgtcacttttatgcacgttgatggagctttactagctctgaaagaaccatctaagaaaattgatgggcgtgttacagtaacgcagctcgcggcatctggaaatcaaggtacgggttcccagattgcagatatatcaatgaggaagatctatgtggcgaatgttccttttgatatgccggcggataggctattgaatcactttatggcttatggagatgttgaggaaggtcctttgggttttgataaggttactggtaaatctagaggctttgcattgtttgtctacaagacagcggaaggtgcgcaggctgctcttgctgatccggtgaaggtgattgatggaaaacatttgaattgtaagttggctgttgatggtaagaaaggagggaagcctggaatgccacaagctcaagatggtggttctggtcatggacacgttcatggtgagggaatgggaatggtgcgtcctgcaggaccttatggtgcagctggtggtatcagtgcttatggtgggtactctggaggaccaccagcgcatcacatgaattccacacactcctcaatgggtgttggttctgctgggtatggtggacactatggtggatatggaggtccaggtggtactggcgtctacggtggacttggcggtgggtatggtgggcctggtactggaagtgggcagtatagaatgccaccaagttcgatgcctggtggtggtggttatcccgagagtgggcattacggtctttcatcatctgctgggtatcctggacagcatcatcaggctgttggaacgtcccctgtgccaagagttcctcatggcggaatgtaccccaacggtccaccaaactactgaaaaggtgcggttgttctcccttgtatattttggggtttaagagtgtgttgcattatcatgattcattgcatagttatatattcttccctactttgtggcatattgtttttgcaggttgtgcgtaattttcttgctagaaattctctgctattcttttccctgtgtctcttttagtctatttgcttgttagtactgtgttagctacttgatgcaatgcctttagtcgatgtttttttgcttgtgttcattcctttattttaacgcatgaaagatagccagaaaagtggcaccttgaacccttttatggggaatgtttgtggcattctttcatgcagtttttctgtttgtctttaagctgctagtctgtgcaccatgctttgtctctctatcatttactttttgtagtaatgagagtacgcatgtgatcgttccatcttgagtccttgttttccttctcagtatttaatcttcttctgaggatagcatgaggttgatttctttgataatgctaatgaccaaattgagttgtgaatgggtgttgattcaggtttgtgacagcatattgggtgaagatgctttttgtgcttagtggtgattacctgattgcagctctttaatctctggaatgatgaatgtatagctgctttgacctatctgcacttgacctgaatgtgctttggtttctataatgaatgattagactaggatatatttatgtacttttaaatatagacatactcggcaaatgagttttgttggtcagattagtgagtcttcaataatatgttgtattttctcctacattgttttctggtttatgtccagccactctattgggcttcctgattggtggttatatttcttgaactttgatacttaaatgtttgtgacttttggatatctaaaccttgctgattggtggttatatttgtgacttttgaggacatccagactggccctagaggctatgatttgtgattattgactaatgatgcctaggtaaagtggtgcatattttgtgaccagtcattggcactgtacgtgtttatccatgtcaaaaccataacttgagtagtgctgagtttgcataaaaatgtgaaacatgaaggtggtgttgaagtcttgctgttatttcatgctaaattgcgacccagttggtattgtatgacagaaactatgttctttcaaagcttagtgtggttattccaagggtatggaggatatatcgagttgttgacttgtttaaattatgacattattgtatcgtgaaaatctcatggcttgtgatgtcgaggtgttgcttctctgatcccaagatgctgagtttgtttttgttttttgggatttgagaaaatgataatgtgttcttagtctatggtggggtcatttatttgtcacttcgaagacagattttgatgcccgaatagctcttcttgcttctttcttggtcacaaacaaaagacaatttgtcaatttgtgtgttttaggtgtagaaaaaggctagaaagctgtcattgttaagcttgtatagactcttttcttgccaatgaccattcgttttttttccccttacattttgtcctttttgtcgagcgaatcttcaatgttcctaactgaaaacggagtgggctgaagaaaatctcaacaacggctggaggcgatgtaacttgagctatcgaaaaggaatggaactgcgacgaaaccatgtaaataataataatagtgtattgttgttctttggtatattttcacacacactctcttctgtaacttacaaaagaatattcataatcacgtttgaatagctcttagacacaaatgagttgggttataaattagtaattaacaatggcatgttacaaattagactaacaacattgtagcaaatcaagccgattatattttatttaattagtaaaagattaacacaacaaaagaaacctgaaaatagttaagtggagggccccatgaccactaacaaaaacatataagctcttttcgttttgttactctctccattgaattctgtcttgatcactttcgattctctcaaaaaatcccataactttcccaacgaaaaatgttccgatcaatgattgttcgatctgcttccccagtgaagcagggtcttctccgcagaggattcgcctctgaatctgttcccgatcgcaaagtcgtcatcctcggtgccgccggtgggatcggccagccactttctcttctcatgaagcttaaccctctcgtctcttctctctccctctatgatatcgccaacactcccggcgttgctgctgacgtcggtcacatcaacacccgatctcaggtacccgatcgcttccatgttttcatcttcggtctagattcgatgatcgtccacgatttgctaattgtattggcgataatctgtaaaatccttgtcttttatgtgcgattgtcatgtttcaaacaggtttctgggtacatgggtgatgatgatttggggaaagctctagaaggcgctgacctcgtcattattccagctggtgtcccaaggaagcctggcatgacccgtgatgatcttttcaacatcaatgctggcattgtcaagaacctcagcatcgccatcgccaagtattgcccacaagtaatcattctctcttctctctgttttttataattagatattactgtttgttcacattcactaaacaacgtaggttttgccttgcttactcttgatctggtatataaccaaatgagtgagatctttgtaaatttattctttgttgaatcaggcacttgtcaacatgatcagcaaccctgtgaactccactgttccaattgcagctgagatttttaagaaggctggtacctatgatgagaagaaattattcggtgtcaccactcttgatgttgtcagggctaggactttctatgctggaaaatcggatgtcaatgttgcaggttcctcttattgtcttttcttggccttttcctaggatctttggctgaatacttaccacttagttatctatctgcttcaaacaagatattaatggtatatgttgttatagcttctgatgtttagattcgaatgcttgcatatgcagaggttaatgttccagttgttggtggtcatgctggcatcacgattcttcctctcttttctcaggttacctatcgccttttctctttcttgtatactgcttatcattttggtctgtttttgttctcaaagtgttttgtttaatgtatgtataggctagccctcaagccaacttgtcggatgatttaatcagggccctcacaaagcgtacccaggacggagggacagaagtcgtggaggcaaaagctggaaagggttcagctacattgtcaatggcgtaagttcataaatgtcactttttgggttccgcaatggttgaaagataccgccattacacactttctgatattgtcacatcacaaattgttttgtgctatctcctctttctggtattctttgagttatgtcttttgattgttctcttatgaaatctgctttctgtggaagctatgcgggagcactctttgctgatgcatgcttaaagggactcaacggtgttccaaatgtggtggaatgctcattcgtccaatctaccatcaccgagcttcctttcttcgcctcaaaggtaagagtaccaaaaactattaaccatatcaaaatcaccaagattatataagtcatgatgttcatttaaccccttgtctctttgtgatttggcaggtaagactgggaaagaacggagtggaggaagtgctagatctagggccactctcagactttgaaaaggaaggcttagaagccctcaaggcagaactcaaatcctctatcgagaagggcatcaaatttgccaaccaatgagtttttgcatcttgaaactattgattttggactaaactttaggttaatgtttgtctttccaattttccggtagagttgtcttcttcctctgcggattttataatttcccttcaataaattctccatttctgctcttgaggaaccaaccattgggaactctgtaataaaaagaacaagctgttgtgctgctatgttggttatgattcgttttcctttttccttattgtttgctagaaaaaagaaagaaaataataaatcgttgtgagttgcattatttgggcaactactactactattcataagttgcaatttatctacccttgcagtatataattaatttacagacagatgaaagtgtacttgttgatgatatttgttggatcacgagcctttctgtctttatgattttttaattttttcttactttgatgaataaattgatgtgaaaagaagtgtgagagtgtgataggacatcatgtcccttctcaatgtctcaccttttttatttgttttacttctcttttttttgtaaacaaacaaaactaatgtggaaataaaagacttattagtaagttcataaataaatttcatacgatttaataaaagttatcaatatttttgtttttatttgaagacatttttcttattgacaatgtatttatttagtttttttttgaaaagggttatttatttagtgttttcaaatctatcttgtgtaaatatgagtagataaacacaagaacaacaacgaaaatatgagtagtaaattagatagctggctagagacccttcgaaaatgacaaataatatcgaacaaaacaaaaataattttgatagcgaatggacagtgaaggtgtttaatacttattcataagaaagaaagaaaaagtaatcaaaattttatgtttttgagaataaaggaaacatagagacaactgattttatacaagtgatccgaatggtactatcgatatataacatacgacaaaaagcacgaatttgcctgtaaagggtaatatcgtgatttcgttaagagccaaagggtagagtaggtgaagtgttaatgttaagtggagcaatttgtcatctgtcgccacgtcatcatgagaagccatgtcctacgtgccaattcgatgttacgtgtcttttctctctctattcaaaaattcggaagaactgattttctgttattttcttgtttactccttatactcttaaaaataggcagatcggacccctatctttctatttctataatttgacccatgattcacacccaaattgaataatataatgagaattttgactaaatgtttaaccaaccaatgaattgggtggtcatcgggtcgattggaaacagaggaaagtatacattacatttttgagatgcatagtttagatgtttatatactatgaaatctgtttcatttttagatcgaatatttgacaacaaattattactacgatactagtaattgaattatttcacttttagaatattgaccatccttgaaactttttttatattctttttcttttgccattcttgaaacatgattccaacttgtgcatgtttttatattactgacgagtgaatgatgacagaccaaagagagtcatgaatatccgcaaagcattgtgcctccatgttactattttatttccatgataacttataaataaccgattactttgattaataaatcatatctcatgacatttaaaaaagataatatcgtatttctcttcttttatagtcgactactacgtccttcttaatgctcgaagagcaaactaaataagatgatccatacatactacttgcctacttggccatattgtcaactactttgatgatcacaatatcattttgatgaggcgtatatatatacatttaattaatattgatgtcaaaaactaaaactgacgttaataatcaatgacattattgtgcttaattattgcatttcatacaaatttccccataattaagaatttaaatctctcgtaatcattctattttgttgtgttgcaaatcgtgaccgtaattccaagtggaagctacttttgatttacatttaattaatatgcaaccgtgggatgacatatattctccttttctctactaaacaacctatttcatgtttaaatattatattttgttttgtttgattaattattttattgtgttcgtattaggtttgttaattgacccttttctatcatgctaatatgtcactttctgatttattattacattaaagtaggtggtctaatagtaattatttatatgaatagttttaaactatcaaataatgctgtatactatatatatttttccaactaaaaaattatatagttatgatcctttgcgtcaagtttttattattgctttgaagaaaaaacatattcaactacttgaaaattacgttagcttaccgtacgtgtgttcaaatttaatatgctacaaaattgtgtgaacaatataataggtttgttgtatttattcgtttttcaccaatctggagatattttgtggtacaagtattataaccacaatatattccatacatgaattagttgtgagagttatagtcaaattggttgggattcaagaagcattatactattattatagagtcccaccaattatttttgaactcgtaaaattctcaagatcttagaaatgtctccgttgaagcttagattgtcttttactcacctttattagtttatttatacgtcgtattcttcaatttcaaaatacctttcatatatgaatttgggtgatatgcacacgaacacgatacggtgaaatcaattagttccacaagtcaaaatagctagaaaagaagtattggattttagaacaaagaataacgagagtcttattgtgtttgttactagtttatagaatctaaaacaggattgcaaaaaacaaaaacatcaaaaacgaagatgagagatgaaaaaagaaaatcttagattataaagagccctaattgtattgctaactaatattatattcttcttttaacgagttcgatttttcgaataaaatctactttagttaactattgagattcttacaacaaaaaggtaaaaagaagtggagcatcaacaagctttatgtatttgcattgaactagcatgggtcaacccttaaaagaaaccgagaagcacaaaaggttgaattgaaccttgacccatctaacaccataggtttttagggtatttattcatttattgaattcggaaactcgaaaaataaagtagctagttcattccagtgatttcaactttttaagtatataatccccatgattatgtatgtatgtggacatgtccacgaaaagagtgcccattttcatatcaaggaagttagtaactctgaccaaaagtagatgttttaacacatcttagtatttttatatcacactaaattaaagtagtctgtttaatgtattctcttagaaaataacataatgatttgcatgcacataacaaatcctatactattattttggtaaacaaatttggttttggaaacatctaactctaaaaaccatcattattattattattattttttttctaatattttggcatcctacaatttagtttatgattgtgttgattattatttggttgtatttgcatctacacattaagttaaacattgattttaaaaattaacatgaacaaaatgaatacttactgttaaaaccttataacaatcagattttttttttaaacaaagaatggaaaaaaatgaataaatttgggaaacgaggaagctttggttacccaaaaaagaaagaaagaaaaaataaaagtattgaatgtggagatgagaggaaaaaaacacttactgtcatcttacccagttgcgtcatcatcaaacccacaacactctcttcctcttccctcttccttctgcttattttactttttctctttaaccattttcccgagagagaaaaataaaaagaaaagctttctctgggtttttcttgattggtcaattacacatctccctttctctcttctctctctcaccttcgcttgctttgcttgcttcatctctttggtctccttcttgcgttttctatttactacacagaccaaacaatagagagagactttaagctatagaaaaaaagagagagattctctcaaatatgggttagtccacaattttcactaaacctcttcttcttaggattgtttttagggttagggttttgaggtgaggagagcaagtatgcgggagtttcatcctttttgagttactctggattcctcaccctctaacgacgaccaccgtcgccgccgccgccgccgtctcgacgaatatgctctaccaatgtctgacgaccaattccatcacccgccgcctccttcttcaatgaggcaccgttctacgtcggatgcggcggacggcggctgcggcgagattgttgaggtgcaaggtggtcacattgttcggtctaccggaagaaaagaccgccacagcaaagtctgcacggctaaagggccacgtgaccggcgcgtgagactctctgctcacacggcgattcagttttacgatgttcaagacaggcttggtttcgaccgacctagcaaagccgttgattggcttatcaaaaaggctaagacttccattgacgagctcgctgagcttcctccctggaatcccgccgatgcaattcgcctagccgctgctaacgctaaacccagaagaaccaccgccaaaacccaaatctctccgtctccgccaccgccgcaacagcaacaacaacaacaacagcttcagttcggtgttggcttcaacggaggaggagcagagcatccgagtaacaacgagtcgagttttctcccgccgtcaatggattcagattcgatagctgacactataaagtcgttttttccggtgattggctcttcaacggaggctccttcgaatcataaccttatgcacaactatcatcatcagcatccgccggatttgctttctcgaactaatagccaaaaccaagatctccgtctctcgctgcaatcgttcccggatggtccaccgtcgcttctgcaccaccaacatcaccaccacacctctgcttccgcctccgagcctactctgttctacggacagagcaatccgttagggtttgacacatcgagttgggagcagcagtcgtcggaattcggaaggattcagagactagtggcttggaacagcggcggtggcggcggagcaaccgatacaggaaacggaggagggtttctgttcgctcctcctactccttcaacgacgtcgtttcagccagttcttggccaaagccaacagctttattctcagaggggtccccttcagtccagttacagtcccatgatccgtgcttggtttgatcctcaccatcatcaccaatccatctccaccgacgatctcaaccaccaccatcaccttcctccaccggttcaccaatcagcaatccccggaatcggattcgcctcaggtgaattctcttcgggttttcgcataccagcacggtttcagggccaagaagaggagcagcacgacggtctcactcacaagccgtcctctgcttcctctatttctcgccattgacaatcgaaactaatcctctaagtttcaggtttatctcaagttctgtccttttacatcaaattcactacttttgtacttctttggtcattgaactttaaaccattttgcagggcttgtctagcttccatgcacattgaagcttgacttagattgtccggaacagggaaggtgttctcggtttgtgtagtcaatggcctgaatctagaaaacgcaaggaaatgaagaaagaacaacagtttcaggttcttcttcttcttcttccaatatcttaaccttgccgattgtaatttttcatattttcaccagttagaccaacgttcttctgtagctcaattatggttagattccaaggtttcgtcttgttgtgttatgtttgtaactttgtatcatcatcatcctattgttactgctccctgttcttattgtgtaactccgtggatgttctaataaagtctgaaactttctctttgggttttacttttactgctctgttcaggctagatccttgttatttaaacaacatgagattcctatttctcacgtaatcttttggtcccaagagatataagttggtcattttccatgaacagtaagttttgaattgtttcttcttctggaacatcagggggatttagccagttcccttaaattacaagtgaaacttagctcactaagagtaaaaatatgattattgttttctatgtctgatgtcaataattgttctctctcacctactttagtggtaggaggagatccaccaaacttgaatgtgatgttgtctttgatgagtaaaagaatggggacatgagataggtaaagagagccacccatgttggtctaaatgaaggaagttgatcaaaactagtctatcttctctatcatcatcatcttttgataataatattggatttttgcaaagtttagtcaaaaacacttggggtctaaatgcatgtgtattataagaatatttaactttaccttttaatagaaaagcagcaacaccttttcatgtgatgtaatcaaaacacaccagatggatgagttgagatatcataaagtacgtttacatcaaaagatagaaaagaagaatcttcaatttaaaggtctaatgagtcatgacacaaagatcatatccaatctaccgtttattctgtctattcgtttgtcaacagataagaagatcattaagtttgttctataagacagttgtacagtacaaacttgtatcaagtaaaacgtttcacattaaacctcaaaatatctaatgggttgaagaagatggaaccaaaattgtaaaagagctgtcgctttaaggaatggtcccctctctcacactcttgtaagatctcaatgcttttttgctaaagatctagttaaaaaagtcatagccttttagactcttgacaagtccataaataaattgcatgaataccaatttgaaatgagcaaaaactgcaaaaaagaaacacattaaaagcacaaaaggtgatcatttttctctttaaagattaatcaatttagatcataggataagtgtcaacctcagtaaaccatatgtaagaactttcatggattcgaacaatgcaagaattttccgagactgtcattaagggatgcataaatgtgagactcaaacctcaaaacaactcttaaagctctctctcaccaacatcaacatgtgaagcaattataataaacatgtgcaatcacatcaatctctttgatatgaagtaaacaaatcgtctaacgtagacaacatatgaacatacacattgacaagtttctgtggccaaataagggataaagtagttcatcaattgggataacaaattaaagaatcgtctttctgaagaagagagtaaaaaaaaaaacactcaatctatgaaaccggttcttctgaaaacagcattccttacctgccggagatctctccctttaagtgtccttcctgctccttcaagcacagagcaagataacaacgacgactgagccaaagaccgagctacaatctcgtgaggcggaagcatttcgccttcctcttcttcctcatcatcatccaccacatcagtcagcttgaattccttcttatgacgattcatcatcgcagacgacactaacggcacttgaaccggagctgattgaggatacttcccaccacctacaaaagaagctgaaaacggaagcctctcttgaggcggtttaggcgcggtcgggatagctcgagctgaagacgaagaaccagctgatgcaccaccacctgaagaagacgatgaagaagctgtggaggagacagaagtagagagagcagccgcaggtttgtggtgaaagacatgacttaagtaactactactcccagatgattcaggaagagccgcgaggataccagacgcttccacattcttcaaaccgcttttgctcctctgaagctgacgagcaggagtttgttgcttcgccggagatgatacaggagaatgacgagcttgaggcggcgcgtgagatatgtcgattgcaaagatgtcgtcttcattcagctcaccgtctgcagagtcggagatagtggctaacgacgacggtgaggaaaaatcgagccgtggatttttattcattgttgctaaaaaaacaaaactcttgagatctgagaatctgagaaattaggttgatttgataaagaagagtcttcacccaccaaaaaagattagatttttaacgacctgaaaattaaagagtagagtttggaattagatcgatccattgttgaaagtttcgattttttttcaattttctgggtaaaaaagaaagtgaagggtcgttttcaatcaaatcttccaagagatttactcaaggaactcaatcataaccgcaataaattgaaaacctttcatgtgaacatgataattaggtcgttctttttttccagaaatctcgaatcaatgaaaattgtagcaaaccaaaggtcggattccaagaagatgaatttaagcaattatctcaaagagagatccagaatcaaaaaaaagattcgagaaattacctgaactctgggaagaaaaagaaataacagcagctaatcaggtgcacgaaccaggtaagcgatctaaatgtttttagcaacagagagagagagaccaaaaacaagaagacctgaatgatattttctagaatttggtatccgtacaatacgatgccgtttttgtaacaataagcccaatagagtaggcccaaatatagtttgtatacaaaaagaaaccaaaccagacaaatttcagttgtaaacataaaccggtttttttgctaatgattgatcaaaattatccggaaccaggctttttcgagttaccaacttcatccggtttagcagaggtttttgtgatcacattattgggtgatgatttctccggtttcttagatggtttgatcggtttaacgacgtagcattgagccctaatctcccaaggtcgagccgcaatccaccgttctttccaactccatccccagctttctttgccaaggttaaacgaagcttgacctagatactgtgtagcattagccctccactacaaaataccaaaaaacagaaagttacttgagccacaagttatctaaaacacaaaccaaccaatgtaagtttaagaggtctcagttttgattgacctgatgagagaaagcataagccattgctctttcacgcttaaccgtagcttcttctttctgttgtatctttgcgagaatctcctccattgtttcagagcctccacaccattcaacttctagctcgtgaagtttgatctccagcttcaaacgattctccaatcttttgtgttggagtctaccttgtgtcaccatatacaaacgtcgtgctctgatctgattctgtatatcgtaccaagaatgaatcacattgagtgcagtcgaggtttggttcatcactgtatggccttggatcagcgagttaaatctcctcgcactcttcaagctgcatagtctttttctcgcctgcagaagattcgcaacaacgttaggtaaaattggagcggtaaataagtggaaaatgacaaaccttgaatgctcgaaaagccttttgaatgcgaataacagcgacttctacggtaagcttagtagaagcagcagagcttgattcaaccggtttgacacggtttgatgtttcagaatgtacctaataataacatatttaaagtcatctacgacaagaaagaaaaagagaatgaaacagagtttttttcactaacgttgcctcgatttgatttgttcttctttgttccgtttagacagatgattgagcggagcagccatccagatcccataacagaagactggctcagtttaaaggtaagagattcagaacagcacaatgttttatcggttatgatcacaaaatctggctcaatatttaactagattatgtgaaagagatatgagattataatgtgttctttgttttaaggcacaagaaggtttaatgttgagtggttttcaagtaaatgagagagagtgttgaagcttcgctctctttgtggtgaataaacccatcttggtgattgacatttcacccaatggggaaggtgttgttttatcttttcttcaaattcaaggtggtgctgtttctgatatttttattagtttaggctaagattgtggagaccgatcaaataaaggatgagattggcaaaagaggatgatgtaaaacaaataaattttcaaccattggtcccggcggggctcgaacccgcgaccttcggctcataagaccaacgctctaaccaactgagctacgggacctgtttgaatattatgttccatacttttatttctccttttttttattaatcctttttagcaattaatgaattaaacattactattcccaaattcttgcatccaaataaatttccaaattcaactttgtattgttaaagctaggttttatgcttttctcaagctcaaaaaatcatgtattatagacacatgttagtgaatagtgagatgcttacataatacgcatgtttttcactcttgatgcgtggtggaatcatcaaagctttgggcagcaaaatcgcaaactgagaaaaaccagggagattcacccgttttactgcacttgtagacttgtagtcctgaagaacaagtcttgttggttcctgtttattaattatcctccatatcctcatcggacattaagctattccataaccactctacagaaacatctctaagaaagcttttccaaaaccagtatggagctggagctcgttgaggatatgctagaagaattctgtatccccaattttttagttcgcacagcgtacgagctaacccttccagttgctcagaaccgattatgagcattatagtagctacgtgtttagtttatatgggccattacgtgtggcccaaataattacttgtgttaggtttaaatcgaagaatatatttgattgggcttataattacttttacaattggcccagtccaagaatcagatggatctgaatccgacccgtaagaagatgtgagtaaaaatttcatccacttgcgtgtctctccctttcaaaggctcaaaatttaaatctctcattcttcttgtgcggcgtttctttttctccttttgtccgtacgcgttttcttaccggtgacctgaaagtctcaaaaaatggcggcgtatagagctgacgatgattacgatttcctctacaaggtggtattaatcggtgattccggcgtcggtaaatccaatctgctttctcgattcacgcgcaacgagttcagcctcgagtctaaatccaccatcggtgtcgaattcgccacccgaagcattcatgtcgatgaaaaaatcgtcaaggctcagatttgggacaccgccggccaagagaggtaatatatttacaattccctttaaaatggaaatgattccatgactctcctctgatgaatctgaggaaagcaattggtaggagaaaggtttgatcatgtgtatgtattgattttgtttttgttggaacttcagataccgagcaatcacaagcgcatactatcgaggagctgttggggctttgcttgtttatgatgttacacggcatgtgacatttgagaacgttgagagatggttgaaggagcttagagaccacacagaggccaacattgtgatcatgcttgttgggaataaagcggatctacgtcacctaagagctgtttcaactgaagatgctaaagcctttgcagagagagagaacacattctttatggagacatctgcacttgaagctttgaacgttgagaatgctttcactgaagtgctttctcaaatataccgtgttgcaagcaagaaggcgttggatattggtgatgatcacactactcttcctaaaggacaaagtattaatgttgggtctaaggatgatgtttctgaggttaagaaggttggatgctgctcaagttgatcttgatcaagccattttgtctgtttcttaggcaagaatatagtttgattatctatggaagacatgcagatgattctttcttgtgtttttcctttagttgcttcttttggtgtaagtttctcagatcctgttttaaatattattttttacacaatcattcgtatgcgataatctatgaacaaaagagatgttttagatgaagaaagtttaactctaggagcaaccagaatgtacaaagaaccaaaaaaagcctatacagtttttatagtcactaagccaatcttagctttagactgtcactttaatgtgcacaaaagtacaaatttacagaatttgggggctgaaacataccctgactctgtttctctcttataaaaccaatagataaaaagcgtcttaaaaaccatcagcgataacctcttttaggttgtagcagcaacctcttctcatctactacttaaccttagcttcttcttcttctctatgaccaatgcctctgatttacagattgggcaaacgttcttgataaccaaccacttcttcaagcattctgcatggtatttgtgcatgcaatccagcgttgcgatcttatcttcgttcttgtagttttcctgtcagatccccattatatataaaaaaaaaactttttactactaagatgagtgagtgaatgtttacataagcttggaggatgtagtctcaagattttactggctttacctggcatatcgtgcaagaatcagtctctagatcagtagatggaccttcttccaggttaattctggtcgaggttcttcttttcagaagttctttaacatcttctgatgacaagcctgtcttcacagttccaatctggtcgctcaaagcaagaagctcctgcgccacccaggttttgaatgttataagataagacaaaccaatgtgaactcattaaatacctacctatatggtgaaagagtaaagaatatttgtcgtctaggactaacctcatatgacatatcttctatgtctaagcgcatgtcttgatgatgatcgacataattaacagcattgtagaagtctcctacttcccaaaatgcattttcctacacatattaacagaaagagtaaaaaagccattattgaatagtgaacactcttttgaacaaactgacactataagatgaaaaatgtgctaaagatgttagtacattcgcgggcattgctctaaagtgaggcaattcacggtgtcttagaattgctgcaggtacaaaatcttctccgggatattggtttatcctgaatccggttgattgaacctgtcccatatgactgtatgaagcaggatgcaaagtctcagcgtatgaggctgaaggcatgtgagggtatacgatgggaggaggaggtacggggtgatggctaatatagtggttcctttggtatacagatggcgtggggtttctgctactagatgtttcatggtatcttgggaagcaaacattaccagattctatagatccagtagcaatgttacctaagagatcattcaagaagaagaataaaattatcaagaacttgccaaaagaccaatcgcaatgctgagaataagttaaggatagtaccatgcatataaggtacggcaggtgcttgagaccaaagcgaagatgatccatcagatctgttgccattacagtgttggtcataccagattgagccaagaggtggaaaaggatgagctgcatagtttccttgactgaagttgttatgaccatgagagagaagtggatccattgtagctgctcctgctctgttcctcacacttctctgatctagtggttgtggataagtaccaaaatgtgggaatgaaaaaggtgctgtctccgatgtattcaattgagggaaagaacaaggagcaactggatactgagaatttccaggtattacttcagaactctttcttttgaatccgtgatccataaaatgggcatttctctcatgttcagtggaagtaactccaacaactgcatcattacttccatgagacaacagaaaactcggtggagcttcataattcacataagggacatagaaatttggtgcggttgacatgccagaaccaagatttgaagcatgttgatgatggtactgtggaggcccgtagaacattgagttgttatcataaggttcttgcagagaatgagcttctaaatgaggaacagtgttcactggtgggatatctggatacagatagttagttccaatgcgaggttcaggatggggaacaaagctttgagaattctgctccatgtctgaaccagtcatcatatttctttgtcgcatattgcttgttgcagaaaacacctggtagttgaatttacaaagatcagcaacaatgcaacaaaacaacaattaaaattcacccacaaagacagctaaaactcgatgctagttacaccgcacgctgattctagctagtgcacaaactactgatatctaataatggaatcaaaacatacaacaagtaaatatcatcccaacttgtcccgtgaatgggataagccaagtctcaaaacatcccagaattttttcgtcatcatcgcaagtaatggagacacacacacaaaaaaaacagtatcctgacagcacagaacattcaaggtccacggatacattgtagaatatgaaaccttagctgcagagatcaaaccccaaacattcaaaaaagtaaatccttcgaaccttttcctaacccaataattttcacagaaactaagcagtggctttagcaaaactcaccacccttgtggcagaaaacaacactaaattacaatttaatgaggcacaagccacgttgccagacatgccttaggaaaatcaaatcaaacccaattcacgaaacataaaccagaaaattttagaaaagaagtagagaagatttgttattaagttgctgacctttctagcatcaaagattgaagaaacaaagcttcgaaaattcagcaaaaaccaaccaactcgtattaatcggaagctcccctgaagcataaacagagtttagaaaattaacaacctagacgatcaaaagaagattaagcctaaattccgactaaccaataacaatgcaattcttcagcagctctcgtattaaaaacaatttcaaaaccatatttcaccaaaaacgacaaataaaaactcataatcaaaaagctcgagaatctgataatcgttaggatcataagagataagtacctgattattttcctcagggagagagagatccaaggacggacgagagagagattagatgaagattaagacgtcggttttctagtttctaatttattttcctctcacggtgacggaaggttttttattttcctcttcttctcagttttatttaattcatttattctcttatgcttatctttgcttttttttattaatttatttgcccttttttcattggtttcttgagttttcggacagcaaatatttttttattctaattaaaaaatgaatatcccttatttaccaaacgacatcgtacaaggatcgaaaataattaactcaaaatcttttgatttccccatctaattactacatttaatagcatgatcgtttttgtcttgtactaaagcatgccattgaatttaacaacaagataagcatgtcactggcagccattaatgaaggtatgcttctactctaactaacaatcttttttaaaaaaattagacctctggaattttcactatcataggacgattaaaaaaaaagttaggcaaaatgttgagaaacagaaaaattaggcaaaacttagaactaaaacaatagatcaatgcgacggaacagaattgaattatcccatgaggcaagtaacatatgatgcgaatatttatagggaggtgattcccaatcccatgtgcttctttttggttaaaccaccttctcacctaatctaattgtgcccaattaatcatccaagtctctctgtttatgttaagaaagaacattataaaaatacaaccatgtctttttttttttcttctaaatacaaccatatcttatcttagcttttataagctatgaaacaatgatttaatacatgtgtatattttatcatataccaaagtataatcaaagcaaaaatcataacgtggtgaaaatcgtattattattattattggatgctagagaaacggcagcgttttgggaggtcttaattcttaaaccttactcttgtgattctcgagccgcttcaaggagcttcgtgcttgtcaacaaattttccaagcgcccgctgaactaaaaaagatgagttctgatctgaagagaaagccgaagaagaagataactcctaaacctgttcaattaaaccctaattggtcactcctccaacaagttagtctctatttctttcttctcttagctaatttctcctgtttttcttccagacttttgttcagccattgatttggttcccgttatttttccttgtagaaactgaaatctgattctcatggcaacactcgaaaatcttcaaacccagaaaatcccagctccatattaggtagcattcaacctaaaaattcgaactttaagcttgggtttagggtttatagactggtttggtttctcagttgtcttaactcacacaacaaacttgcagggaagcgaaaggagagacccgattcggaggttgatgttcctaagattaatcccttagctccggttaacgacgattccaggttggtcatgtttgctatttggctttgtggactttctgttagtaaatggttttaattgctacatgatgactaataactagctcagatatacacaatgtcatgagctttacattgttagtgtcttcctgctctgggaaatcagggttcttgttgatgaattataatatcttgtatagaacttttgtttataagctactatcctcctctgcttttcatttttgtgaatgttggtggttgtggaattgacttgggtagcttaaatagtaaaagaatgttgaaatagctctaagcaaaaaaagaaaaaaggattttgccaatagatgtttctttctttgtgcaatcttgtatatcaaatctcaccaatctgtgggtagtttgacagatgaagtggctatggactgtgaaatggttggtgtcagtcaaggaaccaaaagtgcccttggacgagttaccttggtacacattgcctttccaacttttgtgtttttcttttttaagtatcatgaggcgaaattttcagtttgtttcagttctgagcgcttgaataaagagttgatgtcatttcattatcgctttctctttatccatattttgaggtgtatatctgtctcttcttctacatgaaggtcactgattatttcaccatttattgacaggtaaataaatggggaaatgttctatatgatgagtttgtccgtccagtggaacatgttgttgactttcgtacttctattagcgggattcgacctcgagatttgagaaagggttggttttactttcaacattccgtaccttttttcttgaatctgtcaacattcttgctttttaggctgcaaaatgaattggatcatttactaaacagtttggaacttcgatcttaatttagctttcttttaaccacagccaaagatttccgcgttgctcaaaccaaagtagcagagttgataaagggaaagattctcgtgggacacgccttgcataatgatctcaaggtctgtaggtttcacgaatctaggatctggttacaatatcaattcagagttttaacagaaataaactttgtaacaggctttgctgctaactcacccgaaaaaggacataagggacacaggagaatatcagccctttctcaagtattcacactctaacccctctctttctctatctgatacttgtcatactttcttttcccaaagttacttcaaacctttgaatcgagtcctaatgaaactcgtaatcttccaaacaggggcaaaacaagaaagtctctgaaacatctcgcatctgaaattctaggggctgacattcaaaatggagagcactgccctgtaagtgtgtacatataaatataaaacaaacagcttcatgttttggagctgcaaatctataactattcttcaatggcagattgatgatgcaagagctgcgatgatgctttaccaaaagaacagaaaagagtgggagaaaactgtgaaagaccagacacggatgtggctgaaacaaaagaagcgtaagcctaagaagaaagctaaatatgggaacaacgcttccaccaatgacaatccaattgtttgaatcaatcagcgagagcaaacctgactaaacagaaaaccaagaatcgctgaaaagttttggtcgtttttcctttctttttgattgttctcagcatcaggcgctgcatccaaatgtactatcgtctattacaatgttataccagattagatcatgtattattgttaaacaaaaaatatacatttttggaggttccgaaattaagctaatcgttcttgagttcagttttgtccaattacggttgaacattgtagaaaccaaaacctctacttctcacatcacatatactgtactgatcaaatcggttcggtttggagtaaaccggttaattacataaaactctagaggttgcatgtacagtcaagtaaacaaagccgctctgcggacgcaaatgctgccacgtcttcaatttccgtttctgtgtaaacaagaaaacctaaaaaacagaagcaagcagattctcgcatcaacgaagaagaagaagaaaaggacgagtagattgatttcttagacgacggagaaatgcgagtgatgagatcattgcgcggtaattccggtgctggattggttttccggccggcgaggttaaattctcttcggagcgtctttaccggttgccgtgctgtgattttgccccgctttggtggtccggaggtttttgagctccgggagaatgttccggtgccgaatctgaatccaaatgaggttcttgtcaaggcgaaagctgtctccgttaatcctcttgattgcagagtgagtgttaatctgcttgatccgttttgatttcattttatgagtggcattagatatcttcggagattgctttatttgggaattaagattggcgtgatcggttagcttggatctcttgcatatgttctaggagtttaatctcacgttgatgataatatccagaatgtttgctgcttgctgcttcacttctttagatttcaaatcaaaatcttgtcttcgatactttgaagagtagtgaaattgtttttttcatgatcattttgctgatatggcatcaagtgttaagatgagaaatgtgtttgttttcagatacgagctggatatggacgttctgtattccaaccgcatctacctattatagttggacgtgatgtcagtggtgaagttgcggcaattgggacttcagtaaagtcacttaaagtaggacaagaagtttttggtgcgttgcatccgacggcgttaagaggtacttatactgactatggaattctttcggaagacgaactcacggaaaagccatcatcaatttcacatgtggtaagtagaaagatctagataccctttaacctctctacctttttttttatattgttttttggttaagtgatttcagctattcttgtgtctgtctcttgtaggaagcaagtgccattccttttgcagctttgactgcttggcgtgctttgaagagtaatgcaaggataactgaagggtatgattttgagaaactattattcatgtggcaagaagttgatactaattcacctttcaacattcacacaaatgcttttcgtgttttttgtgaactactatgaactcaatagcataatcttaaaatcctttttatttgcagacaaagactattagtctttggaggaggaggagcagtaggtttttctgcaatccagcttgcggtagcatctgggtgtcatgttacagcctcttgtgttggtcagactaaagacagaatacttgcagctggggccgagcaagctgttgactacacaaccgaggtaatgacaccagctgtttatttatctgctcacccaaagtagagccattatgatcttgttctgattcttgaatctgaatctgtttcatgtacaggacattgagttggcggtaaaaggaaaatttgatgccgtgttagatactattggtgggcctgaaacggagagaataggcattaacttcttaaggaagggtggaaactatatgactcttcaggtatataacatttcttgtgtttctgctttacaagctgcagtgaccttggttggtcttggattttgttttaacaacagtgatttattttttccctcttttgaatttatctgttaaagggtgaggctgcatcgttgactgataaatacggttttgtggttgggcttccccttgcaacatcgctcttgatgaagaaaaagatacaatatcagtattctcatggaataggtatatgatgtatatatatatatcctgcattactctctctctctctctctttgattttgaagtaactattctgataataagacctgtctcattgagcttttgagtgggaaagaaatggttaatgtgataaaatctgactgtgatgaacttatataaaaacagactattggtggacgtatatgagggctgatcctgaaggtctagccgagattcagcgtttagttggagctggaaagctaaaaatacctgttgaaaaaacatttccaataaccgatgttgtagcagctcatgaagccaaggagaagaaacagattccgggtaaggtggttctagagttctgaactacatatacatagtagaaataataacacctgcatagttctctagcagttgttctttctagaatttacacgcagagaaacaaatgtttcgcgtctggagttttctgtaaatgagatctatcaggcttagattcagatcaagaacttgaagtgtctgtatagactttccaaagggttcgtttttatttggattttgtctgtgttgcaaactactaagccaagtaatggaaatggtttagaaagatcatttttgttgtcatctattacttggaatcttaccagtactaacaataaacataacaatcacatttctgatactcttcttgattaaaattgaaactattacttgctatatagttaaaccccagatctaacgtgagaaaactgtaaaggtatgagagaacgtagatgtaacctcaattaattgaagacatgcttatagttgctaaatgtgtgacaccaaactaaagttgatcacatgatcgaacaaatcccacaaaatcaaaatccaacctcatagaaatagcattctctgtttcttacttgattaaattatgtttcaaagatcataacatgtaataattaattaatttttaaaaaggtctggaagtgtcattaaaagcataacatgcagtttaattaagtgattaaatgtatgttttgtctggttctcgtcctttaatggtctctagtcaaactcatctctcctctaccagatcaacaaacaactgaatcctttttacgcgccactctgctgcgcgtgtacttcacagcctgtcatagtaactcctagcgacgtcagtgagaactgagaactttctccttctttcctaaattccaagtcttgaacacttttttctgttaaatgttagtgccgagtctacgaaatcgaaaccttcttaagttctttaatttcttctaaatatctctagcaagatcatactatatctacgtacttattatttttgggggaccaatgagcacatgtttatatatcaatcatattaattgtcagtaaaagcacgtagacaccttccatctttgtaatcaatttggcatttattatggataattgtttgtttttgtatacaacaaatgttcttgctgttgaaaacgggattattacatcttatagtaccattctggtcatagtaacaacagtataatataatttacaaaatctatttattttttctgaaagttgtctttgtaacaaattaaattattaatatagcagaagaaagtatgcatttagtatttactatatatggtttttctagcatttagaaaaaataattagtctagttgaaaaataaaataaaagtagaaaaagagttattaaaagcatgttaatgctaatatgagggtggtcctgttagtcttataatggtctggtcaaactcctccttctcacgactgccacatcacacaacccatcttcttccattttctgtttagtgtgaccgttgcttcgcgccttcgcggttcagtgagaagctcacgcgcgttttcttacccgcgtgatttttcaccccattatctcctttatgtgattcttctgttaaagttccggtttatgtatctgatccgaatatctcctttatgtgagtcaaacatatgtgtatgagtgagtttatgtatctgattatttaattttatggcttccttaattgaatgatttaagattaatagtatgtctctaactatttggccaccatactcacattcggaacaacataaatgataaagaagctagcgaatgggtccgactccttttaagtgctacaaaaagcgacacgacgtccttagtttcatgcatccatccacacgaaaatgtaaagtgagaagaaaactcaaaaactaataagaaatgttaaaattaataagaaaaaacaagggccatgtcgaatcattaccctatctctcggtactccgatcacgtgccaactttgggttctataatgcttttattattcatatttaatgtatttttttctttaatttcttttattatctgtcttcgaccgtatttagtccaaaccatgtgaagatttccggtctactgtttttatcattatgaaaaagaaaaggaaaaaagctatggtcctctctaattagagttgattaaaaatttgaataagaaataattaatttatttcactctctccagcttgttctttgtggtttggcttatactgaaaaattgaattcccaaatgtttggtcctattgagtaaatatcatccatttatctaaaatgataatcatttcaaacctaaacacaacaagaaggattttaaaacaatagacctgaactcaatcttactaattcattggttaagttgtcacgacatgtatatgttgataacaaaaggattggttacaatatgggtgcaaattgtggttgtggcttaatgtttttaaaattcacaaattttcaaatattgtctaaaagtatcccacttgtcataaattaccatccaagatccttccaatctctacatgcatatatgtccaataaaatctagctagagtacgagaaaaatatccaaaacttttgaatttgacaaaaagtcttatctttccaaaggaaaataaaagtttgtattatttatttccaccagaaaaaaatctactaaaaaaaaaagaagagactacgaaaacaatacatgcaaaatacacaagagacatgcgtgtctgagtgtttgtgtttttgggaaagccaataataccttttccctttagtgtgcacatgtgtgtatccacagaagcgtacgaaccctttctttaactcgtttcactctcatgggccacattactttcaccatcccctaaattaccacttcacccttcttccatatcattcacacaactaatcaaattacctcaaaaacgcaacaaaactaaatcgtgatcagtcaaagatgattacatagatttaggaagaaggaatctcttaccctaactagatccaggggtattttagtaaattatcataggtacccctaaaagtctctcgattccgttacactctcaatatctctccaatggctatggttactactacactcttcttcttcttcttcttcttcttctccttcttctcactgtaaaaaagaaaaaaaaatggcggaaactgagagaccccaccggtcttcaagtattaacagtagtagcaacaacaacagtggttcatcaaccgatctattcatttgtttcacatctcgtttctcttcttcttcctctatgcgtctctcttctaaatccatccatagcccagctcgttccgcttgtctcaccacttctcttagccgtcgtctccgtactagcggtagcttgaagaacgcttcagctggagttttgaactctcccatgtttggtgctaatggaggacggaagagatctggatctggctacgagaatagtaacaacaacaacaataataacatagagccgtcgtctccgaaggtgacgtgtattggtcaagttagagtgaagactaggaagcatgtgaagaagaagatgagagctagatctagaaggaaaggaggtgagaatagtttcaggagatccgttgatcaaaacgacggtggtggtggatgtcgttttaaagcgagtgagaatcgtttggtgcatcttccggtgactatctgcgagtcgttgagatcgtttgggtctgagctcaactgcttcttcccgtgtcgatcttcctgtacggagaatagtcatggagatgggaggagagctgagagtaacaacgacggttgcggcggcggcggaggaggaagtaattcgtgtggtgcggtgtttacgaggtggtttgtggcggtggaggagacttcgggagggaagagaagagagattgagcttgttgttggtggagaagacgaagttgaggaggataggcggaggagtcgtcggagacatgttttcgaggggcttgatttaagtgagatagagatgaagacggagaagaaagagagaggagaagaagttggacggatgagtatttgttctccgccgaagaatgctttgttgttgatgcggtgtagatctgatccggttaaggttgcggcgttagctaaccgggttcgtgaaagacagttgtcgttaaacgacggcgtatacacagaggaggaagaagatgagagaagaagaaggtttgagctggaaattgaagataagaaacggatcgacttgtgtgagaaatggatctctggtgagactactgtggaaacagaagaagtttcagtagcagttgcagaagcagaagcagaagcagaagcagaagctcctttgccttcaaatccagctacagaggaagaagaaagagtcaaagttgtggaagattcgattgttgaagaagaacaagaagctt

SEQ ID NO: 420 - DNA, 65047 bp, Arabidopsis thaliana
aagcttgtgtagttatatcctaaatcatgagggtaaatggcacatgacaattcgtagttagattaactatatatattaaattaagatgtgggattacattcttaattccctcggttatgaaaatcaaaatcttatcaccagcattcaagggaatacgctgtgtagacaaaacagcaaacaacatgcatctccattaaatgcgtcaaatactgtacggatttctttagtttttttgttacaaattgtatcaaaagtttgttagtacattgtacatacagataacaaatgaatttcactttttagataaaatagtttacacaaaaaaaaaaaaaaaagactttgcatccaatattttccaccacaaaataaatcattcaaaatacggattgattaaatatgtatcatagtaagatctatatttcaaaatttatccttatttcattaagaactttaatgcaaagattacatagtccaattaattttctcattgccaaatattaataattaaattaaagatccagtgataaaaagttttattttaaaattaaagtcaatcaaattaatgtatttaatttgtatctatatttttgacaatgtattcaactttttaaatacatcaataaattcattaataagatgatcaacaaaaattgaaaacgcttggtgaggttaaaaaagaaatgaagggttgataagaaaaacaaaattctttgaaagaggaaagaaaaacacgtggcaaaagataagtggaggtaaaaaagaaaaccatgaaaaccgctggtgttttgtaagagaagccgctaaaaccatttcaggctttgactgttcacaacaaagcgccccaaaaggagcgtcgcttttactctctctcccatcctatatataaacaactctctcctttcctcttctcccttcaattatctatcacaccaccactctctctctaatctatctatccgagaatggccaagatgggcttgaaacccgacccggctactactaaccagacccacaataatgccaaggagattcgttacagaggcgttaggaagcgtccttggggccgttatgccgccgagatccgagatccgggcaagaaaacccgcgtctggcttggcactttcgatacggctgaagaggcggcgcgtgcttacgatacggcggcgcgtgattttcgtggtgctaaggctaagaccaatttcccaacttttctcgagctgagtgaccagaaggtccctaccggtttcgcgcgtagccctagccagagcagcacgctcgactgtgcttctcctccgacgttagttgtgccttcagcgacggctgggaatgttcccccgcagctcgagcttagtctcggcggaggaggcggcggctcgtgttatcagatcccgatgtcgcgtcctgtctactttttggacctgatggggatcggtaacgtaggtcgtggtcagcctcctcctgtgacatcggcgtttagatcgccggtggtgcatgttgcgacgaagatggcttgtggtgcccaaagcgactctgattcgtcatcggtcgttgatttcgaaggtgggatggagaagagatctcagctgttagatctagatcttaatttgcctcctccatcggaacaggcctgagcttttaacggtgtcgtttcaattcgaagcgcatgcgtttcttcttctttttgagctgtgaaaattcgttttctcatagtttttcctctctctctctctcagtctaaatttattaccagtttttagaaagaaaaaacagattaaatctgagagagaaaaatataattttagctgacatggatcgttatgtacatattattacataaccggagatctgaacttttgttgtgtgcttttaattttttgcgacttggtttcaccccatgttgtttctctattttttttactactttttttttttttgttcttccaaattttcaatcaataatttggtaatcttcagaattatcttgtccaatccaatttccgaaattttgattattactacttgtgggttgtggcggctccttctattggctttccttttctatcgttaccaccaaattaaaaaaattgaagggactaaaattacttatttgacaaaacaaaataattgtaagttgaagtataagaaaaactaaaattcaaagtgagattaataaaatggtagttgagtatcgtcggcttttaacaatggtccaagtttccagcagacacgcagccggcgtgtgtgggccctcgttttgctctctgcggcgtaagttagaaaattctttgcgcttacgtcacttagtagtagggtccactcacagagtacggacatactcatttcttttctttctagctaacttggaagagtcttgaagctgagagttaacactctttaggtctgacagagagaacctagatttttaatttgatagattcttaaatttggaaaagaaactgccacaaaacaaagataagattttgttcaattttttttaagaaagatctctagtttcgtaaacaaatttttgtcggcaaaaaatggaaaaagagtacacaaagtctctaaagaaacaactatgactagtctagatattggttttttttatctgaaagcttttagaatatatagcttatagtgcaaaattaattttctttaaactatgacattgaattgattcggagttgaattggactaaaccaacatcatttgacccgttaagctaacaatagtgttatttatagatattcttttggccaattatttctagatggctggtctttttgaattttatttcgttgttttaaatttgtgcggaaagtaaatttaacttgcgaaattttttattgaatgatggcgtgatgtgttgaaaatgtaaatataggtacaaaacaatgatgttaaaagtttgaaagaaaacgacgacgtataagagggtgtgaaatagaaagcggcttcataatgagaggcagagaagagaggtttttgattggattcttgtctccaactccgcaatcagaaagagtcaataactatcctttcgtgattctcgtgtagatccaacggctagattctattcttatccacgtgtctggatcatacactttcatgtttattaactacgcaaaaaaaaaaaaagagtgaagcggcaccgacggccaagcagcgcgagtcatcatcatccttttcagaagagaccgaatcagagacggtggcgcccacattcccattttttttaataatatatttatgagaataagactttttagtagtattatttcaaagtctttgtcctctcaaagagagtatttatagcgagtaaattatgtttacaaatatatatatatatctagaaataaagaatgtttttacgcatcttttatcgtattcaaataatttcactcagacagaatagttgaggtatattttagaagttaatttgataagttaaactcctgtttttaaaagagagacaattttgcagaggaaaacattgtatgcccgtaacagttcatgaagataaaatcacttaaaataaaaaaattaatatttacttttcctattggtagttatccaagtagaagtccaccaattataattgacctaatatgccttaaaaatccggttcgattgactctgttaacatatttcttaagtgaaaaccggaatttttacagaagatgtgtgtggttgagcatatggcgcgtgtgaaagtggcatgggatgtaaattccgtgttgacgaggtttatgtcgggatattgggttgtcttcacgtgcatctccaccgtccgataaagtttgattctcactgtctttcttttcatttcattgatttattatatatttactagccttatttgtttacgtgaaggactccgtaaattgaggtaatttcattttggcccctcatctcatcatcttgtcccaaagaaaccccacctcccacaatttttcaataccagaaactttagacaataagattaatttttacattaaaaaaaataaaaagaagaagaatatgcagagaaataggcatactaattatacacatggatgatgggtcatgtgtagaattaataaaatacaggttagttgcagatatggatatcaggatcacatcttaattaaaaatatattagcattataatattcgagtgggaataataattcattttaaatcttaaccaaaaataaaatactgagagacacgtgtgaaacaagattagctgcggcggccgctttttcttggtggaacccacacgcttcatactaaggtcatccagaatctcaatcccaaccaaccagattttttccctcctttttcttctcacccgattcgaagtcggctacataatgtatctatattgcttatttatctcatttcttttggtcttttacatagagaaccctatcatttattaatctcaacaaaagtatcccaatcatccatttttatggcacactgcattaaaagctcacaggaaattaactacagatccattacgcaccgcttcaatattagtttcaaaagtaacatcattcaccggcatttcattaattggagaagatatttttctccttgagtaaatttattactcgagtacaacacgcataaacaaattcaataagatggtttttgtattagatcagttttcaatcgaattttcttttaactataaataatgattagtaacatttatcaatcctaagtttctaagactacgagagcttcataaaattttgcactaacaaaaattgaattcctgaaaaaggtaaggggttcgcatgaagaagaatgagaataatagaaggagtatttttggtaataaagtttgaaccaatgtgaagaagccacgcagatagcgtcacctggacacatgttaccaaaaatggggacaggtggcgtcgtgaaatgtcgtaacgtgacagacagtcactatagagaaatggttgcgtcggctgtgtgacgctgatatcattcccacgtgtgtgcgcgcgtgaaacgggtccctattgggtccaagtgctttgtggcgcggcgcgtgagccacgtgtttagagttctgcttactatagaaccctgtaaccaaaacaaggaccacttatttccattctacgtatttattagatcacatacacattcgtgtctcttttttttcgtttatggacaaaaaaaactctccaaataatcgtctgaatattttgaaagtcactatgtagttatattttgattaaacgcatttctcaccctgatttgttattcactcgttaaagaaaagttaatgtatttgataaacctagttgtattatttaatgggaaagggcattatggacggtagccattaccgttaaagcgccgttagctgcggcatatgagagttgggtgatgtgtcaggtcagttgaactgtcgtctttttccatgaaacttcgaggagacctgattgggtttcacgtgtctttttgacgccgtcaactccttttgtcctttttttggtataactaaaaatcatgtaattagccttttgaacttgttatcgccgtccttcacgctccttgcattccacactcgattttgtttctttatacgagtaaaaggtaacagcctcatttactctttgattgccgacataaaaaaagtttgtttgtaaattcaaagaaaaaaaattccgattgtgtcttgactcttgaggcattttagtaataatcgattgattatacaaatcacgttagctttttgatacccaatcacaaaatagtaaaaactaggggaatcaaaagtagtaacattattatcgcgtatctttcaatttcataattgttttaacggttttattattctgtcattttagtgttatttttcttccgctatcaattcttcgaactgaaatttatatcaattgttaggtaattttgtctaaattaatgggcttacatgaaggcctgatcaaaattacactaaagagacccagagtatatgttggcctctgggcaattagcctatattgaacaaacttatctagatatggtttttgtttagaaaggatgataactaaaccactaaacaagagaactagtcataaaaattaaaaagtcaaatatctatattattgtttatcaaatataaggtcttggagattttacatttgtaaattgtaacaatacaaaaaaattgaaaaaagccacacccttgattatacacaactatgaatagaaattcctcttaaaaacttggggaaaggaatgcgaaaaaaataattaaaaaggaatttataaatacattttgaaagcagactatgaacataaattaccaaaaatcaatgcatcaaagaaaataaagaagcacaaaccaatgattccatctctgtaggttgtctcagggtgggggattaaagatcacgtgatgattggcctagccatctgcagagagacataaataaacccattttgaaattttaaaatcaaatcttcattaagaagacactgaagctctcaaaaattcagatttcaaactcaggaaaaattgtttcatgtatcaatattttcatcattcgaacaaaccttgagagtaagaatctgccgagtgggctaacatttgtgttggaactaaactccttgttagcttgtttcattttgttctctgcattgtcgggtgtggtcttggcaaaaacacagaccgccatatcgtgcaattctttcaccgaagcttcttttgaactgtcatcgaatttatgttttgtgtcagaataagtttgtaatcaacaataagatgataaaacatgtgttctttaaagctccatgtaccttcccaaaagttcaatcagcttggcaacaaaagcttcacaagaaccaggcttttcacgttccatcatcacaagggatctcgacactgtacgcacagtagattctttagaatcgtcaccaagagcctacacatgattaagacattcaaatcattccaactcatttttttcatatatgcaagtaaaaaagatgagaatgtagttatatagctggattacttcttttagggacggtatgagcaacactgacaatgatgcaggcaatgattcccatatggagtcatcttcttcatcactcacttgttctgaccttggaactactttttgtttactagacttatcgccggaatttctgcataaattgtagcttcgtgttagaaacaaccatgctacattctctgactatgagaagctagaatctagattcaccttgaatagtcagaatcatctgccatttgctcccttcttctgttaaccttcccatcattattgttatttcccattccaagtctttctctagccttaccccttctgaaacctgcgtcgagtgctgcctttgcctgaaagatgaattaaattcaagtgtaagaatccgatgataaatccagatgaacagaagatatctaaagcaatataaagatatattgaagaatgaaggcaattcaacgagataacccttaaagataataaaatgattaaaggggatatataaacctccgcgagatttgcgttgctatcttctgatgcactcgaagttctctcttgaatccctagtctagatttcggggttcgaggtgatccagagtcatcgtactgtccacggacaacaacagttccacttgctgaagcatcatcaaaagctgcatacctgccgctagactacaaagtagaaatggagtcatttataatacaccaggcctaattaatttctgtataagatgttaagaaggtgccagaaatttcataccccagagcttggttcacggaatactgaagatgattgagaacttcttggggttcttatgacaacagttcccgatccactgagcgatgaatcgtcctggattcggaaggacaaggtaaacatatttttatcttgttctcattcttaagaatacacagatataaggagttacaatatagtaatcctacacgtgaaacttaaccaagttccctaactgtaaatgattacccaagtaacatgaaacatacatatcgtgacatgctttagaagattatttcagggtaatagtaacagcaagaaattttgtgtcaaataagacagactgcatctcgcacacaagaggcaaaggatcttacctcttcgtggaagccatcttcatggtcattctgaaaagggtgtcttctgacaaaacctccttcagaagcttcagaaattgtactcccagtcgcagatgaccattgattaccactaggtcttgttgttctttgcgaaatccgattaggagaaacttcttggcgcctctcccttgcttgaggaggttttaaagcacgaactgttccaatactctgtgaccccccaacggtaaagtcccatccagcatttttgacggtattcccctgaaaactgtagctacgagttaataaagattttatcaaacaagcaacagaagaaaaccaaagcgcagaacattcatccaacctatatccaggcgcgccttggcttctttcatctctagctatcctaacagtaccagatgattcaactggagctttggccccattcctaggagtctcttcatcttcttttacttggtactttggccgctctctttaaagaggaaaaaaggacagaataacaatcgtgcttattctggattttcttttggcatataaaagatcaaaacaaacatacgggaaaccatctaaatgttacttttgacatacaactgaattaggaaagtcataattgaaatcacatgccaaagctgttgaagagaaaaagtatcaaaccttatcctctcaagaagtttcggacttttcctagcattcttaataaatctgtgtttaataagttctttggcacttggtctctgaaagtataagacttgaataagagatcttgaaatgccactgctgccaataaagaaagcaaagattacaaggattgcattgcaagtacctcggcaggggccttcttcaggcataatgaaacaaactcctttacttgacgggaaaaatgctcatctaactgcccagaaaaggtaaaattctgctgaggcaaagcacagtgaccagtataacttttatcatgtttaaaatgaaaatatgtgaaacctgtggtggagtttctcgaggaatgataaaaagcactctcatgggatgaaggtcagctaggggaggttctccttttgccatctcaataactgttattccgagcgaccaaatatctgcctaaatgacaacaatcccagcaacagaaaaagaaggcaaaaaatattagatatgctaaggaaacaagtatagcctctacaaacacacatgtcaagctaggagaagtgaagctcagtatataggcgagataccttctcattatacccttctgagttctgaataacttctggtgccatccaaaatggggttcctacaaaagtctgtcattctttaacatatcagcgcacgcaacccagatgaatgagtgaaaattgcaaaccatcagcagagaagtaaagatgagatgttgttcaaattgataagattatcttttcaacatagcatataaattatcccatagctgaaacatagacatgattctactatataaggctgtagataagaaactggaactgaagctgcagataggttgaataataattggaaaaaaaaaataagtactagtgcgttggactattcaggagtatcctagtccctagaaaatttaaccaattaaaaaatcaatagacctcacaatgcaagaagcaaaatctaaacaaagaggccagaaatttcattaccagccctaagcatatattacggggatgtaaaagatatattcacagaagaaaatgaaccaataacaagaattagaatcaacagtgatcattggcataatagagtaagcaccttccttcttgatattgtccgcgttagctgagcagacacaccaaagtccgccacctgatacagagtgaaaatgatgttgaggatgaagcttgtccaactaatactcgatatagaaaatattgatgatttaactgtcacaataaaagttaaagttaaaaaaataaaccttaacatcgccattctcgctcaacaaaatattcgcagctgcaaaagaggaagaaagtgattttctgtaccaagcagttaaaacacatttcaacaaataaaaaacaatacttctatcaatgcacacaaacctttaatgtctctgtggatctttccctcattatgcagatattcaacagcatgaagcaaatcgcgtgtgatacaagcgattgatgtttcatccaacggattattagattgaagctgcaaaagatatatcagtttaaggattataagttgcatcaaagagaatataagtgcaggacaagatctccaccatgcgtgcatgatcacacacaaagttatacttccaaattccaagagttctgagctacaaagtagtgagttaacatacaagatcagcaacagagccaccggccatatattccatgatgatccacaacttggtctgatgaaggtaagaaccatagtattcggtgatatatgggcaacgacattgtgacaatactgaaatttcctggggtcaacaacaaaaactgagcatgacaatcgccacacaaaaatataaagcacagaaataaacgtcaataagaaataccttctgaatatcttcgatctcatcttctctgccagatatcaagtaaaaaggttagttagaaaattactgagcctgatggtattctcaaccaaaaatcctattcgtatagtggaaagccaaggaaaggttactgtcccttagcctttgagaaccgtgaacaagtaacattcatagaatcataattgtagttactcaacttataagacgataaacgttatacaactcaaaatcttaagaggagaattgcatatatgatgagaaaatactaaaataaaaaatatactcacgattcttccaggtcgattactttaatggcaacttctttattgaggtccttatcaaacctgataagcagcagcagtagttgttcagaatacaggtaagatagacctcttatacaaatgttcagaatagcataattctaatcagatatattatatacgagtataatggacgaacagaaaataaaaaaaagtcaagagtgtgataaatacttacgctttatagacatcaccaaaagagcctcttccaatcaactcaatctggctaaatctggctccagctgcctcttgtaaacccgcaacatcgtccatctccacatacaaggaaaaaccaccttctctcccgctccaaccactatattacgaagataacaacagagtcagaacaaactataatactttttaccactccctccccttttcattacatctaaactctcccctcataaataagtacccagaagaaagcaccaaacttaaactaaatcccttatactcaaagcaaacaaaatcagcaaaaaagttaggtggattggagcaagtgacagctgaccaataaaaatttgcaagtagccgagaatattcgtcactctaggacactgaagagaaacatcttcactgatgtttttctcccgttcgatcaaaatcagacttaaacgaaaataatcataatcaaattctctaaagttcaagggatcgatccaaattacctggtaattcgacagagaagacgaaatgggatactacagatctctctgttgctctttcctttcgtttgctatgtcattttgccagaaagcactctctcgagcaccaaagagatcgacagaaactgtttgggagatgaagtcgaatttatttttcatgttgtttttccttccaagtttcattatggaaaccatttgttacgaagaacaacccaacccaactgttaaaagcactaaaagcccaataagctttgaagctcatttaacggcccatatactaggaagtagaactagaaaccaaccattgtttcggcctttgcagcaattaacatgatctcatattcgactttctttacccacaaattgtttttctttttcctaataaacggtgggtcccgcaaaagaaaaattgtaagtaaagaacagagccggtcaatgcggagctaagactcgtcagggtttcagactgatgcaatccagaccaactctctgttactcctgtcctatttttttaagtttacgtcactcacacttctcactcgccaccctttggtgtattcatcagacgattttgtttcttcttcctggtttgtctctgtgtttctatgcgtagtttatacgcgccacgaggtcaaaaccagacgctgggtcatggttgatgacaaagccactcgagtcttacacacggcacgtgcacacgtgactcctaaatctcttcttcctatatattctctttgtcgtgcccccttaatttgcgtgcgtgtcacacccgtagtaatatgaatcttggtcctaaaccgaatcccaagtttgacgacaactaaataaaagcctttttcttcttaagaaaaaacactttcacatttcatggttttaattgtatcactagagttatatataatactaaaactaaaagactgtgttttttagtggataaaaatgtcgactgactaattatgtcattgtaattgtatctttaatcataacaacaacagtttatccactcgaaaccatatgattatttctctttcagaaaagcaatatgaagtatagaaaatcaatggttgataattggattccattcaaacaaatataaagcgaactaaaatgattttttcaggaagattttcaagtatctttgactttcttggcctaagagataaaaaacttttacatgcaaaaaactttaaccttgtgttcaattggttctctgataattaattatatattacttattgttaactataccaaaccccaagaaattcgtatccttgccacaagattgtaagattttatcaaaaaagtaataagaactaaaatagcatattattgtgtagacaaacagtaaatgttggtttggtaatcatataattagtctaaattagaaaaaaaaattataaacattgaaaataaaagaaatttagaacataaaagagtccatgagaagcttgagcaaggaaggcagcaaagaaaacctagaaggccaaaactagaggagaaacccatataacacacaccgacatattcatatagatggtgggctcggaacatcatcaccatcatcaacaacatcatcatcaaaaccatcagcagcagcaacaaaggagcaaagaagctttagggatggtggctctccacgacgccctgagaactgtttgtctcaacaccgactggacttactctgtcttctggtccatccgtccccgtccgtacgtatctctctcctcagctcctctcttttttttttattgacatgatctatctatctctcctcaaaacgatgtcttttttgttcttcaggagagttcgaggcggtggcaacggctgcaaagttggcgacgacaatggaagcttgtaagttacacttcttacaaaaaaaaattaggttacccgtatagtcaagagacttagcgtactatagttagtctttatgaaacatgattaaaaagtcaacattttcccttatggtttatcgtattatagtcaccggaaactttccccggaaagaaactaactagacagactagtattagtactctaggcttgaattaacaaaacaaaacaaaaatccaaaaaatgttgcatggagatcctagacatgatcatgatcacgtagctctatgcatctatatatatgcgatgagactgtatctaccattcgtttaagttgtgaatcatgatttgctggaaaaaaacacatcaagtcatctcttttagatgatcttgtctaataaccattgcttcctttaattaataaataaattaatgaaaatgaaaatgaatgatttatgatgagtagatttacaaatatgcgctacgtattgatatattgatgtttggggctacaggatgttgatgtgggaagatggatactgcagaggaagaggaggaacagaaggttgctatggagacatggaaggagaagatcctgttcgtaaatctttcagcaagatgtctattcagttatataattatggcgaagggtgggtacttggtaggtccttaattactttttattatcatatatgtctgcatgaatatatgcagctcctgaccttattcaatattcactgcaaattagcccaaaatagaaactatttatcttcctctttttaagtttgcaaaatatatttctggccaacaggttaatggggaaggttgcttctgacaaatgccataaatgggttttcaaggaacaaactgaatctgaatctaatgcctctagttactggcaaagctcattcgatgctgtaagtttgtttataatataatgaagcatttacgtataataagattttaatctgcaaatttgtaagccggctgagatctatctctaaaaaaaaatgcagattccttcagagtggaatgatcagttcgaatctgggattcgggtaaaataaagaacactaatcatatatgagaatgttcttgactttcttgtttctcaagtcacctttgtaatcttttcttattgtacctacagaccatagctgttattcaagccggacatggccttttacaacttggttcttgcaagattgtaagtcttttttattttggttcatggttaaaagattgtaagtcttctcttacttgggatctttgcggttatgttctctaaacttactcagatacctgaagatctgcactttgttcttcggatgaggcacacgtttgaatcacttggctaccaatccggattttacctctctcagctcttctcctcaaaccgaaccacttcgtcttcaaacacaccgctcatggcctcgaaccaccctctactacctacacagactcagccattgcaacccactcttccccactacaactggagtggtacgagccaacgaccaatgatgcctcaaacctctttgcctacctaccagcctcacatgactatgcctttcccagtaatgccacactcaaacaaagaacaagaccctgacgtgaaatggcccacgggcctatctttcttcaatgcgttgactaacaatgtcaacgctaagcttctgtttgattcagaggggttaggtgacaaaacagaccaccagaaccagagccaggaacagagcaactctgagagtcaagcgaatccgagcgagttcttgagccttgatagtcaccaccgaaacatgagtttcttagagtgatatgacttcatgtattcccctcgtaagaacttagtttggtcttttttctatgcctcttgtttgttgtttggatcattttatcatcacttatgttaaacctagttaatctactctctttttccattctacttttttttcttaacaatttactttttccgtctaaaactttttttgacattttttttttcaaacggcataagtatgtgtttttataaagttataccaaatttatttagtaaagttttatatgactttaaatcaataaagattttttctttgttgaagaataacttaaaatgacattctccctagtataacaattggaattttaaatctaatacacataaatatgcttgtttttataattcaagagattgcaatagcattttacaataaagaatcatacttaagttgtaaaattacaaaactttactgtagattttgtttcttcatagtgtgatgctgtagtaaagatatttctatttacaagtaatcaaagaaaaatatatagatacacaattgtgaaaagtgaaaacccacaagcccaatagagtttttgcttactgttgaacaatcaatagttcaatactttcgttatgtaacttatgttcataattataaccacgtcacagtgtcacaagtcttcactattgaacaatcaatactttcttaatcataaccacgtcacaaaatcacaagtctcactcaagctccctccaatgcatgacactctctacaaacaaaaatagccgccatcaaaagttttctccacaacttcatcaccctactcacccttctctcttccgtcttcttcctcaccctcaccgccttcttcttccggccaccgacccttatccctccactcattctcaccggtaccggagttatatattgccaccgctgcgatgaatacgacctgtacagagacgttgtcgccatctccatcgccttccttctcttgtgttgtggcgacgagtaggagctactgctcatcgtatttacggttttgtcacatctgctaattggaggcttcaacttcaaatccagtggctcttgattaatggggctgttgttcttgttactggttgaatagctcgttctcggagattgagaagttgagctgttgttactaccaaaactactgctgctgttcgtactattgcaccgggaggtgtattcgctggtcgtactcgagattgaccgctttgtataaatactgctcgccgccgggaatgcgtgtggcaagagacggccgttgaaaaagagatgatcggcgggagaattctctgagaaagagtcttgcgacggagaagttggagtcaacgatccgaactcaaactccggtggtggctcgtcggagtttgttgttactcgatgattctccatttcttttggtgtgtttgatttatgcggtcggattcttgtttaaatagaggggaagacacgtggcgaattgggaacggaagtggtgtggaagtcaagccaggtcaggttttgactacacgtggcaaagtgaattgatggtgttcgtaataggcctggacgcgaagccaatattcaaaaaatttgtgatatttgttattcgattcgttctaaacgaatatttgattttgtgatttgctttgcttcgaaaatttctggatatccgaaatttcgaatatccgaatttttttgtgatatttgcggatatccgctttaatacatttaaatattaaaaaaatatgtatactatataatcatatcagatattcaaagtttttatttaacatgctttcaaaataagttctaaataacaaacataaccgttgttggtatcaccggtcaacaaaatgttatcaaactaattccaaaaactaaaacccgataattttttatgccattgatcaaaacataacatgaaaaaaaaatgatcaaacaaacatcttaacataaaaacataaaatggctacaatacataaactatttatgatatctatatatagatataactatattttttaatatttataaaaaaatacggatcgaagcggatattcgactttttaaaaaataatatttattatttgattcggtttttacgaatactacattttcctatttgctttactcaaaaatcttacagatattcggatttttcgaatcaaatcaaatcaaataccgaatcgaagcggatcgaacgaatattttgcccagccttagttcgtaatcatcttgtctaattaatgtcgactgtcgaccggatcacggattaataaaagattgatcttataatataaagtttaaatacgataattaatcttcttaattatcatccatatttattaaaatctttagtttatcttagcacttacaactattttaaatcgttaaatctctctgctatatgtagctcacatgttttacgcaggggacacaagtttcccaaagatacgctttgggttaaagcaaaagcaacactaactttatttatacaaacttatcaaaatgagcttattattagacaattaacaaaagtgggaaagattctctgttggtaatctaaccaaaaacattttaaaatctaatagttttttaaataacaagaaattaaaaacaaaaatttaaagacaaagaactcgcactaaggcttttgtctcccattggccatttttttagtgtctctctttactctttaggacccataccataaggaaaacctatcatcattaaattagtgctaatcatattttagatcttcagtaaactagtggctattttgtttataattaacattagagatatgaatcttagaagtaagcccataatagtttgggctttgaaacggcccatctaacaacatttttggccgtttgtaataaaaaaaaggaaggaaaagtcataggtggcgcgaagccgcaaagaaagcggcggtggaagctgagacatgcaacaatggcgttcgtgtcattctcttcttctccttctctctctcttacactcgcgattcaacattaatttcgttcttcttcatacacatatatagatagtgtcttcattttccaaccatgaccggtagagaaatcctccacaagatgaaggaatccgtcaaggtaatcgattctttcttctctccatgtcgcttgaacaatcgcttccaattcgatagtttcgagaatatggccagtaaattcgagtagatcgattcgaaattggatttgatagtagagcgtagcgaaaaatctatgtgaagctgtaacgtcagatctagatatacttgttggaatttgtgataccacaaatttaatttaggttattgatccccgatacgatactagatattaggtttcaacattggctgttgattctgtctctgttgtaatttgaaatttcggctctgtgagcaggagaaagttgggcttggtgcatctgcttcatctgcagattcagggaaaggtaagagcaagatgttgaagcagatcacacatggttttcatttggtgaaagggaaagcttttcacgagatggaagattatgtggttgccaaattcaaggaagttgatgataatgagcttggtctgtttgctatcttcgatggccatcttagccacgagattccggactacttgtgctcccatttgtttgagaacatcttgaaagaggtaattgagttttacccggaagtgtttttttttttaacttgagaatatgaacttgatgttgtccttgtttttaattgtgaagccgaatttctggcaagaacctgagaaagcgataaagaaagcttactatataacggatacaacgattctagacaaggcagatgatttgggaaaaggaggttctactgctgtgactgcgatattgatcaattgccagaagctggtggttgctaatgttggtgactctcgagctgttatttgccaaaatggtgttgcgaagccactctcagttgatcatgagccgaacatggagaaggatgaaatcgagaacagaggaggattcgtttctaactttcctggtatctaatcaattacatttctacatatataatctgatcatatatgtcgcatatgtttgattttgatttgttttgaaccacttcaggggatgttcctcgagttgatggtcaactggctgtggcaagggcatttggtgataagagtttaaagatgcatttgagttcagaaccatatgttacggtggagataattgatgatgatgcagaatttcttatcctagcaagtgatggactatggaaggttttgatctatcaatatctattttcaacaacttacttgtatggtcgctgattatttaaaatctcataggtcatgtcaaaccaagaagccgttgactcaatcaagggaataaaagatgcgaaggctgcagcaaagcaccttgcagaggaggctgttgcaaggaaaagctcagacgatatctcagtcgtcgtcgtgaaatttcagtgacattagctttcggttagtcttttcttcttcttttgagcgactctaacactttacttgaatctgtattataagccttttcaattaagacgttacgcaaataagaatcaagtcgagactcgagagtaaaaaacacattacaatcatatataatcaaacctacaaaatcaataaacattattagacgcaagactatgcgaatacatttccggatagatattcattacaggacagcatagaggggactagaggtttatagttatatatccgtgtaggatttaataccatgaccaacttttcttgacattgttagatgccattatttgtctaataagagtgtagatagagcatatgtagatgacagaagagagagagcgggagggtttatctgatctgtggtcgcttgaatgatgagttggtcataggaagtttcctgtctaccctgtttctttcttgagtctggatcagttgaccgctaaaccctctccggcctgacccttctccaaaactgtcaccagagatcttcctcctcctctcattgtgtccagctaagcgcctcctgcagcttcttttagcttcatcaaactctggtagctcatgaaacctgctcaaaaccatcaaaacaatcaaattgaaaacaaacccctacttaatactttgtataaagtaatactgaagggaagaatcatacctgctgcattgttgacaaaagcgttgcctgacccctgcaacagtcgcagcagatgcctttgcatgtacttcacatactctgtgtctgcggtaatactgcttggcctcagtcaaattaacagtgcacctatcgacctggcacagtcgcgatggaacacggtcagtgctaggacctctaactctttccatcaccttcttccttttgtcttcgtctcctccatcctcctcttctccatccatgccattctccatttcttcttcaacaaggttggagactgtagccttgtctttcaagtaaccccggcgttgtgttctctgaccctccattttctggtaaagctttaagttgtattcgtgggaagatgatggtggatttctggttaggaagcaatgttgaaggatgggctttgggggtatggaatgaatgttttttgaagtgtttaaaaagaggaagaaaagtcgggagatggaccactgtgtccttgtatgcttctctggtggaataagtacatgattacgtgatgtgcttgcttccccaaaaaagaagaaattaaaaatggagagtataggtcaatagattggaattacacaagtgaaaaatttcttgtaactatttcataggcctttcgtggttttggtttcttctgatgcaattaatagttgatacaagattggagctgtatattgtacttccgggtttactgttttgaattttaatttgaatttcttattcaaattggggacccttttgtttttaacattgatgtccttctaggtaattaaggtgaaccttattgatcagtgcaactgtagacatatagtacagggaagaagagctggaatatcataatttacccatggtcttctcatctaactttataatatatctctagaaacagacaaaggtcctaataaatggtgacatcctttgtcgatgtagactattggattcctcttcctgcaaccctagtggtcatctattgttggacccatctagagtataggcatttaaggttagcttaggatgagaggtaaaatggttatgttctgtttaaacacatcgttgtctttattattacatactgatttgtatctggttttaaaattgccttgtctgtggtatatgatgttggcagcatgaatatcgtctgttctggaccatagcatatcaacgcattttagttgatgcctttgcactttttttctttctttcgggtgcaaggcatttatcactatttcctataaagatgctattttgtgggagtgcaaaatcagagattaaaagtaaacaatgagatctctttagctataaagggtcaatgcaaacgacacgtggaactatattcttatgatagagagctttgatgtttaaggtttaaagtttagctgctcaaaagagtaataataacgataaaggtttaaaaaaaaaaaaaacttttaaccttgttttgtttttgctttgataggagaagagacctctgcagactgcagatccctttcatcgcaagtcttactggtcacttaaacaagtaaagagtctttgagattggaccagctaaagaaagaatcacaagtatgggcgtttcctctgtaagatgcaattatcacctctatgttactcttttctttttttccttttcaactctgtgattatctctaagtctgtttctttctgggaataaaattttaacagtgaaaaactttctttgcttctctttttttttgttgtaaatgttttttgttatacaatagggcagtgtaagaaagatgaaatagttagaattagtgggtagtgaaagagacaggacataaaaggtttcacatgccaaactgtactcatgtctcgagtctatgacctaagcttttggggttgttatttacaataacagaataaataagcgttgtcccttttttctcacatctccccttcgattttccttcattttcaattgttggtggtccttataattaattttttcttagcaccctaaaattcaaagaatacgttatagttttaaggatatagttttgcttttgttttgtaattttttgtgtgggcaagaagtggtccttttgagatcatgtaaagaacaaagtgaacacaccatttaacaaaaaacagagtgaacttaacgtaggatatgataagctaatgctcgtctccgtctgctcgggccactttcaagttttggccctacaataaaaaaaacagattcgaacccgaacttacaaagaggaaaaaaagagatgctatcgtataaaccctgaagtggagaatatatttatgcagtcatatttccttcatggcgaaattttctagcttcgcatttgtcacttaacgtaaggaaacaaaacgcacgtagctatccttaagccactactacaccaaatatcagagatgcctcctctcgttttcggttccacttgtcccctacagaaccaaagagcatttgttatgtttatttgtcatagatgccaaaaactggatatgacagaatcatggattaaataactaaaatatatttacattaaaaatttgttagaactgtagatttgttcacgataggcgtttataaacaaaagcaaatgggactagtgatagttcatatttttatgtattcacaattgtttgattttttttctgtgtatataaatactttgattgtttttagaggaagaagttgaattactagttttagtaaataatagtacacgattggtgtctgatctgttagagcgtaagcctagagaatttgtccctccatttacgggaattttcaatgacaccagctttaaatatttgccaacgtgagattccttgcagactatgcgatccagctgtgttcagtcccaaccccacaccaaaactccgtagatatatgtcaatttacacacccacttatcgtatcagttcttgcatgcaatcacatcatatttgtattatcctttgatgaaaaatatttgggagattttgacgtaaaataattatgagataatgtatgtgcatataaattttagaaaaaaacatctagaaatttgttcggagaatcggagtagttgtttattttgctttagttcaactagtaataagagtaaattgtaatgcgatctaagccacggtccattcataaacctttaatttgaaccacgaggcacaagcaacctctcactgaaacaacaatgaaagaaaggatagacaccctaacacattagcttagggtgacttaacttctccgccggtttgctgatgtagatcctccacacctctatactccgtcgtatccacaggctgttgcacatccttcaattccactgcgaccttatcctcttgaattctgccgtcatcatcatcgcccgtaaccgcatcgctaatgttttgacccgtttccttagccgctttccacgcaccatccatcgcatccttcatgttatcacccgtgctgacggctgcgtcggtcgctttcttcaccccttcctttgccttgtctgccacgtaactcgtcgtggacttatcgtcatgagtagagccctacaaataaatccgtaatttattagcgataataccaaataaatatatacttttgacgagaaaagtggacacacctccgtttgcttaaatccggttgagaagtggttgattccgattgtagcttgtcggagagcataaccggagaaatctcccccaggagttcttgaaacattcaccgccgtgagtctcttcaccaaaaacctagtcgccattgttaattttcgttgtcttgattagattttaatctgttgtttcccattatccctcactcgcttaagaagtagttagcgaagatccaaaggttacggaagtcagtggaatggtgggagtatcagaccagcgacacgtggacaaacgtacgacacgtttctcagttaatgtctcacttctcgacacgtgctcgagacggttcccatatccttattattgggccgtttctatattttggcccgttgtagccatttaggcccattatagttagttagggcccagtttctgaagcatagctggaaaatgttctctttaatctggaaactacagaataacagaacagagagattacgatcgccggcgattcaaagaagcagatagaaaaatggcggagatgaagagtgtcggagtagttggtgctggacaaatgggttcaggaatcgcgcaactcgccgccacgagtggcctcgacgtttggctcatggacgctgatcgagatgccctctctcgagccaccgcagctatctcctcctccgtcaaacgattcgtctccaaaggtctaatctccaaggcaagatcctccttgtaatttagattttcaatttattaagtatttctttctccgtcgaatcaactaattgagagatcaccgttttagcaaacatattcaaatcatagcctgtactgtttttgatttgtatgctcgctcacgcatattgattcttaggctacttcacgatcctatgttagttttatgatagtgttaagactttgatatattttgcaggatttaggaaaatgtaaaatgggagaaatttgtggtgatttattaagacgagagtgattttgtatgttgcaggaagttggtgatgatgctatgcatcgtctacgattaacatcgaatcttgaagatttgtgttctgctgatatcatcgttgaagccattgtggaatcagaagacattaagaagaagctgtttaaggatctagatggtatagctaagagttctgcgattttagcttctaacacaagttctatatccattactcgtcttgcatctgctacgagaagacccagccaggtttaagactcttttacttcctctgcttgagttgattatttatctgttcatgagttttcaggtgcgatcatttcgaaccttatattaagtgtttgtttatcgtctataggtcattggaatgcactttatgaaccctcctccaataatgaaactggttgaaatcattcgcggtgcagatacctcagaagagacgtttcttgctacaaaagttctggctgaaaggtttgatattttcttgaaataaagtttacattgtatgagatattttcaacttagtatcaaatgttggaatgaaatcaaatgcattatctatcaaaactgttacctttgggtcactcgaacgcagattacaaatctcttttaaggtcgagaacaatttgattataggacatccttgaaatagccttcttgtgtttgattgcgcggtttaactaactaaatcgctgattcagttactctctttagatttaaatttaactgtatatccctgaaacctgcaggtttggcaagacaacagtctgctcacaagactatgcgggattcgtagtgaaccgaatcctcatgcctatgatcaatgaagcgttccacacactttacacaggggtagctacaaaggaagacattgacagcggaatgaaacacggcacaaaccacccgatgggtcctttggagttggcggacttaatcggtctagacgtgtgcttgtccgtaatgaaagtgttgcacgagggacttggggactcaaagtacgcaccttgccctcttcttgttcaatacgttgatgctgggagattaggaagaaaacgaggagtaggagtttatgattaccgtgaagctacacagaagctgtctccgcggctctgagaaagcaaataccaaagtaaaaaaacaaaaagaagaaacgtttagcactcaagacaagaacagtaaatgctgtgtggatcgtttctggattatttctttgttcctttgtttcttggtagatatgaagttactggtcatcattagcgaccttgtgttgtaatcttgatattgtactaaataaagtttagcttcaacaaatcaataaggtgttgttaccatgttgttatctaatcaattttctttataatttttttgtttcaaatttaattatcacttgcagtaaagcgacaagaagaaatgttatccaagacaaaccattattacttacttgtttggtttgattggatcaaatatcaaaattcatatatatctttcttctatctattaagtactaaccaaaagtttgagggaaattcaaaagaaaaacgtcagagaattttgtcaagttatcaacttatcatcgatgacgaacaaatttaagagataatgattaaaatcgtgaaatgataacttttgtaagttgatgatgcaaagaataactagtcaaatagcaaaagacaaatctctctgttgacgtaaacaaaatcagcaaaagacaaatcccttacacatttattattactattaatccaaacttcaacggtaactccttttaaaaatttaaccatgcattgttctttaataaattcaagggtttatttttcaaattgtagcgtaattttttcatctaatcacaagctactagttgtaaattttatctttcacctctccttttctttatttatttatttaaaaacttaattagcatattttactattttaaagtaaatagtataataagccgaaacagggataacgatatattaaaagcagagcaaagttaaaaaagaaatgaaagttccagtcgcagtaaaaatttataaacaggtctctcagtctacatctccggcgataatctcggagaagtcaccgggaacagaggcagaagctgcggctcagaatctctcggagttgaaatcggagaccggtgcaggtaataacccttgtctgcgatacctctctcttcctccgataatggcgacatcttgtcgaaaggatcgccttcgtttccgttggttccctgctttaacggcgtcacgggactgttaagtgcaagcttggggaaatcaagacagctaggcgacaaaatctcctgatttctcggcgagaatcttggacttccggcgccaccaccaccgatcatgagtgtattaatcatgagactgttcttgaggttgttgttaaatccgccgtgtgatcttctctcgtaaagtttgttaccagaatgtttcttcggttgtgcggttttgatcggtggaatcacaaaattacccttgccggaaggagtcgtcggaggacgcggagagtctggagatcttggggaggagcttccggtgagcatctgaacgacttgtttgaaagaagaagagtcagcttgaacaaaagttgttggataatgatcagatctagttatgatgtgatgatgtaaagatccattgataatggaagatgaaacagatgatgaagaagatgatggtgggtttgttgaaatctccattgatgttttatccttttggaagatttcttgattttaatggtttcctctaatagtttggaaaattctgtgtgagttcgagtgaaagagaagaagagatgaaatgaaaatgaaggcttcttcataaggttttgggattataaaagaagtttgattggttattttatttaatttggaatctttctttatgagaaaaaaacttactaaaataaaaatatcatacagacaaataaaagctgacatgaggatttgtgcccggggaatcaaaagatgtttttattaggcaatttttaatttcttactttgaatttgtctgccatagtgcataaaggaaattttttgcaaatgaatgaatggaactttgtctttattaggatttaggactctactaatattgaaattctataatttatttacacactattcatagaatgcttgcataacttatcgaacaacaaattatatttgatactttagtttttataattataacataattactttttccttttttaaaaataaataaatcatattgctaaagtaattgctttgtacgactttatgtgcatgcatacacctctacatatataaatatttagatttttcgtatctcggtctcctataactttttttaatatccaggaaatgttctaaataccaatcaaactcgtaaacatggccatattattgtgtgtgacatcgacgtatcaaattttcatttctgatgatgataaaagaaagaaacttcgaattatttgtcttagtggactatatatgtgcgatattacacactttctataaaaaaaaatcatgtagatcataaatcctatatagaaagttactgaaagttaccttttttcgttttattggaaatttatgaaaaaaaaaaaaaaaaaaaaaaaagttactgaaagtacaaacttccattacctataaattacaagaaaaagagaggtattacactataaaataaataaataatgaattagtcgagctttgaatacgtataatgccaactacgtgtatctcaaaactatacatacattacaattatttggattagatttatatcctgtcgttatgactcgttcacataagtagactttggttaaagaaatttgtagacattttcttaattcattttcattagaataagtcttagtcaatatttctttcctagaactaacaaaaatcttttgtacaagttttaatttagactggttattttaagaaacgaagaaaactagaaaaagaaagatgcgataggcgtgcatgtattgagccgcaaaccctaattatgattttttaaattaaaagtcgtctgactattgagacacttgtactcctgttattggtttatttctcatagctcgttgaacgggcaaatactcctattagtctacttctactaactcttcttaacttcggattggccggtctaattatttagacgaattaattatgtcgtgtttggttacacttaattcgtagaagtacagatgttgcgatagaccgatatggttgctcagtccaagtttttgttcctaaaaatacttttttctcatctttaatctacataattaaattgctcttctcacccgaaaaaaaaacgagttaaaatagttacgttggtgataattaaattgctcttctttttttttgtttttgtttctcaaaaactgttcctctttaagctggcttaatttatttgttaatacgattatgtagtatttggaatacattcatttagcgcattgccgatggcaacagagaaatactttttgtttggatcatattgatgatatgattggttaacgtaggaaaaaatatattttatcatagctgtgttgaaagtcaattgcaataataagatgatgagccagagactatttattagtattatctatgaatgcaaaaacaaactgtaattaataaaatataaattagatgattctttaccgcctaacccacatagtttttttttgtttgttaattgcctaatcccatagttggtttcccactttctttctttgttacttttttttggttattaatgtgcttaagaatatattcgtactacctcaaatttatatgattaaactattaaataaccattcacccaccattactgaaaaagaaaataaaattaaaacattttaaggtaagctaacgatgcttatattagtggctaacaacggctttcatgtcataatcattaagtagtaggattctgtaaaattctatatatttcaagttaggtttaattatcttcattcaaaccaaatattcccgttctacctaaattctgcctcaaaagaatgatagaagagtttgcctatcgatataaatgattctgatcttcttttatgatggatgtaagatgtttgatgatgataaatctgtcatctttcagttccaaaaaaaaaagatcccaacacatgtgtcaaccaccaacctttttccgctgtacagcgaacacaaaacaatcgataaaagtgatttctttttccacaaggaaaatattaattattgatgaaacaaagaagccaaatgagacgtgttaaaaccctaattcacagtcgacttttccccacgagctgcctagcttcgttaactaacagttcaaacatatatatattatcaaacgaacagcaaaacaacgatctttcatctactcaaactagacaataaattagatacatacgagcttgtcttatttgagcacacactgtttccaggtcaatttgggccgatatggcccatgaggatatcttcggaacccgctaatggatgtaccatgtacgtaaacccataaccctctcttgcgtcagatgatttctacaacatgtttacctcactgtaacataatatataggatatcttgacattacagagaacatgaagctatagcatgtagactatatagtcttataagatgtcatgtgcgtaatagtcttgaatcaatgaagagagtaaatattgttttttggtaataatgaaaagttgtatacattttaagaaattattattgattaactcaactgaatttccaccggcgcttaggtcaacggtaaacgttggttaatagtcaacgtgaagctccaagtaaagtaatgagtttgtgcggtggcgatgcgattgtcacaaacacttgatgtgagaaataaacgacacttggagagaaaacattagagtatcttagtcgagttttgcaagtaatcgtgacggacatgtgactcttacctagtttcgtggcacatccaccgtccccacacgtgcaaggttttgcataggtttcggtttgagacaactcatgaactgcatgactcttctcaagttagaataacagtaaactgtcatatactgcgtaagtgacataagaatgaaatattattatttattcaattcaagtataataacttgcaacaaaaatgtgatattttaatttggtcttagtaggagggaggagttgatttcgtgaccaaatttccccccaatttatactatctcaagaaaagctgtgaatactattggttaatgaatacatttaatgcgaaagtactgcggtaatttagatcccccatgcttcaatcagaagactaacgacagtttcccgaacttaacaaatcatatgcttgttatttctttgtagatagaggattctctgagaaacattatattaatcttcgaaactcttggttacgcttgattttaaaatgaaaaagttggagggctaagagcatctcaccattggagaatggtgagagccatccatgggctctcaccatttttttaagaataaaattttcaaatttatgagatgagagcttctgttaaatttttataattttgccaagttcaatggtaagctctctttgtgggattctcagaaaaaaataatatattttttttattatttatttcataaaattgaaaaagattttaatttataaaatattaaacatacaatatattcatacatttaaaataaatttgcaaaaaaaataaaaatgattagttatcctgttgattgttgcgaaattttctccatatatgctcaaccaaatcactttttcattgttgatgcatattttgatcacgaagttgatttcgcatgcccatcatattctcgatatttagaggcatacctgtagaatacgataaatcgacttgtggagtttggtttccttcaacttgtaggaattctgaaacatcaaactgaatgttgtacccatctcgttcgtcttcgactatcatattgtgcagtatgatacatgctttcataatatttccaattttttccttatcccaaacaagagctggatttttaataatgtgaaagcgagcttgcaatactccaaatgcacgttcgacatctttacggtccgcttcttgatgtgttgcaaataaagtggctttccgattttgtggtagtcgaatagattggataaaagtcgcccattttggataaataccatctgtgagatagtaagctaaatgatactctcgtccattgactttgtacttcacatttggggctcgaccttgtaatatatcatcaaaaattggtgatcgatcaagaatatttatatcgtttaaggtacctggaggtccaaaaaatacgtgccaaatccagagatcttgtgatgcgatcgcctctaaaacgatggttggttttccagagccacgtgtatactggcctttccaagcggtagggcaattcttccactcccaatgcatacaatcgagacttcctatcatcccgggaaatccgcgtatctttccgatattgagtagtcttctcaaatttgtggccgtaggtgctcttagatattcatctccgaagaaagaaataattccctttgtaaaattctccaagcaagacattgcagtggtttcacccatacggaggtattcgtcaaccgcatcagacgcatagccataagctagcaaacgaatggctgccgtacatttttgtattggagagtgtccaaaccttcctgtagcatctcttcgatgttgaaagaacatgagttcactggagagtcgatcaacaatacgcaagaacaacggcttcttcattcgaaaacggcggcgaaaagtttgaagtgggaagatcgcattatcactaaaataatcgttccataaaaggacgtgtccttcttcgcgttttctgtcaaaataagctcgtttcctatttttcttggccacctcttcgctattagacaattcgacgaacacattttcgaattgttgatcaagtaattgatcaaagctttcttccatggcatcgttgaagggagtacgagacgaagaggccatattatttggtaggtttggtgattgattattttgtggtagaaacaaagaacaattaagggaaagattgtttttgtagttgaagcaaagaagaataatagaaaagattgatttgtgagatatcgagagacgattccattatttatagtcaaaacatacatagaataaagtttgtgatacacattcattctaaattattcgtggtacacaattttcatacattatttgtggtacatatacaagtttcagtcgtgtggaaataaatatacaagtctccttcttttcttttcgtcttgacactctcctttggcatctagcaaaaaaacacttgcatacattggtctttttcgcatcagacaacacaccacttgcacacattggtctctttggcatcagacaacacaccactactttaacctgtgacacaacaagacaaatgcatatcagacaagacaagtgcatatcatacaagacatgttaaaacatgatacataaaactaaataatatcatacaagacagttacaaagcaatagagtaccgagacttaaactagaacttaatacaatatcatacatgagacattaaacaagaacttacgaagcaatatcatacatgggacataaaaacaaaaagcatctgatgcttagcttaaaacttaggaccaaactagaacttaagacttatgaccaaagatccgtgattagcttattttttaggaacaagtcaatgtccgaaagaggctcagtttttgaaagtagtctttcaagctgttgatgcttgctttgtttttctttgcgatcccaatccttctctttaagttcccacaaattctgaaaatgttccacagactggcctgaatcatctttaaccgtggctggcttctttccttcttttatagtggctgacttccttgctttagctttggctgccttcacaccaggaggacgactcatgactgaatcatcttcaacatggattggttgggaacttgcattaccatccccacacttctttcttttagcatttttatctcctttacgacttgtagcttcacaccatttctggtcataccttaattctctccaagcatgatctaaagtgaaattcttcttggtatcattgaagtagatctcgtaagctagcttcataacatcatcctctgactgaccactagttttatgagttgttgttgtcttataacaacccacaaacttggtgacacttttattgacttttccccacctatgtttacacttagcatgttctctctttggcagaccatcaagggaaggactagcagcaacatatgctgcaatcctcttccaaaaggattgaccttgttggtcattaccaatcacaggatccttgctggtattgagccaagcactaacgagaacaatatcttcttttgctgtccatttctttcgtgatatactttgcttcggtttgacttcatcttcacttccttcaagatcacttccttcttcagacaattgactactaaaagctgggacttcagttgacccacttgcaaactgagacatgtcttcttgttgactttgcaacaggtccataaaacccgatgactaatagaatggattcatatcatccattttttagatatgaaagtgaaagtgattgtgttttgtgttaagctgaaggttaaagaagaagactgaaactgattgtgttttgtgttcggctttttttaagtaagatgactttattgaagtattagcaatgaatgccaaggtaaagacactaattgtcttaacctacaatactccaactagaaaacatttacaaaagcaaaaattgtcctaatcaaacacaacccaagcattaatcacatagcacaaaccggtaattaaatgagacaaccactttgaactgaccttgattttgaggccgtaatcgatgccttctccacttgtgagatttgtcctttcaactacttcatttaacctcaccaaaacagagacaaagaaagaaatactaacaataaattttcaaaatgattcaagtaattactaagatatattgatgcaatgagcaaataaaagaatcgtgtctacagagtactgaaatcaaacaaagaaacaccagagtctgtgtgttggttattgcctaatgcaactagaacttgaaagctttaagcctttaactaatcttttcagctttgatgaagtttatatttcagaataaagatagcaactatttattaaggaaactattaaggaaagatcaaggcattcataattcaaaaatatagtctccacgcatccataattcaagaatcaaagcattttaagaaaagagctacatacatgatcgaaactatttaccatagattaagcattctatgactcaattcgattttatccttacaaagaaatatcaatgaaatccctaatgaaacaatcctaattcaatttgattcaatccaaaactatgaaccctaaaaatcaaacatccaacgactcctcctcacttcaatcatgccaaataacaaacacatatcctccaaataatttaattaaccccttatcaatgcttagaactgaaagccctaatttttaatactatgaaccctaatttcaaaaattcaaagaactctaaaaaagaatatcaattaccccaaataaatcatgataacgcacaaaataagtagatgctcttaccaattacgatccaagctgaatcgattactctccatccattgaatttggatctctaatttgcagtgttctctctcattcccgatcgttacataagatgcatcatcattctcatttccgaccactcaattcttccctcaatcttcgccgtctgcctcaatcgtaggagaaaatcgataccatcatcatcgccatcactggcaaaaaagagagagggagaaagagtcttgttttgttttgacgcgtgatgatgtttttttttttttttttttcctttgttttgtctaaaaatcgaccaatgaatgacgccacgtcatcgcctctcttgcatctcaaaaactctcacaagagagctgtctttcttcatataccatgattttgatttattttttaaattctttttcatgagaaccatagaaaaaaacccaatatatgaaccgttggagatgctctaagggggtaaattttaaaaaattgatataagtagagaaatcatcgtatgcaagatttatattcataagttatttaatagatatgatatatgcatacgtgcaccatgattccatgtgaatgtagtatgtatatgtattttgtaacacacaagcgttagtcgtcggagtaatagatagtatatatatgattcaatctagtcgttaatttccttaaccttaatttacaataataaatatatatatatatatatatatatatatagatatttaattgtttactatttgctcatacagatttgagtgtttttaaagatcagctgaaattcgtctttagctaatatttatggtctggccaattttaactcaaagggtaagaagactaaagtcactgtacataaaatacactttatcagtctatatccaaatgttattaatttttttatttattatatacttaaaattgtttagttattagtaacaaatatgcatgtaatcaaaatttagtataaacaccggttaaaacaataaaatgtataaattccaattcatgaggggacaaaaattagctttatccatactatattcactagacgaaaacacatgacagcaatgagaagatagaaccgcagagcagattttccacatgcattagaacttataaaggtctcaccgtcttaatcacaaacatctcttcattagttgttcttcaatcttggtttagatttggaaaacacatgattataatttttataattagataataaacatactacgttacgtatagtaacatcaatcattttagttatgattgtaagaataatttaatgcattcctaatatgatatttataagatcgactgcattgaaataaactttaacattggagccaaagaaaaactatgtaactctttcttttttgtggccacgagaaaaatctataacccattaacattttctttttaatagaatcccaaaaacttattgacaaccataggtaattttatcatccaaattattgagaattgatcagatagtgatttgaagtactataatttcttcgcagtatattttattaagataattttttttatcttcgcaatatatttcatgcttcacctttgaagccttgccataccttcatgtgggttggattgatagcattcgatgtggcctttgtttccgacagttggttgattgtgccaagctgccaagcgataaatggtggttaaaactaataggtgtgttagccacacttgctggtatgattgttctcatttcgtacatatggtcaacgacagccaaaaaaaatcttaggcgtttctctttctgtcaattggatggttcatctgatgatgacgaaccaacaattgcattggtaacaatcaaaaagtaatagtagctatgggattttgatatgttgcagagaatatatgatgagattgttttgacatgtgtatatgaggggagttctgatatgaggagtagaatatatgataggattttgatcggaggagtagcttattgattgagtacatgattgatgtatacttttgatatgttgagatttttattgatgaacaagttttggctctccttttacttggggtccgtgtgaccacttgtgctttgctttgccacatagtttaactcaatttgtattttgaagagattggacatacgtgagtttatctgtttgttctctttgtagtattgcagaatgcagtaatagcaaattagcaatgaagaaataatactccaattaaagggttaaaaactaatgtcgtttgttttaataaaaaaggatctccgatttatatattgtaaagtaattaaaacttttacagaaattaagaatgatttagcataacaaaaaataaattgggatttccttttttcgattttttttcttcataaaatcttcctcttttcattccaatagatacctcaatttctagaatagggttttagtgccgaataatcatcaggtacgagatttcagtttcccctttgttgtgttattctttctcaagtatcgaataaccactgattcatggaaaacacgatcatctttccttttctttttttaaactagagaactaagatgatcgatccagtgatgatgaacgagtcatcatcatcatcttcttctagtagtaattgtagtcatttgtttgttcgtcacggaatctgcttcgcctgtaaaaagaaggtgagttgtgtccatggccgagaattcggttatcttttctccggtttacgtctgagtcacgaagctgtatcctttacaaagcatctcacaaccctagtctcagtctacggacgcaagaagcttcacttggtacttgacttggaccacacgctaatccactccatgaagacttcaaatctttccaaagcagagaaatatctaatcaaagaagagaaatcaggttcaaggaaagatctgcgtaaatataacaatagattagttaagtttcgaccttttgttgaagagttccttaaagaagccaacaagcttttcaccatgactgcttacacaaaaggcggttccacttacggtcaagctgttgtgaggatgattgatccaaacaaaatctatttcggggatcgaataataactagaaaagagagtcctgacttgaaaacacttgatcttgtcttagctgatgagcgtggaatcgtgattgtggataatacgccaaatgtttggcctcatcataagagaaacttgttggagatcacaagctacttttatttcaaaaacgatggcaaaaacatgatgaggtcaagattatcctacgccgagaggaagagtgatgagagcagaaccaaaagagcattggtgaatcttctgaaattcctcaaagaagttcataacggattctttacctgtggacttgaagaagagttagattttaaggacgtcaggtatttgataaagggtcccttaaaaccacacggatgttaggttttgaaatttgtttactatcttgtagaaactagatttagcttctgaaatagtatgtaacgagagacaaaagttggaggaaagctttatgttatttgcaatttctaagtatatatgtagtcaagatacttgactagatataaagtggattcaatccacaatgttcacataaagacaacatggagtctctatggacttacagaagctcctattaggatgtttctcttttttatcacacaactctccgaagagacagaaacatattaaccaacatctaaggttatgaaactaaaagctaactttgaaagtctagaagcagctcttccttcactcactctatctctccattaggcaaactcaaacctctttaatgtctctttcctttctcaatttaccgtagaagtaaaaccacaaggaagagtgcgacagcaagtgcagcagatgaaagtccccaaacccaatatttatgagcctttctacggtttaggatggccttagggagagcttcggttcctcttccgcggtgtttgtacctgaaacttctctgctttggaaacaatgatctctccttttggtgtttttctttacctgaaactgctagagtcctaaccttttccaggtctttggttacttcttgtgagtggtctgattctgaaggagaggaagaatttgcagcagctttcttcttggccttcttctcacactcctgaaaacaaaacaaataaataagaaacagacaaacgaaagagtaaataagacactgaaaaaatggaaattagattgccttgagtttcttttcagcttccttttgagctcttatagcagctttagcagcagctttctcttgaagcttcctcttcctttccattgctaaccgggctttctctaactgctcttctctttccctctccttcaaagtttcttcatcgacctcttcttcttccttctttggtttctcatacaccgagaattccaaatctgtaacatcactctcctcagcactcgacctgttgaaatccatcgcctttttcctcgtttctttttttcgtttatctgtaattacacttccatattgagacgagttggagctggaatcttctctattcgtctcgtgaaccttctcgcctcccttaaccggcactttcttttcccaaacaacctgaacttcaggatctttaatccgaccatcttggttcagctgtctttcacatagtgaaggagatattctttttacgtaatcatccctaaaagccttgtcatcattccattgagtcatgaatctatcagcctataaaaagacagaaccaagaacaaattctcaaatttcagaaagcgataccgaaccaatcaatcttgcgattagaaggaactaagtaaacaaacctcggagctggcaaacacttcaagatctctaacatttccagaagcagccaattctctagctttcctcataacaggaaggctctggtaaaaggcagctttctacacgcaaaaaaagagaagcattaccaaatgttattagatatttgagatcatccacaagcaaaagtaacagaaagacaaatatcgtacccctttgtctcgttgtattctcaacatcttaatcctttcataggatctgtccctttcctcaagtatgtgtgccttttttacatccaaaaccctgaggttgttctgactcttccccactttgtcactcaaatggtttatcttccatgtaatcgcatcaagctccttctttacttcattcaattccacagccatagactaatgatgaagcaaaaaaaaactcacaacattagattcaacaatgtttttagcaaatcctccaacgagttaaaaactttgattagagtttaccttgacacggtttatggaggcttctttctccgcaagagaatcctcacttagaactatcccatcagccttctcagtctccttaagcacccaatcttcttcctcaaaaccaatgctaccatgttcaatctgataatgagctatataaatctgcatccaccacaccaaaacacttctacaatcagaaacaaaaataaataaaaaatttgctatataacaaaatgatctaatggttgtcattacaagatgatcgagctcctccttcgaaaaacaaagttgatcactagtagagcaccggagattccgtagagattcatgtagagcatcaaattccatcttcttctcttcaataaccactctatatccttccgatttagaaaccaaactcttcatttgaccaaacagagacaaaatctcagcctacaagaaaaaaaaaacatattaatcatcacaaaaaaacaaaagtgggcttaaagaaaaaacagactcaccttttcggattcctgagcattggagacaacaattcggtctttattatatcgattaatctcatgaccagcttcatcgatcttagctttgatctcgggatcatcgtaagctggttgcttaacaaagtagaaagagaaaggtttctcttcagggaaatcctcttcagttgcacctcccggtgaactatcaccggaaaaaacagtgccatcttcggtggtgaccgttgatacatcgcaacttgatacagattggttgcttccgaagagtaccaaatcgttcatctccggcggaggaaccacctcgaagccttcagagagtataatttgcgcacccatttttgattctttcctttaaaataagaacaagaaaaaactcactgtaagaactgtgacattgtcgaaatgaaactgagatcaagacagagacttaaaaagagatgtcccacaaaaagatttgtcttacaaaaactacaaatttaaataaagaagattttagaacattcgagaatttaggggaaaaaaaagatgtgtaacgcaatcaacaacaaagatatgtcttttaaatcaaagccaatgataatatttttcagctagagattttttgcaggaacaagattttaagactttcaagaaaaaatcgactttttaagctttaaccgaaaaagtaattgggaatttacctagaaagaagaaatgagtgtcacacagattctcccaaaaatctcagggtttttgggctgaagaggcaaagtttaatttgattactggaaaaaaaaaaagaaatgaaatctaaagagagaaaaaaaaaactggtgatccaatctatgttgagaaagagagacaccctgtttttcttcttcctatcaatagagagagatttttcttttggctatttcttcaaatctatatcttctagcttttaaaaaaagatcctcttgttcatcctaaaatcatattaaggaaatatagattttcttgtagttaatcactttctctttttttttgtttctatccaaaatttgctatacgttacgttttttaaaaatgtaattgtggaccttttcatattctttaatttttttcattatttctagtttttccaaaaaaaatactttaattttgcgttatgctaatgtattaattaacaaaaaaaccactagttaacaaaaaataaaaaaacactaattattattgttacaaaatttacagttacaaaatataacttgcttttgactaaccaggaagggcaagtccatgatgtttaatgacaataaggaaacaatctgtgtccctaagcttagcatattcaaagtcaactcttgtttatataagttgactgttgactttatatgaatttgactagttaattaataaaatcctcattttattgcatgaattcatatactatatgtaataatatagaagattttggcagaaaaagagagagattaattatctgtctagataaaccttatttcttgcattcaatagataatttacttaagttatgggatcataaatgctgacaaagcataaccattgacccattactttgacataatttgagatggttctgaaaaaatttgtctaactcactaacatgattagatttattgccccatattgttttcaaatgcttctaattaaacaataataagtttgttctcaaacaaatctaatatttgacgttaatataatagttataattaacgaaaatctctattgaagggtttacagggcaaaattcgatttttggttggtgtgttaattgcaaaaagagttgttaattacagtaatttactatgtttggatatagaactaatctccacgtatccctaaccacctaaaaacaaaagagttctagcatttaattacggctttagctatcggttacacaatttctaagtggacacttatatacgttacgcaagaaagtatgcaacggactaaaaacaagaattatttaaatattttaactagtttaattgcttgttcaattaaaaagctgtcaaattatcgtatagctgagttttcttctaataaaaaatgttgaatatcatggattttttttttaaattacttgactctacaagtgaaactcacactcacaccaatatttatcctctatatatcaccgaaaattgaacaaacgtttcatatttatacatttgaaagttttcactgatgtaatcgaacaagtgaatttgaaagcatcggctatttgaactaaaataaaaataaatactagatcatatcagttatattatattgaaaattttatgttggaaaaaaaatgcaggaattattcaaaaatttccgtatttattaaagtatcttgaaaatgttttgatgataaaaatgaaacatttagtttaaataaatttacatgtcctgatatatattaaaattctattttgaaaagtacaaaaccatatcttcatatcttgtcggatagatggtttgtaatccgccgacattgcaacttaaatttaaatagaaattattaaactaaatagaatgttttaacgataaaaatgaaacatctagtttaaaataaatttacgcgtcacgatatatatcaaaactacatttcgaaaaggacaaaaccgtatctctgtatcttgtcagatagatggtttatacttcgacaacatcacgacacaaaaaattaaatgtaagttataatgccaaactagcacaattgacacatttgaactagccatttggaaaattccgttatttgatacgagctataatttatgagaatccgacaaaaacgatttcattaaaaaagaattatagaatatagtttatagtccgaaaacatagcgacacgtaaaattaaatggaagttataacttcaaactaacacaattaacatatttgaatcagccactgaaataattcgttatctaaatgcgaactactccctccgtcccataaagataaattttttaggaaaaatatttgtcccacaaagatagaagttttatatttccaatgcaaatttttaaactgttttcccgttttacccttagataaatatttattattatttttaaagtatattaagaggttaaaattgtctttatacaatatttcttaaagaatgtgaaatttaaaaaaaattcatcttagtgggacggagagagtataatttatgagagtccgaaccgtttttcactaaaaattaaattatagaacaaaaaaagggcacatttctcttttgtatacatacatattactttttgactttgaaggatttttttttccacagattttgaaggatattatgacctaacatttaagcatgtatatgtcccgccacactgtcttttgaaaaagaaagggattgaaagtctagtttgttgggcttcagtcgacgtcaagaaatacactgttaaagcccatcaaatctcaacagtgaccgatctcgtgatagaacaaagttacccagagtcactgaaagcccatcaaatctcaacagtgatcgatctcgtgaccactccacgcgcttgttggcaactgtcaacacgtaattagcgcaacatacaataactttaagattataaagtcgtattcgaatgccaataatattcaagctactcatgtgtatgaaaccaaagatttctcgagactcctgctgtggacctcacttaaaataattgaaagcaacgattctcgtataataataattttcaaattttacgaatttctatgactatgactatattgtcttttcgttaaataaaaaaaaaatcgtctttaactctttacaatttttgttttaaaagattcgagtgaaaatacagttacattaccataaattcgtcaagagagcatctttttaagaaatgtaataaattatggtaagtgtatgtaataaagaagtatgttgatgttgctatcaacattaccatacgtgtctgttactatactagccccaatgactacgcaatagatatgtttttttcgaataaggacaagagctcgtaatcagctacacgcacgtccacatatatacttcaatttcatccattggatctgattatgattacgttttaaccattggatttattaatcatacaggtcttaacataaacgagaagtaggtaataaatactagaagctaccccagtatcttaaaactctgaaaacgtgtcagccaaacggtttctttttaacacttcgtgtaattaattaatgggattgaaaacttacttattaaaaatcgttatagattccagaaataaaggaacagagagacacacacaagataaaaaaaaaagtaacgaaattgagagctgaatgaaaccaaagatttggaatttttctttgtatagtttttccacgaatcggagtatcacacacggtcttggaattttccagcttaatttctaagatttaaaatcgtaatttttatttggaatttcactgtctcttcatgttgtctatataacttttactcggaaacaggagtgtcccgtgttcttgagcacaaacaaagtagcagaacaaagcatatacaaaagcttcattgcctcgagattaaacagcatcaagacaacatccaaaaattacccaggtttcttcattttcttaatatatcgtttttgtttctggatctcctttctaaatctgtagattcaggcgtgtgtagatttagtttttttgttattgtttggatgagtaaagtatgttctacaatgcactagatctaaatctcttcgagattctgatggtgtgttggtgttgtattaaattgattttggggataatctacgacaagggtttcttttaatgttccttaggaaaatggtaatgtaacgtttaaagggttttaagagttgcttaatatagctgttgagatgtctgattgattatgaatcccgatccaagagtttttttatgaatagaagagccatgtcgttcttgattgaattaatcttaatcatactgtttcgtaattcttaaactttgagcttgatgttgcgtgagaatctgggaactttaaatgtgtcggctgggttctctagtttgcttcttctttctgtatttggctctgagaaacttactagagctctaacatttgtgcttgctgataggtttttgtgtttgaaactcgaagattgttgcggattcctgaaagattaaggcttttagctccaagtttccaagagtgctgtgaatcagctcccactctgtctctgcatattgcaagacaccggttttgtttcagaagtttgtttcttcttgtctcatgatcactagttttcagcaatggggtatgtaaacgtggagaagagatgggtttttcctcttgtcatcacatctctcgtctgcgttttccttcttgcaacttctttcaacatgggactagtctcttccctccgaacaatcaacgggattttctccatcataccttcccgtctcgtcaagaaccaaacgagacttgattttgcagagtctaaagttgctagacaaacccgtgttttgcctcatgaagacaagcttccccgttttgcataccttgtttccgggtctaaaggggatgtagaaaagctttggagaacacttagagcagtgtaccatccaagaaaccagtatgttgttcacttggatcttgaatcacctgtgaatgagagattagagctggcctctcggattaataacgatcctatgtactctaaaaccgggaatgtatatatgataaccaaggctaaccttgtgacatataaaggaccaacgatggtggcaaatactcttcacgcttgtgctgttcttctcaagagaaatgcgaactgggattggtttattaaccttagtgcttcagattatcctctggtgacccaagatggtataaaaagctttgatctcactttcttattagttttgcatcaagatatttcttcagtcttgtctttgattaacttactgtcaataatctctgtgtgtttgaagatctgcttcatacgttttcaacattggaccggaacctcaactttatcgaacacacaagtcaactgggatggaaagagtgagcatattcacgttcttgagtttcctatttggtttagtcttatgttctagtggactgagttgttgtttccttgtgaagggagaagcgagcacagccattaatgattgatcctggactctacttgttgaacaaatctgatatttactgggtcacacctcgccgaagtttgccaactgcctttaagttattcactggtcagtcatctaatccctctaaactgcatttgaatgtacattggatcaaaacttcttctcaccattcaaatcttgaagcattattctcggtgctgttgtatatctataagaccaaaactctagtcatatgcatcaaagcttgaaatattttttcgttactgttgttgtcacaggatcagcttggatggctctatcacgcccgtttgtagagtattgcatatggggatgggacaatttaccacgaactctcctaatgtattacaccaacttcgtttcatcgcccgaaggttacttccagaccgtgatttgcaacgtgcctgagtttgcaaaaactgcagtaaaccatgacctacactacatttcctgggacaatccgccgcagcagcacccacacgtgttgtcactcaacgacacaatgccgatgatatggagcggtgctgcgtttgctaggaaattcagaagagatgatgaagtacttaataagatcgataaggaattacttaaacggaggaatgataaagatagttttactcctggtggatggtgcagtgggaaaccaaaatgctccagggtcggtaatgtggctaagattgttcctagctttggagctcagaggcttcaaggacttgtgaccaggttagtcaacgaagctaatacaggagttagtcagtgtaaatagaaagaattcgaagaaaaaaagaaccattatcgaagtaatggagagcgactgtcatgatatatatatttatacaacatatagagaatcttgcagttgcaggctttagataagactattagacattgtttgcattgagtagagatgccttgtaatgccacgacctactgggattcatttttgtttgtttgaagtcatctccttcaaaatccaataaaattataacctttttttattgagatgttttcagttataacagaatatacaaatacaaagatccaatatttgtatcctctcttcttttttttttctcaatagaaattctatacacaatgtttccactttcctatctttttttttttttggtaaaaatggtttaccctatatcaatcactccagcagagcatatctcttgcggagaagaagaacaagagatctatgagaggctcaagtcatcatctccagaatttttatgttgccattggagttagcagcgactaacgtagacgactgtcctcgccagcagattgaagatatgaactgtgatgcatcgtccacttcgagaccagacatagagtcagtgttgttgaacatgtacgacatcactggcattgggaatgccttgtggtacacgaaaacctgtaatagattcacaacaacaagaagctcagataatcaagtttttaggagacaatctgtcagaaagttcatttttctttctgtatcaagcctttacctcgttagtctctgagcctgttgctatatacccatcagagaccgataagccaacaaagttctgcaacacatcacaagaacattacatctcagaaaccggagaccgaagagagtcttgaaagcatatttcagggtaaaatgttacctttaaattagtgtgtccagtgaatgagtgaagaggggattcattaatcccagaagcagacatcgacaagtcccaaagcttcagtgtgttatcagtagaagaggacacaagagtggatgaatctacaaacttgacataactcactgtcttgctatgaccaatcattgtgcacagaggaatcttggggtttcgaagatcgtagtaatacactttatgatctgcagaaccaaatgctagagaccgtccggagtctgatggaaactggacacagcatacattggcctttgtcttgatggtcccaatgctaactccctgaaaacatttccaagaaaaacaaactcttaatcatacattctgagaatgaagatgtttgcattattgtagaaatcagtttcagttttcaatagccgacatttcaaattagaattgcctgattgatactccagagcttaacggttccatcatcgcttccgctagccagcaaagtcgggtctgctgatgaaatatcgatggaccatactcgcttcttgtgctccttcatctctgtaaccaactggcttcttgcaacatcccatatctgaaaacaaaaacatatgtatcccaaattggttttatgaaactggaagtttttaataacgctagagctgaatgtaaaactaacctgaacaacaccatcaaagttacttgatgcaatttggctctttatgtagctgttccaacataaactacttagctttgaccgaccagccaattccaccaccggatagtgaatatcccggttatcgtttactatggagttacattcgaatatcttgattttcttgttgactcccgcagtggcgaataattctccttctcggtcaaacgcaagagcgcaaacgaggttagaagagttcaacaaatctccttgtttcaaatcagctttcactcttagctgactgaatgataaatatctgcacaaaccctcaaggaaaggatctatccaccccccttgtctcgagtcattattgaagaaagctttgggtgccaccgggttgcttactgaacttttctctgagacaatcatagaacctcttccattttcactacttaacggcgaatgtctagttaatgatttccctgaagcagcagccttcatttgcctgcgccttgtcagaaagtagaccgattctagtttcttgaagtttctcatcaaccgggagctttcaagaagtgtgcttccttgactctcttcatcaacttcaacaccgttttccaatgccagaatcccttgtctaacccgttttcttgaggccaagaatgctgatggctcctcgtttgcctggaaactcatcaatggctgaccagaggtatattgatgatcatctttactgaaatcagagagtgagcttccccttttcttcaaaattaactgtctctttacaacttgctcaatgtcagaagaaagaagtgaaacagtatcctgcaatctatacgcagattcttgcttcctctgttgaatcagtaacaagaactcgagtaacgactcctgttcctcgattctgtcccgaagctcgattgctgcttcacgttcttccaaattatctctaggttcagttataaactcgctttgcagcaagtcactgcaccataaaagacaaattccccattagttccatgtagtaaaagatgacagagactaacaatgctcaacctaagaacatgaagtataagacaatatgtaaacctcattgatggtcgacaagttggctcaggatgcagtaaccacaagcagaaagaagcttcttttggacatttgagcaatatctgaggcggaagaacgcgatgtctaagactagacatagttctagacttctcttctcttgaaggtacagggcaaaatagctgcaaagggactaactttcatctcatcaccttttcaagaaaataaacacgcaaaacaaaaacagaaactttgaatccaaaagcagttactaatttgttagaaacaatgtttctttctttatcacaaacctcgaaaagaagaacgccaaggcggtaaacatctgaagcacaagtacttgaagaaccaaaatcctcttcagggcttgtgtaccaacttgtctccattgctaatatatgtttcatcggaaaaggttgggttttttcttcctctagtttctcgatttttctctccaacaacttattgtagactcctttctcttctattgcaatagctttcgatacagcttcctctcttctcgagctaccgatttccttctggctaattggaccatcctccaaggaatcagagccagagtccgaacaagaagcagattcaatgaacgaaacatggttaaacgaagacatgacaaaacatgatggcctgacattatgaacaacaatgccttgagagtgagccgcattcacaatctcaacaatttgtctgaaaacgtgcaagcactcgaaaacatcaacagatcgttcaggtttatccagccactgtctcaaactaacatcaccccattccaaggatctaacaaaaggatcaatccctaaagaatcatcttcaccagacttgtgtgtgctagtactaccaaacaagcttctgacatactcatcaacatgagaggaaggcttggaacgagtagtgagtctctcaacaggtaagaactcagtgttcctatctgaaacaccagaggtattgaatcccctagagttagaatttgaagaaccttccatttaacatccaccaaaagctaaccagaaaccaacacgtaaccaatgacttctctgtattcccaactctaactggaatcatttcggattcaacagctcattgcttaaagatcgttacacattcgccaagaacttagactctcacaatgtaaagccccttttttaagtgatcccactcaagaaacaaaccctaggctataaacagaagaaaactcaagaacctaggagacccatttaagaacaacaacactcaaaagataaaaatatatacaagaaaaaatgcaaatcttttgatcatgtaaagagccaaaaaaaagaaaggaagcttctttaccgcaaaattagtgagagggagaagataagaagtatctaaaggagagaggccacccagaaataatctttacgagattgaaacagagccacacaacaaacaaacaccaaacacagttttaaactcggaaaaaaaagcagaagaaggctctctctctcagcctcataaattctcggccttttagaataaaaacaaaaaaacgactgctgaaagaaacgattcactgtcgaaatcgttctttaatatatttatataatatatctctcagttcagtttttttttcaatattgataatcacccaccctctctttacacgcaagcaacgtggttaatcttcgacctcacaaataacagaacgtaaaaggaatgacctttttttgtgccaaatgtataaatttagacaaacattgagggtcaaatcttcaaacttttgctctggaattaagaaacatttttttttgttttaggctcctttatttcttcccaacagaacagcaactaattctgggtacataattgaggttcttatgaaaacaaaaacaaaaataaagaccagatccttttaagaggagtgaatcactaaagttcaaagcatgtagtcctctcttgagtctcctataaacccaattaacaaatgcaaaagcaaaacaataaggcatatttaaaactaaataaagatttggctccggttaccagtctctgagacaatacctaaactggattggaccggtttaggtttagctgttcttggcgctgtttctcgaacgaccaactcaaatgtgccatgatactagcaaaaccggtggaccgtggacatgttttcaagaaaaaacttaagagcgatctccataacaaaactaaatgtcagaccaacatgtctccaatgcgatcatatttgacagctaagatgttgggttttgagaatgccattgtcggttttgttgagactatccaggcatggtttcgaagttaaatttgagagaagaattggtgtcaaaaagcaagattacagagttttgtgaatcgtcatttcgtcactgtaagacatcgagtttgaaattgttttacggcagaacaattatttcattcgaagcgtcatttcaataacgccaagtgggtgcgttacaaacgccaccagagtctccaacaaaattgacctatctagtgtgtttatctatccgattggggataaaaaaacgatattcttgattattgaagtcgaataataatcgattctactacttgtaattcgtgtcccctatcttaaatgaaacatttgtttaattcatatttcgtgtataaatctaagacattccacgtttataatcttctgcatgggaagatatattttatattttattccgtgaagaaaacaaacaaagctaaattatcctccgtttatttaaatataaaccgttttcattgcgtggatgcaataatttgctccttttattttatcatcttcaatcgatagaaacatgtatgtatccaactatccatgacaaatacaataagacgacgtctagagctactgatgttgtatagagcttaatacaatctcctaccttgcaaatcatgcaaatccagttactaaaaaaaaagaatttggaaaggaagtttattttattgaaaacctctgaattattcagactgattacacaaatatgaaaatacaatgcagagtaagccacaggtcggcttattttattcataccttaattattcactctacaacaattacaaaaacaaagcaaacgatacctagccaaactgaaccgaaccgaaccggtttacttagttttcaaacgaccagctccaaacatcgtgacgctcaccggcacgtcccatggaaccagcaaaaccagcgtacatgttttgaagaagaacatcattgagtactctcgaaccttggatcaaaggcctcttcggtttcttaacgttttcaggggcgatggtaatggtattcctagagtctttgcttctgaactcgatccaagccttgaacctctctccactgctaagattcacatctttaaacgaccaaacttttctttttccgactaatgtctgaacccaataaccagctttctcagcgacaagagaagtcatcgagttgatgttgattccgacatggttaccactaatgtcattagactcattgttcttaaacgtgtcgaattcgataaatatgaggttgttttctgactttccatcgttggttttgttgaggattccgagatatcctccgccggaagcgccggagttatcagcggctgggacaatgacgaaggcaaggccttgaccagaattaggtttggtgcgaggagtgatggagaaagtgaaagaagttttaaaatcaaaaggagaagaagtgtttgaagatttgaattggattggattgatgtaaagaccctgaccatgagagaatggggtttcgtctcgggtcatggaaagagctccggatcggcttacgccatcagaggaaggaccaagctcagcgtctccaaggaataacaagttgctgccatcgaaggaatcgaagttgaatttgacggcaaaagctgcattagctaagaacagagcaagaaaacagagtttgtgaatctgcattgtgtttcttttgttgttgtttgtgattcaagtgtggagaagattgatgatgaaaatatttggaggttgataatatgtttatataagagttaacataagccatcgagcttgaatattcaaaatctatgattcgaaaaagtggtcaaataaacaatgccaagtggatgcgttggagacgccaccacaaggggcttagcagtgaaatggacccacccagatgtctttcaatgaacaaaatcttatccttttgaaaaaatattataatggattcgagtaataataattggttgattatattatgtgtttcttgtccccttctctacgaaacattgtgaattttaatgtctcgtgtacaaaaaaacacattgacaagcttagttgatatcacgaactcgtttttggatgcaaaaaagttactctgttttatgactttatcatctcaaattattaaataggtatatttttaaataccaaataaataaaatttacattttcttgtgctacgatacgacggcgggaacgatcgcacctttcaatggtatgattagtgggccgggccttttatagcccaaatacctagcccataactcaactcgggggtttaatgtaatttatattgttaataaacttcgtccctctcattgcgtcaccgagattctcaccggacctctgcttattaaatcttcgtctgtaaatccatttaaaggttattattttgtttctgagttacttcgtctcgccctcttgttaagatgctgcaaaaatgaattaaagaatcgttttacacttttgttggtgttgtggttgccttcgttattgcatcgtaggaacgagagattttgtgaattaggttttagggtttcggaattcagggttttaaccatttagggtttatcagaattgttaatttctataatcgtttctctgaaattggatgaaatcattaatcgtatcaatattgaaaaatttgggaattcaataatcactctatagaatagaagctgaaacgatggtgaaaggtttagtatgatgttggtacatacatacaacgaaaacatggagtggcttatggtactaattagagtctttgaaattgagcttaagcaaacaaagtatccatagcttcactttttttctggcttcgttgtggtttgatttgtgcatgaagatgtaggttaacatggagatgtacaggattaggaagattgactataccacttatcaaatcttttcctttttccccttcaaccaataatgctttatttgattctgagcctatttgtttgttggaatctgttagactagagatggatttggatccaaagaagtttgctgcactattggacaaaattgaagctgaagctgatgagtttctattagctcgaaatcaggtactcgggaatctgctttggtagtatctagttggaaatattcactacttcgtaatttatatgtgattgacagattgaggaaagcacaagatttttcaatctattgttgtctgcaacttattttgtcttgtgagaaaacagatattatatgatatgtattgttgttaggtcaataagtttttttaaccaaaatggagcttgtaatatgtgtaatagatggtggagaatgacaaggagaggaatgcaaaccgagaggctcttacagcactaaggaagagagctcggacaacaaagactagtgttatgtctccatttgattctatgatgaaggatatccatgggagctcaacgaaacctttggtccaagaagtttgctccacatgtggatcccatgactctagtgaacccacctggatgatgctcccaggagctgatctttttgctgcaattccgtttcatgctgtgcatacaatgctagagaaaggtatcatctttgtttacatttatttgctactctcatttagagactagtgcagtttcctcatgagaaaacggcctacttgttactatgtgaagatgaagagaaaatggagtttgaatcgaagaagttacagagcttagtgaaggaaaaagctctgtttatatcggaactaggggctcttgctgatggtatttctcctggcgttatcagatcgttggtggctttagaggacaaaccttaagttaagtagaagaagtagaacaatgttagtttgtcacaaaaaggatatgttcattgattctcttgtatgatgggaaaagtcattatccttaatattaattaaaatcacaaaactttccttgtgtcttttgatgattgctttccactgattaatatttttaccaaaagtcttggataagtttgctaaacagatgatattattggtataaatttgttttaaattatattgacaattgtttctctcaactataaatttgtttataatctctcccacttataatcggaaaccaatctttatacggtgggtttgaatttctgttgaagaaagaggagaagctgccaaaagaggaccgagatcaagtcaaatatcttcttttgcaacaagacaaaattagggtttatccataaacaattcccagaagttctcttgtggaattcaaaatccctgaaatcatataatctctctattcaaaacatttgctcttgcaaaagcttaaacatcacagcttcctcaggtttgaaccttctctatctgtaaagtttgaaactttgaataatatgcgtttttttgtttggttccatctgtttttgaccttttctcgatattttcaggtgattcttcgaaaacccagcaaaaaagtcagattctttctattggaatcaacaaaggtccgatgaattcatatctcttccgcgtaatctgtatactccattcgattatcgcactcacaagtggaactctgatgatgttctacacagagaaagcttcgatctttggacatggtagtgatatagcaaacaagctcaaaggatcaacacctcacgacgagcagcttattcagatttctcagtcattctctggtttgcttctctttgctatcggattggtgcttttcatggtgtcgtttgtgaaagacagagagtttcatagcttctttgcagctggttctgtgattctctatatggttatggctttatggagagttatgtttgagtggaagattgaagatcttgcttttgaatgtcccaagcaagcccttggagatattgctttagctgtctcatgggttttcttcctcgtttatacatggagagagaagtatgattgatgttttttttttttttcttaaactattgtcggtttttatagattcagatgatcaagtgtcaatgaaatagaggaattgtcaatgaaaatggtttgttttttcaactgtgaaaacatcacaagtcttaggttccttcattcttgaaacttattttgtaaatctgtgtaaatactctgtttgagtgaaattctcatttgtgaaacattgtttttttttctgcaagtatttcaatatgttggcaaggtactacaatctagaaacaaagatggagatgagcaaactacagcagtttccaataagggataataagttcatctgctataaaaggaatggttctgtggacaattaaactcataggaagtccaactccataagcttcatcatcatcaatgtagattgaagcgtaatgagaataagcagctaatatcaggatcacaaaacttccactccctaatgtctctcctctgccaagcaaagattgtagctttctttcgtttcagccttaccctgagtctcagtatctgtaaaatctctttgcaagtgctaaaaaacattatgtttcatcttccacaagctataactctccatctgtgtgagagatgttgaattgctgcaatctgccaatctttggatccattactatctccatttgttgtcagtgactcagtgctaaaacaaatgggcctagcccactttagaccaatcagatgggctcgtagctaaattcgatgcttgtgtatagtagaacattcaaaaacaaaacaaaaaaaatcgtatttggtggtggcttgtttgcttttgaattcgcctccttgttcaacctgaagccaagtgttcttctttcctttcgaacctgtcgccgacattttcaccggttctctgctctttgattcttcctctgcaaattcattcaaaggtttcttttttctttttcctctttttgagaattttatgtcgagaattgtaagatgctgcaaaggaaaaaaagggaacatttttcgcagatttgatttgcttgcttgctcgttgaattgaattgttacccaattggcttatgagtttggtgttgttgttatcttattgatgagatttcgtaatttaaggtcagggttttgagattcagggttttaagtcgtctgatgtttcttagggtttatcagaagttcaatttttttagatgttcagatgggtttatgcgtttttaaattttgattgaaaaatctcgaatttaatataataaccactcgtaagtattttcaagccactcatttcgtgatcacaagttctcaataaaagtctttgtggtagatttatgcagtcattgttttcgatttcttaccaagtagactattgtcatggaattctatacatttgttagctcttattgagcttggtttttgagaaccaagtatattatttcgatctttgtttgtgtttgcttatgagcacatcccaaggtttaaggacttgatatttgatctttaagatcgcttctttaacagatgaatgataagttaggatttgaaggagaatttaggcgatgtgagtatgtgacttatgtttatgccatttgttctttatcatgttcattttttttaccgtgttctttttttcgttgtctacaggatgactgatcagccagcacaaaatggattgattcctccacccacttcagagccaagcaaggctgctgcctcagcagagacgaaaccaaagaagaggatatgttgtgcttgccctgataccaagaagctgagagatgagtgcattgtcgagcatggtgaatcggcttgcactaaatggatcgaggctcataaaatttgtctccgagcagaaggtttcaacgtctgatacttttttttctttttctaatacgtaatttgatggatcatcaaaaggaatgagcaacagaagattgttcatcacccggtatgggtttagggtataaaagcaagagataatgtatgcatttgatacaaaatcccattttgatgcgattgataataaaaagaaaccatcttttcaattatcttgcaagtttctttagttttatagggaagggaaagaagggtcataacccattacatcacaccatactagagagtagtaataagagagacatgagctcaatagatgagcccacatcaacttttattcatattacattttgattaaagaagcttcattagttggggcagcaagtgcagttgacgcagctgcaagaggagccgcacttgcacttgcaatttgcgttgttctcctcggcaccaacgtccatgatcatggcctccttgtagctgcaaaacaaataaattgttccatcattatgaatatgatctcgttgtatcattactattacaaacatgtcatttgttattacctctcctgagtctcgacgatgtcgaaggtgtagctggttcccttctttctacagtcacagagtaacaaagcataggtcaatcaagatctagagcaacataagatttacagaagacaaagattatagtttcagacacagatcaagcatcaagatccaaaaacagagaggtttcactctgctgttggctcaacaaaatcgataactcaacgaatcagaaacagggtctttctcaaaaaaagaaacagaggacacttacacgcactgggtcttgtcagcacagtcgcagcttccgcagttgcttgacatgattgagtttttgaaaaggctttaaaggatgtttagttatgaagtgtttgagttcttgtttgttgttgttgttgttgttctgttttgtgatccgatggctatgtaatttatagaaggatagagagagtggagaatctctgcaaattatgtgacaaccgaatcttttttgggttatggagagaaaagcctttcgttgccaacctctcgtgtccatttcactccttttttcccactatattcgttattcttccctttttttgtagtaatccattacaactctttttttatataacaaatttggaatatagttgattaacaactgaaatcaaaatatatgaattttagcatatgtagttggaattactattagtataaataatctagttgaaatatttaaatagaggcgtgctcctcaaatcataggtgacaatttaaagtcgttgcctcccagacaaaattgtgacgtactcgtgaacaagatttaaagttttgaacaagatctttgtttttataatagatcaattttaaatctatactcctatgattcggggtaattttaactttgcgaaactcatgattactcaaagattccaaaaggatatgatttgaatgtagtgctctatatcctttttcccaaatatgaaatatgactagtgtcctactgatgattaagcttatttccaatagaatccaaatacaatcattagaagaataaaagttgatttatctaatctaagttcaaatacaatattttatgggagaactaacattatttgatgcatgactatttttgtttcgtaagatatatcttgtttccccaaaaaagaaaaagaagaagattatatcgaaatcatttttttttaatcattgaggaaagattgtagataactaaaaaccattctgttccattttaaactctttcacttagattatccttataatattcacttgcgtttgtgtacattgtctgaattctgaaatattaatgtcctcggcatttcttacataaacatcattttttcagtcacgaaatgacgaatatgtcccaagaagaatgagcaaagaaatgcatgtcgttttgtgaataaaaatctatccactaacttgcaaagaccaaaaagatggctttctgtctctttcaacttttattaatttggttctctaatttgaaaattagcagagcatatgtttcagaaattagtgacttaataaaacaaacaacttcattatcctcaactacagtagattacaaagcctgtgatgactgatgactatctcatgtttatttttcgatcaaaaagttcgactgtttcttttgtttgtttgttttcttcttttaacttatgttatgttatcatgtttgtttcttttgtttatttttactgatgatgcccatttgtaaaagcccataacataagaaataatgtacataggcccaaaataagaccagcatggatctctctctctctctccttttttcttttgttttaaaaaaatctcttttctaatttttttaaaaaaatctcttttcaaacaaaaaaaaagagataaattttgtaaaaaaatcaataacgacatatgtcagtatgtcacaccagtttaattattttaaatttaaattaatacatttttattacttactgtattcaacttttctttttatatatctaaacaaacttcatctttttttttgttgttattaacaaacttaatctattaatagctgaaagtaagaataagataatgggccaaaacacaaataataatagcactataacattgatgatcattgataatagcactattacatctttttttacattgattgatcattcatttactggtctttttatttaaaataaatttataatttaatcaatgatactagtcagattcatcgtacttctttagaaaaaatatcagtgtattctttataacttaaaaaacaactcaattatatcttctcattagatttgctatgattattctgttactataaaaaaaaaaaacggaaccaaaaaaatagttcccaaccgttggattaacccaataacttgtttatctcacatcgaacggttctaaaatcatagccttggtcgaaatcacctaaccttgttgtttaagctcggtctatttcgtctacagcagcagaccacactagtactagtagtaccttcatcatcaccgttaaataataatttccaatataaacttcaatcgcaaccgtcaatgtaaaaagtgggccccatatgcgtagactttccgtattgacttgttgaataaaaacgcacaaattggaaaattttcattaatcatcactgttttaatttaggtctttaatttattaagatttaggattaatagagagaaagaggaattggttttaagtgttaagagagaaaagcctttgcgcaatctcactgtgtgttggtatatattacggcgccaaggtttctttgatcgatttcttcttcttcttctggaaaattatctcgttttccgtttttagttctttgagtttgggatcgttcaatggagcccaacgtagtggagatcgctactcctcctgccgcttcttgctcgagaattcgaacgccaacaaaggttattactttacctaattgaattgaatttgatcggattttaatctctagagggtaattctgtttaactgtgtcttaaattcactgatttacctaatttgaagttaaaattgattttggggattgtgtgattgtgtgatcatcaatctgggttttgaggtctttgttgatttattggttttagtgagtcatcatcgttgattttgctgatgtgtgattggggtcttttgttttgttggctcacttgcattatgttttttatttgtgtatgttctctttgaaggatcgtcattcgtttcggcgatcactttctaacgtttcatgtttctgatcactagaaattgactgttaaagttgttatagacttgtttttgttatgtaatgtgatgtcaagtctatgaatgttttgtctttggttctttgtgataactattttgctctttggtggctttgctattcaattggatattattatgtttatcttactctggattttgggtgggatcatgaacttgtaggctgaaactccagaagtgattgatgtggaggaatatgatttgcaaaacggtggtgttcctaatggcaacaatgttgattataagaacaaagggaaggctatagactttgattccatgtcttacggtgactatggtgaagaagatgagtatgctgtggtaaatgtttgaattttcgttttttcttttcttctaatgagtctacttacgttgtcacaactaaaaggtcttttttaaaaattattctagggatctcctggtgatgattatggttatcctgaatcatctccactatcaaatagtttgttagacccagagtctttgatctatgaagacgacgaaaactattccgaacaatatgactttgaaatggaggcggagcctgataattactccatgtatcaagaccttttcgatggtaaggatatcccaactggtgtggaggtttcaatggattggtttccaaattcagctgacaaggaatcagcgagtagtagcaaatcgtctcatgctaataacgggaataacagttccaagaaagcaacaaaagcaagtggaatccattctcaattttcttcagatatggaaacccctgtagctcaaccatggaatgctttaccgcacaaagctgaaggagtcataccaaactctgcttatgccttgccacagaacagcaaggcttttcaaccaccttacgctgtccactattcagcccttaaaactgctttttccaattatcttcagcctcagactcctgataccgtattgggggaggctccagctcctgctgcaggttcttctggtttattgccaccaaacacacccggttttaaaagtaatgctgctcggtttaaagaggagccgcctatattacctccggatgattccagagttaagagaaatatggaggattatcttgggctttatttgtttttcaaaagatttgacatcgtcgaagatttttcagatcaccactatgcttctaagggaacaacttcaaagcaggttgccagatgagcataagttaatctttataatggaatgcttcttatgttttttcaagatttaacttttttctttgtcttatcagcattcaaaggattgggcgaaaag

SEQ ID NO: 421 - DNA, 82893 bp, Arabidopsis thaliana
gatccaagacgagtggagaattcttgagaaagatttaccaggttggtatacacgctgtcttatacaacaatctctgtggcttttatcagtaattttttcttacattctttgttattggaacagagatgatatttgtcagagcttatgaatctaggatggatcttttaagggctgtaattatcggagcccaaggaactccctaccatgatggtctcttcttttttgatatcttcttcccggatacatacccttctacgccaccggtaagtcaactgaactttctcaagttgagttttttttattgttttctaaaggttgtctcatttgatatgtgaatttcctcttggttttacaagattgttcattaccattctggtgggctaagaatcaacccaaatctgtacaattgtgggaaagtgtgtctgagtcttctcggcacttggagtggtaaccagagggagaaatggatccccaacacttcgacgatgctacaagttcttgtctcgatccaaggtctaatcttaaatcaaaaaccttacttcaacgagcccggctacgagaggtcagcaggttctgcacatggtgagagtacctctaaagcttacagcgaaaacacattcatactgtctttaaagactatggtttacaccatgaggagaccacccaaggtaaaagcaaaaacctcatcccattacacttgtctctctctactaataaaaaagcgtaaaccttttcactaaaacttgagattgattgtttctggtggtttttcgaatgctacagtattttgaagactttgcgtatggacatttcttcagctgtgctcacgacgtgttgaaggcgtgtaatgcttacagaaacggagctacaccgggatatctggtgaagggggctccagatgtggaagagaatagcgcgggcatgagctctctgaagtttaggacagatgtggctacctttgtggagacagtgctgttgaaagagtttattcttctaggtgtccttggtctcgaaccggaagaagaagaaaaaacacctgagactataatcgttgcagagagtagcaaatgtaccagatcaaggtccaagagagacagagtttcttctagttgatctccattgctcccttttttttgtccttaatttttcttaatttctgaagaaaccggtgacttaattagtttctcccttcttacaatcatggatcctctttttttctcttaactatgacataaatcttaaaagactattgagaactgagaagtcactctcatatgtacagttccctttatcagtcagatttattatagcctcaattttctgagctaccagagaagtgagtaaaagtcaacgatacaaggtttggattttgacttttaagctttattatccctcctaatcaagacaaaagatgtgaaccagatttactttaccgacgtgttgttgtactttcaactgaaaatctaaactacagttctgaaaaagagatacgtaaatgtacacgtgtctatccacgtgtcaactcctactaaaaaccctaaacccttccctctctttatattagccgtcctaaactctttatcagtcccagtacactgcgatcaaaaatggcttcagcttcatcatcggcggcgagatcactcatccgcgacggaaaatcgttgacgaatctattcctccgtggacgtaagatcaatctcaccgagacagtacagaacaatggaccggccattcgatctctgctttgttttaaccagatgccggcggctagccaataccctgtttactctgaaacttttccggttatgaaatccggtttacgtgtcggcttcgttcagaaggaggccgtttcggagagagtagggaaaatggaggcggctcatggaaagcgagtggtggacaacaaagatgctgattcagaggaggacacggattttgatgaagacgagattgatgacgttgactttgaagacgatgaagattctgacgaagatgatgaggaagaggaggatgacaagtacacaaggaagaagaagtaactcttcattcttcacaaaatgctttctgttttttgtttgcttgagattaatggctttagacataaaccttctttgatgaaatggttctaaaatgacaatttcttcttctttgtccagtatatttttcttcacatcccattttaactattaaatctgtggttttggttatcaatgatatatgtgacattcgggggaaagaacaaaaaaattctcaaactgacgaaaatgttgcaactatctcagtaaactattaaaatggtatcgattagacgatggtgattagattattataacatcccaaatcgagttttgtcttcttttttttttctctcaaaacaagctcaatactatttggaatcgagttttgaacaagttttctctaatttatgtgatcataacgcttagtaatagaatccatatgtatttatgcaaatctgttttaagaaaaaaaattactctccaaagaaaagttaaactatatataatatagacaccctttcataaagtgatataagagtccaatcctcaaccttaactaatgaaaaaagaacatgtccgtcttcgtaaatagaatcgaccttatagcagtgctgcctaaccgaattggtgcggtgctgcctaaccgaaatcagatgtgctgcctaaccgaaatcaaatttgatagtcggtctactaaaacaattgacggtttacaggagtcctctaaacgttgtcgttatctcaaaggaaagaatgacgtggcgaggataaaatcgcattcgcctctgtgtgtgttctcaagtcattcaaattgtcacccgtatctgccaaaaaccctctaaccactcaaaaaaatatctctgctctgctccaatggcgtcgttactcgattccgtcaccgtgacccgcgtgttttctctgccgattgcggcttcggtctcgtcttcttcagctgctccgtcggtttcacgacgccggatttctcccgccaggtttctggaattcagaggtttgaagtcttcgcggagtttggtgactcagtcggccagtctgggtgcgaatcgtagaaccagaatcgctcgcggtggacgaatcgcctgtgaggctcaggacaccactgccgccgccgtcgaaggtaacttcagttttcttatagtacaactcgtagatctgaaccttaaatcagtgaggattcaacttcatcatctatataattacttggattgttagtctttagtattatctgatttagttctctaaaactaggattcatagggagtggattctgataaaacattgtagtcaacgttattgaatactcaacttcttcatctatcaagttgttgtatgatcaaaccaggattgattatacaaattgatagcaaagatactctgtgataagattttagcatatggtttaaataactcaagaaagaaccagagtcttgttggcattgagcattgatgtgctctgtatactatttcacagaacggttctctctgatagttgcataatttcaatcaccattgagatatatctaactagtttgtttgatgttgcagtaccaaatctgtctgattcagaatggcaaacaaaggttctggaatcagatgtcccagttctggtcgagttctgggcaccatggtgtggaccttgccgtatgattcaccccatagttgaccagctagccaaagatttcgcagggaagttcaaattctacaaaatcaacactgacgagagcccaaatacagcaaaccgttacgggatacgaagcgttccaacagtaatcatcttcaaaggcggtgagaagaaagatagcatcattggagctgtgcctagagagacgttggagaaaactatagaaagattcttggtcgagtaacaaaatttgactcttttgtcactctgaaccattttaccttatcttctctcttgtaatctctgtaaagtcttttaagtttttgactattatgttatcgtgggtcctctttgtcttcttcaataaaaaaaatggaaacaaagtaatccaccgacgcatgagaagcataactccacgttgaaccacatgccattgttcttcctaattcaccgtacaatctatatacatacatatgttttgagtaatgtaggcttccgtactgtttcattctgtgtactgcataggacatatattaataccacgagggggtctatgtaatcttatattatatcatgtatgttttcgatttctaatccaattatgtgagtatatactatgtggcatgtccaagccatgtctttactaaacgatcaggagaaaacgcgtttcgtttttaaatcagtttagttggattcccatatttaatctcggattacacaggtcatttcgcgactaaaacttaggaaacttagatctcaaattcccaacctttgatagcaccgaataattaagatacgaaatcctgaactaaatatacagctagatatcgaaaacgtttgtcaactctgccattctcttccatcattttcctctcggaaccaaatgttagttacagtcagattacaaggcagttcaatctctaaccagagctaaaaatatcattatcttgtagtatttcaaatactagtattttgttatgggtaattctcctcagaaactaaaatgttgttacttaatatgcttctatatggacatatcaaaaatatttttcattaactacttcaccaaaaaatagctatatgacattaaagtgttttagtatttcaactaggaaattatgttcccctgtgtttagacctatattcaattattatagaattttcaagagcaataaaaaaagaaagatccaactaagaaagataacgaacacatgcatgagattgtggtgcatgtaagtgaaaataagtcgtaataatcaccgacaaaacgcgttaatacttattatagatccttataaaacgagtccaaatgtcttccttcttcttcaagcaaataagcaatcaattgtgaactcaaagctttcttttctcgacctctctttctttcatcacgaaaaatttatacttatctcaaataaaataaaaatatatatatatggatatgaagggaacatacttagtaacggttattctcttggttagtacgttaagtgtggggatgtgttctaacggttggataagagctcatgcaacgtattatggtgtcaatgatagccctgcttcacttggtaaaaaggccattaaactattgtttaatatacgtttttgttacttcaaagtttgtatggtaaatttgttttttagatacaattttataggaggagcttgtgggtatgacaatccgtaccacgccggattcggagcacacacggcggcgctaagcggtgagctattcagaagcggtgagtcatgcggtgggtgctaccaggtgaggtgcgactttccggcggatcctaagtggtgtctccgaggagccgccgtgacggtgacggctacaaacttttgcccaacgaataacaataatggttggtgcaatctccctcgccatcactttgacatgtcctcccccgctttcttccgcattgcccgtcgcggcaatgaaggcatcgtccccgtcttctatcgccggtaacttattcgatgctataggagtcaattgcttttttatgcatatagtgttcatcctttttgataagttaataaactgaaactatacattaaagtatattttggagttttttttttttctttttaaaatgtaaggtagagaacattatacaaccctatcattattttaagttattaacattattgtttaatttatttcatctacatatcattattttgctataatgatcattagcaagctaggtcattatatattatagcaaaatttataaggaaagaatggatgaagtttagatcaacatcacattataacatgtacatatacgtacgctcacaaacagaaaaaaaaaaaacaaaaacaaggccaatccttcaaaagaatctggaaaaaggtttaaatggactttagttaaataaaaatatagcatgtaattactgtgatatttatgcaaaatatctaatagttttgtaatgtgtatatatagggtgggatgcaaaagaagaggaggcgtgaggttcacgatgagagggcaaggtaacttcaatatggtaatgatctcaaacgttggtggtggcggctcggtgagatcagtagcggtgagaggctcaaagggaaagacttggcttcagatgacccgtaattggggtgccaactggcagagctccggtgatctccggggacagagactctccttcaaagttactctgacggacagcaaaacgcagacatttttgaacgttgtcccttcttcttggtggtttggccaaaccttctcttctcgaggaagacaattcgtttaactacaaaactaagtcgtgctctggtcaaaacgcaattctttgcttatttctgaacttgcccttgttttaattgggcagtgttcctttgtttctcttttattgctaaataatttcatgcttaattttatttaacggaacggtttctcatttatgtatgaagcattactcgacaagttaaagagttttgcagaatttatattaatggaaataacattttttacaagttcatttgtcaacaaaattatcagagctaatagacaccatgaaaaaagactattatcagataaaagcttcataaaacacagattagtatataaatgtaatgttacatgctagctttaattgaaaaagaacgacattgtcaggtacgtaacttgaaataactctttatcttcttttttttgtcaatgaaataattctttctataaaataataataataataataataataataattctttcttacataaagataaaataaatatataaaaactataataaataaaacagagcaataaatatataaaaacaatttttaaaaaacaaggtgctggcccatgctttttaaaaaacaatctgttgatttttcaaatacaaactaaatatacttagaaagttaattaaatatcactaaaacctacttttgggaaggttattaaaaatttccctccaacttgggaagaatgtttgtgagagattaacaaaaaatagatgaaggtttcacaccacattcagttccttatcaacagattgatgtgagcttttaatgaataaaaagctgttttctttttgtcatcaatttcttctatacataactctggtccattttttattcatgttttaataatataacaaagaaaaagtggaatcattgtatttttaatgaagtggatggcgttacagttgcagtcttgcagatctcaaagagaataagaacaaaaaaaagcttgattttaaaatctattcaaaaaacagaacaaagatttttaaattaggtttaatactaggattaaaggaaccatttaaaaatggtcataagaaatctcaaagcccataagaaccagacatggattcttttcatgtgccatggatgatataagattgaacagaaaccatttaattttatcttttaccaaaaagaaaataacttttaaacagaaaaagacataaatacccttcaagtgctttcacactctcttctcgaacaatgaacacagagaaagagagagagagaagacacttagtaaagaaggtctgtgtgctgttctctccgaaattcctttttttggtctcgagggtttttcagactgtgaagagacatagctgtggcaaagatgagaggacctttaggagcagtgattggaagatatacttcaagtgatgggagtgctccaaatgatgggatcatcaagcacaatagaaagtgcagagatattacgtttctcatcatcttcattgccttttgggtttcaatgattgtcaattccagctttggtttcaaccaaggcaacccattaaggtaatggtttttgctccaaatctctttggacaaacaaagcgtcctagaaccttaaatgttttgctaatcttgcttgattttaccttttattataccaaagtttgtacctttatatctgtattataaggttcctacttttcttctgcttggtgttctttagttaagagatttggtgtgaactcaatttatagaacatagttgtgctaatttgttcagtgaattgtgctgtgttaatcaaatatcgtttttgagtggtgatgtcttatatgaactgttattgcagactcacatatggattggactatgaagggaatgtgtgtggtagcaagcatcgtcaccgtgaccttactcaacttgagcttagatattggttaaaccctaaccaagtttatgaaagtggtttgaaagatggggaacttaaattggctaatgctagaactatttgtctcttggattgccctgcaccttctgatgatactctcaactgggtatgtgactatcctgacggcgagattcgtctcaagatgaatgattggatcgataggaactatgattattttgagtttcttactccagaaatgaggaattcctctcttcagcttcagggtccttgttaccctgtaatattccctagtgtgaatggtaagaggcacacaaagcttattcttattttctattctattgcttttttgtaacaaggtttgttcttttgattctttagtttattggagctgccaatatattgctcgtgcttcaaattcatccttacgccactggcagcagatgggtggtgttaatattcaagaggacatgatcatagacaaatcaattagaaggtcaatgaactctcgtgcctcagttctaaaggttagaaggatcctcttctctattgacatgtaaacatttctttgtaaagtgatgatttttgaagaatgctctaagcttttttgttggttgtcaatcgtagcgttatgtggctgatattgggaagtcatggccagtattgatcgtttgtggaggccttgttccactgtttctatccattatttggctgcttcttattcgacattttgttgccgccatgccctggataactgttgtccttttcaacatgctcttaatatcagtcacagtgttctattacctgaaaggttggttaggaaatcatatttctattgtatgtctctatgtttcaagtcatatggactcaatatacttattacacttttatatcttttgtagctggatggattgggaatgatgctgtaacacctattattggtgagcatgacccatactttcatgtgtatggtcgagtaagtttacattctcagccttaagctgctttcacattcactaaattatgagaccattagtcccattttcttccaagcttatttacatttgctgcttattcctcaggaactgactcatgttcgtggagttgccattctgatgacttttatctctgttgttgctattctcacttcaattgccattatccgccgaattctcatggcaacatcagtcctcaaggcgagtattactttcttagtcacttggtgaccagtttggtttatgctagaaaggtcattttgctgtatacttgtgaaatccaggtagctgctaaagtaattggagaagttcaagcgcttattatattcccggctataccgttcgcgatgctagcaatattctatatgttctggatatcagcggctctccatctcttcagttctggtcaagttgttcagaacaactgcaacaacactaactgctgtgcgtatgatctcgtgttaaagaaagttaattgtgaccgttgttgcggttatagcatacattacacccctcacatcaccattgctatattcttccacctgtttggttgctattgggctacacagttcttcattgcatcttctgcgacagtgattgctggctctgttgcctcctattattgggctcaaggggaagcatcggtaagctaaacaattctgagcaaatatatgaaactgtagattattattatgtgttgattctggttttatggttgaacaattcagccagagataccgtttcttcctgttttcgcatcaatgaagcggcttgcacgctacaacctaggatccgtggctcttggttcactcattgtctcttttgttgagtctgttcggttcattctcgaagcaattcgtcgtaaaacaaaagtaagcgggaccatacctgatcactggttttggagaatggctcattacacttcacgtggttgtctcaaaagtgtggagtggaccatcaaatcggttaaccgtaatgcctacataatggtaacagaaaatctccttcttttagatcccattctttgaaccatttcttgatagattgtctgtctctcggtctcttttcagattgctataacagggaaaagcttctgcaaatcgtctgcaatcgcgacagagctgatcataagcaacattctgaggatagggaaagttaatgtgataggagatgttatattgtttctaggaaagctttgtgtgagtctcttcagtgctctctttggcttcttgatgttggattcgcaccgatatcgtgcttctcacaacaaagtctcatccccgctattacctgttttggtaaaatccttttccttgctctctagactcaattgtaaatacaaagacagatgtttttttttttagcttaaataggtttgcttgcttgtgactctctctatgcacaggcatgttgggcattggggtatattgtggcaacacttttctttgcggtggttgagatgtcgatagacaccatcattctctccttctgtcaagactcagaggagaatcaagggaatgctcagcacgcaccacctcttctgcttgaaactttagatagcaatcaggaggaagaggttcagagtcttactcactgatagatccatactgtataagttttgtttcttctttggttggccggtttatatggttttttaaaatagaatcttttatctctacaacattctaagcatattgtaatgtcagatggcttgataattcttcgattccgaaaccaaaaatcatatttccgcaaaatgcatctttgtttggttacataacaaatcataatgctttaaacgttgcaaccaatttctaatagaatgaagcaaaagaataaaccaatggttcttatttcttggcaaaactcaatttcttggggtcaatctcatcaacccgaatcattatcacgaggccgccatcttcttcagtccaaggaatggattctccctccagcagctttacgatatgctaagaaaacaatataaatagaagcaatttcaagctctgttcagagatgaagacttcaagttctttgaagagatgaaaacagatgagtaaagatgggacctttcgtttgctcttgaaatcttccttcttctcacccaattggactctgaggtacttgaaagctaaatcacaaatagaatacaaactcatcaaacagattagatttgtttctgatagaacaaaaaaggtttaaaaagagggatttaaaactttacatgaaatgccagagaagtaaataagttggcgcttgagaagacgaagagcttcttttgcttcgtgttcattcatatttactgtcactacctcgtcttcctcgtaagttgaatcatcttcttgactataagaatggtttaaaaaaaaattcaactcttcctgccaatggagcatacagaagaaaatgacaatagaggactgataataaatggattgagaaattcactgacttgacgtcaatcatctttgctacagatttgtcatctgcttctcgagctttttgtccaaaaaagtgtccctatatttcatggaagatatcatatagttgttacatagaagacaagaaagacactgatcactttcaaccaaaaatttctttccaaattgtaccttctccacgagtctgtgtgctcgctcggtttctcctttggagaatgcttctgcagcctgtcaaaaaggaagaggttttagttatgcaaccatcacatcatgacaatcatatagccattacaaacatataaaggtatatcgggcaattatctcaaagacttacagctccataatattctttcatctgattcaaatgctcgcgtactgctttacgatgtgccttaaattcattttcatcgtcatctatcacaggagaaaaatgatagttgagcaaacgcttgaggaacaaaagaataaactcaaataaacgtgtatgtaagactacggcatggttaccttctttagatgtattggacgattgtttcacagcaactactctctcttgaaaagggtcttccagaggtttaaaaacaggacgaccagcaactccaggtctcctttctccaaaatgtcgagttacttttggtttgtccacatatctttccgcacctgagaacaaagcttctaaaacttccttttcaagaccattcttagcattacgcccttcctgtgaacctgtaaaggttcttgctccaacactgcatcatcacaaaaagcaatttgaagaggaaaaaaaatcaaaaggattgcaaagggaaagtttcggtacaaagattgactaggaaaaacgtgcctctgagaaattttttgtagttccatttggttgcaggatgtagattgtctttgaggatcaacttttgacatctatatagaaagggaaacaaagcaacagagtcagatttagaagaagacgctattctataacaaagaccaaactgaaagtcataataaaagctcacaacttcattggaaattccaacatcagcatatttcttggtatcagaaaagtcaagcagtttctccgtactctgcaatataatgaagaatatagtgtagatgccaaaagaagaagttgtaacaaaagcaggatcaaatgaaatactcacaagagccatatgccaagagttatagagataccactaacaatcaagtgatcaaaattagaggcgacagtcggtatgaaaagtcaactttatctcaaattttagtcagcagtagtaccaagacagagaaaaggattgtcaaagtggctcaagggtataattgtaattattgttaaagtagctcaaataaagagtgatgcaactataaaggtcacaggtcataattaagcggtggtcatcttgatgagcttcaacgtatggggctatataatataactcagccaggaaaaagtaaaacatttaaaatattttagaaaaagaaagaaaatgaaggcatatgggaaagcaaaacgctgttaaagaaacaaaatacattatttttcagagctaaaggcatcgggttaccttcttcacatcatatccgcatacgcctgatagtttagtggaaaagcagattaagtttagcagctaaggtcgccaataccaccattaaagaagaaaaatatgtaaagcagaatcaaggaaagctagagaatgcttaccaagaacctggtgaatgacttcttggctagcttgaaaaccttctccaagcatcttaacaataaattcctcaacatcagttggagccctgcttatctttccctcgttactttttcgcatttcttcactccatatctcagtttctggaatatcccttgagtttatcttcaatggtttagttgcttctttgggagcatttgatataggcctggttctagcatactccttaccaataacacttgaaacagtaccatttgatatagaatttctcttcggcctccatactttcgctttgctatcctcttgtcgtggaacttccttaggaacatagacctgagttggttttgaggttgctgtcttcatttcaacttggtcacattgaggcgtcttttcagccattgcagagagaatctcaccagctacatcgacattctggctagcttggcagtaagcagcggcaatgtcatcaagagaaaaacgagaaccaaaagtatcgagaagcacttgtaagcttcttgaatcaggatcactattcgaagagcttgcaatctttgacattcctcccactaattcacagtgcaaaacaaatggcttggttaacaacagtagctatgcaaaatgtagaatgctgaatgattaaaatgttccctacattacaaccaaaatgttatgcatttgaagctgcaaaaaaagctagtttcaatcatcttcctaataaccatcactgactacgaaactaaagcagaacatggcttgtaatcatgatactactctcggtcaaaatttcaatgctctacccaaaattgcatataacaaacacctggcaggcattatatctccgatctaagtagataaatggaactgctcaattatctctacacaagccaatcaatgatcgtttctgagagttctaaagtaatacaagtgaagcaaatcaatggcaaagtgaaaagtccaagaacacctttttactcggtatcgataatcacaacgcaattagggaaacgcattatcaaaacgaagaatgtgaaaccttgagaatcagactaaagaagaaagaatctttctaaaagagccaactcgaactcgtttggaaaccgcattacaccacaaagaaatccatttccaacaatcagcaatgcaagacgcaaaagagtagagacggagatagtgtaagagtacacttaccaaaaaagcccgaagcaaaagacgccggaatcgagaatcggaatattaggtatttcgattgcaaaagatcgaatcttgtaaaatcgaaacggagaagaagaggacaaagtagagaattggttaagcagggaaatacattcggtgcatgagacgagaggagaaggaagtaaagtttctataggctttgctgcgaaaagcaagcgcctttgcttcctccaaattttatagggaagacagtgacaaattcttgttatttataaaaaaaccaaatttgaaaatcgaagagccaaattgcaaaataaatttaacatttttttatcggatgttacaaaaataaattagatatccacataacatgtgcgaatgttattgataattttgtattaatcaacaaaaaatacatgtcgggaaagaaaaaaaagtgtttcatttattgttatgaaccctttataagttatgtattaccaaaatagcactcattgttttaaaattacaaattagtccgttcttttattcccgtactcgttccttcttcttcttcttcctctcatcgtcattttctcgattctcactcttccggtcaccgactaattctggttagctcacattccttatgctcattcatccacagttccctaattaacgctacgaattttgtttctcctcttatttcttctttcctcttgtagaataaggtttatcaaaagaataagaataaggtttatctcttaaatctccgataattagcagagttttttcaggattgagtttgatttgctgttttggaatcataaattttgcgttttagtggataaaaagctagctttgaaagagttattgcagagaaaaaaaatgggatcgagagggattatcaacgataagtggtcaatgaggattctatggggttgtgctatcggaagtgctattggtatgattgatccatctttcccacattttcatcttagagactatggtttttgttactcaaattcatgagctttttgtttgtatgggacactttctttaacccataattgtttaggtttatacatggttgctgtagagagacaaactcagaacagggctcgtgctatggctgagagtttgagagctgctgaatcacaaggtgatggtgataatgtctaatatctaccaagtagtgctcagttgaatactctcagttgagtttttttttttggtgtttgtttttgttataatgacttcttctgccaagatggtgttgatgtagtttcttttttgcaaataatcgtaataaggtttcgaaacttggagagttgaagttgctgaacatacgatttgtgttatcgcaaaaaaagttatttcttatgcctgtcatgctatgtttgtgaattcgatttttaatgcgtattttcagcaaggcgtcttgcgtttaggggatgtgttttctattaagtaaaagtcttccttcctataaaagcatgagggatcattttatcaggaatgtacagcaggatcaacttattacatagaaataatggctcagggacaccaaggcttatgctttgggtttatcttcttactatgcttcttcagctctacttttgcactcaggattcttaaggacctccctatgatggagccaagaaagctagatctgaaccatgaaatgatgcctgggatggttatgctacagccagatcatgaggtccaacctgagcacacggtcaagcctggccatacactccagtccatgtccggtgtatcagaacatccagagcacacggttaagcctggccatacactccagtccatgtccggtgcattagaacatcctgagcacaaggaaaagcctgaccataaactccagtctatgttgggagaacatcctgagcacaaggaaaagcctgaccataaactccagtctatgttgggagaacatcctgagcacaaggaaaagcctgaccataaactccagtctatgttgggagaacatcctgagcacaaggaaaagcctgaccataaactccagtccatgtctggtgaatcaaaacatcctgagcacaaagtcaagcctgatcagataatgcagaccatggcgagtgaactggaagaggaagatcctgaccacacaagtaagcctatggggtatggtgtaggtaggggctatggaagtggtgggtctggtgttggctatggcgttggaattggctctagtggaggcagtggctttggagaaggtattggctctagtggaggcaacggctttggagaaggaattggctctagtggaggcagcggctttggagaaggaattggctctagtggaggcagcggctttggtgaaggaattggttctggtggtggtacaggtattggcattggagaaggaataggatccgggtctgcccaacccaattgcggccctgtcacgggagctccaggtagcggattcggtgaaggcataggacaaggtagtggtccaggggaagggattggtatcggtataggacagggtggacctagtgtagtagtcccaggcacaagaatccctccgatagtggttccaggcgcacagattcccggttttgtgattccaggtatcacagttcctggctacggtactggatgccaaacaggtggctgcaatccgaacccaccacactactatatcccaccaagctgtccccattgtccacctttcacatcaggacaagacaaacacatgtcagacaaaggagccatgaccgaagctcttgcacccacttcaccggagatacatgtttaagctttaagagtccatgaaacaccagtctaataaatcactcataatgaaatctattttggtttataaaagcttcacagaaagttgaataatacaactttcttgctcaagtaaaaagatatataagggaaatgcatataagaataagtgagaagtactcagagacagaaaaagattgattaagaattaggcagctggtaattgcatttccatggctgtgtatctgtatgactgacaaatgagtttaaatagaccggtccacaaatcaagttaagctctctactttaatggaaaatacgaactttagcttatataatttcttaatttgaaatgacataaaaagaggtgaatttttcttaaagcattaaactttccgaaaggagagtggtggcactgtaataacgacggagaagaacgaacgaacgcgagagatcgagagagagagaaatatttaatggatcggattctgaaagcagctcgaacatctggttcgctgaatctttccaatcgttctctcaagtaagatccattttttagtcttctttggatttcagatttttgtgggattagattgttttagtttttcgaattgtgttagaaatgtgaatcatctatcatcttttgatcggggctcagtaagttttcgtcttttctaaattatcattgaatcttcgatgttagaagttttgatcctattacctggtcacgagatctcattgtatatgagctgcaaagtctttgtttacacgactgtttatattgatttgagattcaattttcagggatgtacctactgaggtatatcaatgtttggaaacgaccggagaaggagaaaactggtgggaggtgatcaaaatgttccatcttttgaatccttttctaatgcattgttctgtgatcaagtttcctaaatggataaatttccccatttggcaggctgttgatttgcagaagttgattttggctcataatgacattgaggttttaagagaagatctgaagaaccttgcctgtttggttgtgctaaatgtcagtcacaataaactctctcaacttccagcagctattggggagtaagtatttctggatctttgtatttgtgttccactctgttcagcttggtaatctccaaatgtttgttctcttaaacccatttgtaggcttactgcgatgaagtctttggatgtgtcctttaactcaatatcagaacttcctgagcaaattggttcagcaatttctcttgtcaagtaggttatctccatcctgtcataaaattctgtggtttgacttagattagggcatcggactcattgattaaactcctcgtgattgtttcaggcttgactgttcaagcaatcggcttaaagaattgccagattctattgggagatgtttagacttatccgatttaaaggttgttcgatgttcttccttctggttcagttgatttttgtttactttttctttcatgggaatgactgtgcttattgttatccacaggccacaaataatcaaatttccagtttgccagaagacatggtgaactgttcgaaattatctaaactggatgtggaggtattattgtagatttcttcctagagtctaaagtgattacttggcaattatctttttcttctttcactatcttccaagtgcagtatgaagatgatttaccgatgtaaacctattgcagggaaacaagctcacagctctctctgagaaccacatagcatcatggaccatgcttgcagaacttaatgcatgtaatgatattcaacttttcttttgtgtttcttacatgttgaaagattctgggacacattttaatatcttttcactctgcaggtaagaatatgctgggtgttctgccacaaaacatcggaagtctttcgcgtcttatccggcttgaccttcatcagaacagtaagtgtaaactgagaagataatatttctgccataccttttgctccagtaatagtcaaacttgattctcatatgtagttgctgaattgttttcgtatttgattcacgcagaaatttcgtctgttccaccatcaataggcggttgctcctctcttgtggagttctatttggggtcattctctactacgttttatccagaaatattttcttggaatcacatggaatcttgttagagactttcacttctgacattcttctttctgtacttaattccagaataaactcactatcaacattaccagcagagattggagatctatcacgtctaggaacattggatcttcgttctaatcaggtattgtgctcatttctttgatggatattgttttctgacaatctatatatattttcgaaacctttatctattgacagtcactttctaatcaatggtctacacacttgtgctttctccgaattttcagctcaaggaatatccagttggggcatgtaaattgaagctctcgtacctagatctttcaaataattccttgacaggattgcatcctgagctcggtatggttagcaaacagcactaagcatttctgcatcccctgcttgctaataaatttacatatgacttcataagaatagttattagcataaaactcatgtcctcacatttttaggaaacatgactactctgagaaagcttgtgcttgttggcaatcctttgagaacccttagaaggtttccttttactccgtctctgtcttgtttcttgattgcctagtcttaaatagattgatacttgaagaggcgaataattctcttttgttttttttgctctccagctcattagtaaatggtcctacagctgctctattgaagtatcttaggagccgcctttctaatagtgaaggtactttggtccaacttccctctttgtctctcatctaagtggtcatggctaactgtaaaaggtttgcaattatagaaacaagtgcaagcactccaacaaaggaaaatgtgattgcttcagcagctcgtatgtccatttcttcaaaggtaagtgaaccacagatctgagcaccatcctgttaagaattcaatgttcttaatagaaactagaagttattatcttaattgattgcacaaaactcaggaactttctctggaaggtctcaacttgagtgatgtcccttcagaagtttgggaatctggtgagatcacgaaagttaatctttctaagaactctatcgaggaattgcctgctcaactttctacatctgtttcccttcaggtaataggtttaccatacatcttctttctatatataaagaaagatactacagttgcctttgctacataaaatctgccaattactgtcatgaatttcatagtatctttgtaattgcagacattaattttgtcaaggaacaaaattaaagattggccaggtgcaatcttgaaatcacttcccaatcttatgtgcttgaagctggataataatcccctgaatcaggtatggtgatgttcaaagagaataaagagttgcttatagcttccaccaagagctaatgcatcacattttttttatgttctcgtaagattccactggatgggttccaagtagtctctgggcttcagattctagacctaagtgttaatgcagtttccttcagagagcatcctaagttttgccacttgccacaactgcgagagctttatttgaggttggttatgatactttatattattcattgtcactatacactgttttaagataccgtataccttatacctcacttgacagtcgaatccagctatctgaagtccctgaagatatcctcaacttatctaacctgattattcttgacttgaaccagaattcacttcaatcgattcccaaggtaatatagctttatattctactttctggtttttactatagaattgctgctgaatctgtggtttgaatttagtgtaacctggcatcaatcagctaatcaactaaagtctccatgtaatgttattatattggatctgttttccccatgcagggtatcaagaacatgacttcactcaaacatctagacatatccaacaacaacatttcaagtcttcctccagaactggtaagtctctgttgctttttttaactgaaacatatacatgtaaaatgtttagtaacaagtcatgtgttgttccttagggtttgcttgagcctacacttgaggttctacgacttgacgggaacccattaagaaggtataaatgataaacactgatacattaataaacacaagaactttccagatcgattgattttctttttcaccaacgttcttaaaacagtatcaggaggccaattctagaaagaggaacaaaagctgtgttgaactacctgaaagacagacttccagatcagtagcttctacaacattaacatcaacacctatgttgttgtttgtaagatttgtgtgaacaccagattgattttattgatgagaaatgcgtgtgtcccttgtctaagatattttcacttttgttggtgtgtaatccagtacgtctggttctgtgatatgtactacaagtctataaactccaatggcctcaacaggagaatttttttgtaacaaattggtttcttctttttgtttctgcatttttcattgtcgaatgctaatttataacttaaactttaagaatcttttgaagtttggcaataagcaagtccaaaaaaatcttttaacatgaaatgagaattatcattcctaatcatttaaaaaaatttgtaacctttctacacatacccataactcagctctccaatgacttaaacaagggaaaaactattacaaattgtttgtttttgtttctccatcatcattgtctaatgctgctaatctaaacttaagaatcttgtggagttttgcaacaggttcaattatcttcttatgtggcatctggttttcacttgctgaaacttcttctgcaaaaccaaaataaaagtaaagaaacctcaaaaatcagcttcagtaaaaacatcaagggacaaaagaagtacgtgaaccaataaagatgaaaagtgaaactaacccttttcagagaaagcaaggcatgtaccaatcgtttcaatatattctccaacctgagagatcatcaaatctaacacgattaagaatggtttaagcaaaagagttactcaaactcaagttatagaaaactcaccagcttgattttgccatcaatggtcaacaccggattcaaagtatccaaaccctgagaaataataaacaaaagtcaaaacaaaaccaatgcaaagagtttaactaaagaatatggatttgaactaactgataaagtataaggagcatctgatggaatctcaatgtgccttgaaacttcatcaagatcaatcataacaaattcctcctccatctatctatctctatcttttccgttgaatctttcgagaaaatacgaaaaccttaagtgatggaaactgaagaacaagcctgattaagagtaagaggaagatgaagattcgtgtcaatcgattctctgcttcttcttcttcttcttcgtctgtctaaaaattgctctgttacgagagactcacttttgggcccattactataacctaaagcccaaaatatggagggccgattcttcatcttctcacttctttttcttccacgtgtcaagcacggaaactacatccaatctcagaccgtaaaactaaaccggaggattttgtgaagccggagaaccggaaatagttatgcaaataaccaagttaccaatttaatttgaacataaaccaagcaaaagtagtggtgaagcagaaaacacataaaactctcagctaaagcaataaaacagagtacattcaagagccgacgactaagtaagcctcaaaagattctgcaaacagagaggaacaatcgccacgaaagaagcttaagaggcaagatattgaattttcccctaattttctattcgtcctcacacgtctttcaccattctcttatataaaaaagttctttttagactttttggtttcatttgtttagtgggcaaccaaaaagtcaagaccttttgctttccaggtaaggatctatcaccactaacctcttttcttcttctcgattcctcgttccctattttcgatttcaattgtacgtttttcaatcgaaagttttctcctttttgagggatttgtttagtttgattgattgtggattgttctgttcttcgttgcagttcgaagaatctggcgtgttcaggtggattgattcttgcgatctgacccttctcatgattagtttccgatcttcgaatagaccaactgcgagattctcatctataactccgttttcctattcgatttcttatctctttctaccatccaacgtgttcttcatacattacttcaattgctctcgatttcgcctcaaaatctgatcctctagtagcttgaagcaacccaaagtctcgtcctttacgttcaattaggtcattttgaaaccctgttcttagaattaggaagggaagaaatggctgatcgaaactgtttgatttcgttcgaggatcttccttctcatttgatcttggaggtgttgacctctgggaggcttagtgcggttgatctacttagcttggaattgacttctaaggttttcggagggagccatggattctatcctttgaaattcagatcattagctgattatgcggcgtctcagctttgctctatgcaccctgtctacgtgggaatgggtttgactacacagaaagagctctttgccaattgtgagggaaactggaagcggctttttagtttcttgcagtcagttgagcaatcctcagatatggttgaaacctctcaaggcaaagtatgctttctgtcatttcatatagtcagtagttttaggtagttcagtgaagttgctatggagaaagttgattcttggttaatttggtttagaagtctcagatgcatttcttttattttttctgcagatgcaaattgcaacaggaaagtatcacactttgctaatcaacaactcaaaggtttattcttgtggtgtaagtttgtccggtgttcttgctcatggctctgaaactactcagtgtgtagcatttacacctatagagtttccgttccctgctcaagtggctcaagtctcagccacacagaaccattctgctttcgtattgcaatctggacaggttggtagcttctgtttcacttaaaacctatcctgtgagtatattgtcgtttgccataatcactcatatttgaaatccggcacaggttctcacttgtggggataattcatcgcattgctgtggtcatttagatactagccgtccaatatttaggcctaagcttgttgaggctttgaaggggactccttgtaagcaggtagaattgataccaaccctatctagacctattgattttctaaattggttctatcaaacattgacaaacttatcttctataccaggtggctgctgggcttcactttactgtgtttctatcaagggaagggcatgcatatacttgtggatcaaatacacatgggcagcttggtcatggagataccttggacagaccagtacccaaagttgttgagtttcttaaaaccattggccctgtggtgcaaattgcagctggacccagctatgttttagctgtaacacaggatggctcggtttactcgtttggctctggttctaacttctgtcttggtcatggagagcaacaggacgagctccagccgcgtgttattcaggcttttaaaagaaaaggtattcacatactccgtgtctctgcaggcgatgagcacgccgtggcacttgattccaatggccgtgtaagttctttgtttctatctcgttctgtctccatttggtctcagaaaccaaaagaactcttgttttaataattctttcttgcaacttaggtctacacatggggtaaaggttactgtggtgctctaggccatggagacgaaaacgacaagatcactcctcaagttttggtcaatctcaacaattgccttgctgtccaggttagattcgtcccccatctgtaccatctcaatgtctgagataatgatccctttacaccttgttcctatattctctaagaccttcagcggtctctaagaactaataagtgatcagttcaattagaatcaaaacttagcacaagtattttagtttagaggattttcagtataacattcagtttatttttcggttttggtaaagaaaaccgaagctggatgtgttggcctttgtttgtatggagttttgctccgtttaggatcagttagtcagccctgatcatgactctgcttttacttgcaggtgtgtgcaagaaaaaggaagacttttgttttggtggaaggtggattactatatggatttgggtggatggggtttggaagccttgggttcccggacagaggagtttcagacaaagttcttaggccaagagtattggagtgtctgaaaccacaccgtgtctctcaagttagcaccggtttgtatcacaccattgtggtcactcaacgtggtcgcatttttgggtttggagataacgaaagagctcagcttggtcacgactcactccgtggctgcttagaacctaccgaaatctttctccattgtggccgttctcgtagccggctttgttgatccaaggtatagataaacaaccatgtttgtatgaaccggattgagattggatttaccggttagtgtatcttgtattgatttgtatctgtttgatttcttcaagttgtgagagtaatagaagatatttccagacaccttagtgcagagaattatgacatgagttaattaatctaagaagttttacaacttcaactacataataacaaataccttaactcttggtgatagtagatccactcaagacttagcaaaatatcttagtctttagaacattatagaatgtaaaagtaaaaaactgaaaacaacctagaagcaaatgaaggaatcattgtaacgaccaagatgcaaaagaataataaatcactcaacatcgatctcatcatcttcaggaaacatgtgtgcaacaacttcaatctttacttttatcttctccaatttctccagaggtgaattcaatatgctttgaatttcttcagcaaatgttttcatgatccctagatacggaggaacaccaacatcattgaggatttcgtagattgtggctttgatttgttcttcatcttgaccaatgaactcgtctcgaccatatctttgaagttgatttgtagtccttgttttaaccttactggacatgtagtcagattctccatcactatttggctcaggcacttttgtgtagacaacttcaaaatcaaacaaaaaagtctgacgatcttgagttgtttctttcgaataatagattggcgtcaccatacatgtactatccgatacatcatccacaatacactccataatctctatgcaatgatgggaaaaaaagaagttaagagagagttaggtttttcaagctatgagagtgtataaaaaatatttgtgtgaaaggaaaattgtaaccaggaatgagtaattgttgggattgaatacgagattttaggaaatagttacaataggaattcttcattaaattagattgatcataactacaaaagttaacattcatacatatcgttaaggttcgatgaaccataaatagatattccgatatttaaaatatcttatatgattgtattaataaaatatctcatatattcaaaatcatatttcacttaactatttcgctgtcaaaaaatatcctaccacttttccaacatgacaaaaaaaaaacatactacttttctatcgtggcacgtttaaaaaatcatatcattccaaaaagatttactcgtcagattaaatatctaatcatcattggattcacaatttgtttatttacctaccagacactttaaaaaaaaagattaactacagaataattttgtctaaaaagaaacggataagaacacgtaagacatgtcagtcttatcttaaaatccaagtcagcatctcgtgtaataataatctcgtacctttataaaacccctcattgtcttcaacaaaaacataacacatttcaagcattggattaatcaaagacaaagaaaacgaaaatgttggcaatatttcagaaagcttttgctcacccaccggaagaactcaacagtccggcttctcatttctccggcaaaactcctaaacttcccggcgaaactctctccgacttcctctctcatcaccaaaacaatgctttctctatgaacttcggcgactccgccgtcttagcttacgctcgccaagaaacctctcttcgtcaaaggtatatactaatatacataaaacacatatatacaagtcaaatctctaaatccaattcatagattcataatggttttgttgttttgctcaggttgttctgtggactagatgggatctactgtatgtttctagggagattgaataatctctgtacattgaatcgacaatacggtttatctgggaagaactcaaacgaggcaatgtttgtgatcgaagcttatcgaacacttcgtgatcgtggtccttacccagcagatcaagttcttagaggtcttgagggaagcttcgctttcgttgtctacgatactcaaacttcctctgttttctcagctctgagttctgatggaggagagagtctttactggggaatttctggagacggatctgttgtaatgtctgatgatattcagatcataaagcaaggctgtgctaaatcgtttgctcctttccctaatggtaaaccaaaacttaagtttttcattagccctataaagaaagaaacatacttttgagtttagatcttgatgtgtgttttgtgtttttgttattgcaggatgtatgtttcatagtgagacagggcttaagagctttgaccatccgactaatatgatgaaggcaatgccgaggattgatagtgaaggtgttctttgtggagctagtttcaaagttgatgcttgttctaagatcaatagtatccctagaagaggaagtgaagctaactgggcgctggctaattctcgttgattttgcttctagtttcgttaactcttgcttctttgttgcgttttctttttatgtactcttgtttatgtaaatatagccttatgaagacgataaagaaataaaattgatttgcttcttcgtgacatagcagtctttacttagacaactgtgtgataaattcgcaatctcactctttgatagataagagggagggaagaaagcagtggtaaagacaaaactgtgttgattttgtgaatttagaagtttacaatagcaaaaaagaaactttggtcgacttttatcattcatcgttccacatgtctgtaaattcatcaggctccaatgggtttgagagttcatgcatctttcttcttgtttttgcctttattttcttagcaaatttcccagctttatttcttttctccaaagctcgaatctaaaaggcaggaaattggaatatatgagaactctgacagataatcatatatagcaatgtgatctatcaagttgcttatagaagaaccaagtacctggtttggagatacatagaatgggttctcgtaaagcgttgtacctccaaagctgcctccaaatatcttaattggatttaaacaaaaccttggaccaacctgtcatcaggtttttacttcaatcaacaactaattcttcagaaattatgtaagttagtgttagtatatatatagtcatggcctgacctcaataagagtcattttatccagatcgcctcgtgcaatcttgtctgactcgttatgaggtaccgatatctgcaatggaagccttggctagttaaacgaaacgtttccaaactgaaatgaaatgagagcatgagagatgctaaaatttcaacttacctggtaattacggaaccatatatggtcatcaacaatggagaaaacaaacacatggtcatggtaaggtttagacttcctatgtccctcgggaattccaaaaatctgtaagcaaaaaaacaaaacttaaaagttgaagatataaaccaaactaaccgcgactacaaaaggatcgtccacaattcaaaagtgagaatgagacctgagttaacatctctttcagaagtttccagtgtgcatcgttttcaaaattggatgagaatgtcaaaagtgggcgtgaacctttcagatgatttccagtgagtttcagctcctccattgtgtgaacttcaccatacagaaatttacagaaacactactcagagacgatacaaattgataaactcatcattacccaaagtattattatatccatcagtcacttattttgaaaccaaataagaggagctggagacaaattaccagcattaaccaagaacttaacggaaggtccaccaggggacttcaccatccacatgtaaagatctttgtgcttcctacactgaagacgaacacaaacaaacacgtactaacttcagtttctgggaagaaatcaagaatacattgactttgcagtttaatactctacagacatgctgaaatcaagtaaatccagacatgctgacatttaaaacagagagactagagagcccaatttgaaccagacaaaagagaattcaatctgtaatgctctttgtttctatcatcaatggtacgaaagttttaccaagttacatttcataccaaataggtaaatacatggaaaaagaaattaagaagattgatacgaatatgattaccaaaccccttacgaagagcagaccatagaacagtaactggttctggaattaaggtagccaaaaaaaagattgaaactttacctcgaaaaacaaacaggaagaagagcccttaagctcgatgagctcattaagagtggcacctctactgctcttagcttctaccttactatccttcttacagtgaggtaaaagtgacaccatgttcaacatcaaatgtcgataccttccaacgaattaacaaagttactccatgattcataaccattaaaccgaatcaaacccaatgtaaatttcaacaccattcacctgaaattgatccgacgggaacaagtaacgagaaccttctctttattcctgaatacagacgcatacgcaggtttagagttctcagcatcttccttcttatctttccaacccaaaagagtcctttgaggtctctccggagcagaatccttcaccggtgccgccgtaacagtctcgctgtgctttctcttcctccccattttttgtgtctattgaagaagaaacaacgctaaattctctgatttagggttttagtacaaaactcaacaacctaaagaaagagacaagctgctttaactaaaaatgtcacaacgaaaacgacaacgtttctcacttttatacaaggaatttcaatgggccggatcaagcttacatgggccttaatgacacgcaaaagaaactacattgcaaaagaattttccttttttggtttctctctttctatttccaatcaataaacatatctctctgttcgtgtgtctgtaactctacaatgatctgtatagtttctttctctctttttttctctccattttcctggaaacaaatctgtaacaaagaagaataggaacaaaaaaaagctcagctaacaataatacaaacctcactcgatttttcttcaccactctgtacagtttttatcaaatccgaatgggcaaaccaaagttctgaaacgttcgtatctctcctctgagacctgcagtgacaatcaccattccccaagaagccgatacattccctgagtttccatttgacgacgacatatccgtactcagacgattcccacttctgttccttgcaaacaacagtttctcttcaggccaagtcgctgacattctatcgaaaaagtatccgtttgttgcgctcgatatgatcccattccgtggactgtttaatcgctccacagtccccagctggtctaccggtgtaggcggatggttagctgtggagatattgtccaagttattggtgcttccgttaaaccccgctctgttttgggttccccagttttctgttgaggccattccaggccatgagatggctgcagagacgtcttggctatggaaatgctcgtaagagtttgtgactgtcacgttcttgttgttgttacttctgcttggtcgagaagcaggggattcgtacttccatatgtacacgtgtgaatcctcgcttgctgaaactacgtatttcccatctgctgtgattgaggcagagatctggctgctcgtatttcgaaaccctatcaaatgaaatgaaaacagaaaagatcgatactttggctcgtaaacagaagacaaagcttgaaacttcaaaaggcgattgtttgtctgtttacctttaagtttgttaactagatcagttccatcaacaacacggatccttgaatcggaagatgtgacaagcacttcagatgagctcccaggaacaaactaaaatatgaaatgagacaaagcaaggaacttttagagccatcaagaacaacgcgttttgtttcaccggatattgctcctaaacaagtgattttcgttacctggaaaccagttatctttttttgatgagctttcttcttcttgttctgtaaatttatctggcttttctgttgcagcttgttatctgaaaaaataattatcacttagtgtcgaaacataagaaatagcagaaagaaaaccaatatcaaatcccaacaagaacttcatcagtacctgatgcactgtacatccgacagctacctttgtatgaaccaaccaacacacccttcaagtttaaacagaaattctttagaaagttaggaaactcttttaaggattcttcatgagatgccaaaaaactggacttcagatcataacttggcagatttcagtgtacctgaccatctggagtgtagcaagcagaagtgaccatctcatgaagatcataccagtcaactacttgacgatctggaatgctccagacgcgaacttttgcatctaaggatccactgatgaagtatctatcatcaaccggattaaattgaatgcaagtcactgttccaatcaataatcaaaacacacattgttaatttgataagtaccaaaagacggaacaattaaaagcagttggcgcagaacctactaaccgtaatcactgtgcgaaaatactttcaagcaagtctggctggacaaattccacaaacgaactgttttatccattgatgaagagagcaaatgctgaggaaacaaataatagaaagcttgtttactcataaatcttctctaccattcaatttcttccaaatagtaccaaggaaataaagtgactaactaacctgagacttggaccaagcaaggtcaagtacatcatccacatgtccctgaaaggaacaaaagggcttttccgaaagcccgaaaagagaatctggaacaaatatgttctctaaactcaatgactttctacttatagaagttctccctcttctccttggtgacatagtagtcggttctggagacccattagtagccaaaagcaacagttccggtctatcaagtaacaactcacccttcttctcagcctcaacgacttgccagatgtgaatgatgcaatcctcaccagcactagcaagatatttaccatccaaactaaacttaatgctccaaatagaaccattatgcgcttgaatctcctgcgttttgtacaatgccgtgagctctttagatgatttcccatactgtctaaccctaactctttccggcccatgaaaagaagattcctgagaatcatcagtagcagagctcgacctccgaccacctctctctgacgatgtatctctatcatcgctgcttcgtctctctttgctatgaccagtcatgctacttgcaacactcttaatactcttaaaccaacttcctttcttcttagacttggatgcattatccttattactattcccactgtcttcgttttccttagacgtgttcttatcagaatcctcaacgttctgtcttctcataagctcctgaacaatgggagaatgtccaacacacatctcaaactcctccatcgtcatctgtgttccagttcccacttccttcaccttcttccatgtaccatcttcttgaatctcattcaccacaaactctttcccattatcaagattcttaatagtacacacttccacttcctcattcactacactctctctcagtacacaatcagaatctccatttaaccgcaatgaatcagcactaactgatcctacactgcaattcacaaatggcgagctggttctactgatctctgaatgtgaagaatgatgaacagagagtttagagacggaacaagaacaaggattaccaggagacgtatatcgacggtcacgatcaccacattggctagtggtaatgtcggatttcgatctcacgatacaagaagcacaaccgccgacactttcagaacactctccatgatctcgccgagccaattgattacacgagatcgatcgagaaatctcgaagccggcggctccggtatctttggagctggaagaatctgaaacgggttttaaccgggagagaaccgggtcacggctaagacccatttcgtttaaaagcttggaacgcctctcagagacagaagcaggttcagaggtccaaacgtcgaacttcgaagctcccattggaaaccgaggaacagggaatgggtatcgacggcggcgaccaccaccgtagagttcttcagagtcatgagaagcggcggaggagatccgaggagaggattcggaatcgtaatcagagttagaagcggaacaagagcaagaagaggaagaagctaaacgatcaagagactcgtagaagcaatcgttggtgtctcctccttcctcttcttcctcgttttggtagctcatggtcgtagctgtgatgaagccagcgaagacattcccatcggaaaattccttcgccggtgaatttgatcaaacagaaacaaaacaaaaaaaacgcagactttataaagcaaattctataaatatatttggtttctcaagtcaaaaagattgaaactttttggggattttgtgatttgggggttttgtcgttgaaaaatccgaagaatgagattgtgggttttcgggaaaaagtcagatccgatgaagagcaaagagagagagatgagtttgggggttcgtagagatgtctgtgtagaagaaatcaatggagagagagagagagagagaacttttttttgtttcggtttttttttcttttgggttcagctctctgttttaatttttggtttgtggacctttgcactttgtaaggcgctgaaaaccaaagtttttcatccagaaattagatctttaaaagtattaaattattaatttttaattccgacaaaagagaaggtattatatatactattatatggttttaatttgattttgaaaatatatgatatgtatataggacaatcaataatgtaattgccatatgctttgattagtgtccattaaataaagaagggcgtgtatagcattatttaagttgatttattttcttgctaaaataaaatatttaccacaaaatagtatatagtatttatttacatatatattacaggaaatattatatataaaatacatcacaaactaatttcagtgatatttcataaaaccaaatttaaaagtttgaagttattatttaaaattgagtttaaatttatcataaatatttgccacggtttaaaggtacatagaacaacaagaataacactgttacttagtagtttctctaagattgaacaaatatgtgtacaagaaagaaaaaactggagaaaaaaatgtgagtactacatgtatatcaaaaactaaaccatcaatttaactcccaacatatcaaatcaaatcacataaaggtttaagaaagatgatgattaataaaatctacacatctttcgtttcaaaaggcccacaacaccaaaagaaattggaaataagaaccataagtaacgctcaaatctcaatcttttagtgattatacgaggttttattttgtttcaaaaacactataaaacttttgaaaaaaaaaaaaaagtggaaacaagatggagggaggagaaatgggcctgtaaggcccacaaagagtaaatgcagagaagaggacagctaatcagtaacacatgcctctcttccccttccctactctattttctcccgtcccaccgttatttacattacaacaccgtttcttctctctctctccgggaccattcttttttataccgattatgattagtatgctaatcaagagcattatgcaaaaacacttggcaaacgttaaaccaaacaaaaaaacaaaataaacatttgacaactaatgatataaccgaccactagtataaacatgtttaatacacaaagacatgaatatatcaaatcacgagactattatggatttaagttttttgatttgtttgtaagacatttcttggaagatctatatcaattcctggctttgtttaggttgttttggactagttggataaatatatgatataacgtggatcaaaaaccatatatactgtatacatcattcacttttgtaaccacaatattggcatatataatggtttacttgtatcttgttctatattaacaacgattggttaagactaaagttaactcgttagcgccggtttagattgtgtagtttagcttggagatggttgttaagctcgagagagcttgacatgaatgtagttacatagatttgattcctcgtgtcgtttagctctctatttctttacgtactaattatgttcttgaactcagtttgtatcagcgacatgtgaggtcgcatgcttaattaaatcatcaacataaaatgatttgttttgtcaacaaacaccaaatgatttgatgatatcacattagtaatagtttgaaatttgatgtgaaacatgtgaatgtttttatgtgataattcaaaagtttatttatgctaattcgtgcgaataaacccaagattgcattatgaagttttgtttggtagtagactctatacaccacagaggaatatctaaaatgaaagctaggaaatcgaaggaaaataaaatttataaatgagtgaaaatgaggtgacaataaatgaaaaagcaggatcttctatttccatataaaagtctctgagctctctttgcgccattatgttttttctttccctttttgctgtgtttgcattttctcttggtttaacgcatacatttacaacaatgtttcacgttatttagtaaccacaccttcaataaatcaattaaatggacaaagaggatataggtatgtcagaaagaattcgaagctttgaagagtgacataacattgcgaagttaaatgtttgagtctcgatggtgttgggctggttctgatggagtacaacattgatcgcaacacatgacacgagtgaaagcataattttgtgcagacataaataaaaccaaacgagatgataatataagaaaatgtgatctatagttgtttcatgtttgtggtgtttgtcgtctatatgtcatcatccaaattaaaacgtataatacatgttagtgacaaagtattacgagaaactaccgctggatatatgattaacctacaaactatgttttcaagacccttttaggtaaaatcaaggtcatatcgctaattttttcgttaacgtagatattttaataaaaaagaaaaaattaactatgactaattcatcccaacatctattaaaatctagtttattgcaaacttcaaatcaatcacaagcaccattctctgtcatacaacacataatggaaaccttatcatctatctataaaagtagattgtttaaaaaaaatatatatatatataaagatcaccaatgaatatttatttgaatttactaatctttttttccattgctcacaggagagaagttatatgaaaccaaaaaaaaaaaaaaaaaaagcaagaagaaaagtggaaagtgaaagtaatggtgaaaaggagtattcaagaaattcattagagtttgtataatttggagtttaaagtgaaaatatcgtcgggacaaaagctgaaaaacggtctgcgtttatgtcatatatttgttttttaaaaagcatattaaaacaatatattataattataaagagtgcaaataaaatggaaaaaaagagtatgatagggtgtcgccgtcggccgttgtcagtgtcttcagatcggccacgtccctctcctctccccattcctctctcttttgtcttttcttctatttcataatctttcatataataccggcaaatacatttatttagtgaaatatatatgacatttcgataattataatgaaaaaatgatacttggaaatattttctaagtacttatcatttgacaaaagaatcgtaattaccctagtgggttatatatattttctctaattaggactatgacatgagaataccacgttaggtttgtttcatgaatttgttagatcaaaaccgattatatattgtcaaaaaaatcgaacatatattgccattttataaattaaaatatataaatgaaaatcaactaggtttcgcagactaggtttgttttgttttcgtagcctaacaggttcaactattcgagtaacaaaattttaaaaaaaacaaacaagaaagatggggaaacaggtctttttatcaaagaaaaaacaacacatagctacatcttctacaagaaaaggaaaagacaagcaaaagtcaagtatcatatctaatgtaaataggtgtttaacttttataaattaaatgacattacaacattaaagatacacaaaccgttagaaattaaatggtctgaatcattctcacccaccaacctctagttagggctcgttggcataactttattcattcgtttaaacatactatataattaacattacacatttttattttttctcacggaacaattaatttagcatctttatatatttacaagaaaaatagataacgtatattgataatagaataactataaaaagtaaccagttttgaagtgatcatatgtttagataggttttcggtgttagcggaaattcaaaagctataataagttttaagataattttataaaatttcacaagttaacgatcattccaacatactgtatattactatgagtgataaacagtactcacaagtaccacaagtaaaaagactcgccatgtgagacaataacattttattcaatccaaaagtattttaatgaagttgttttgcttagttacaaaatgaatcacaaaagatgttacatgggttggatatgtcatccaaatattgtggaagtcactatacttgtgagaaattgaagctattcacaaatattgtcgacgtcactcgtaagtcgtcaactattaagtatctattctaacaagcgaagacaagtcttgaccaattgaaataatcacaatttatctttcttcttcttcttttttttttgtcatatattttttcttctttttcaacatcttcttacttatatctttattaaaatttctgagtttaaaaacttttatgcctttttagtcgttaaatgtgcagataattccctttatatgttgtattttcttgaggctaaagtagagtttgaccatatttttcgttgtcggggaaccccaaatcttgcaaagcaaacacttgagaattgagatagctttgtttatcctgtttggttagaaatagacgcacacgtctagctatgcttttatatagtatagtcaataattaattctttatgatataataattgtgattatgttacatttcgaatctaaaaagaatcatataaagtaagtaatcagaatgagaaaaagaaaaaaaaaacaaattaacagatgcatttaaaattgtttttctatctcaacaagtatcaggataacataagagttgtattaggagtcatattctcatctcttgttttgtctgaggattactctctacccgtcaattcgattaaaccatttcagtataaacctttaattatgactattattaaacaaattcagttacataaatgtatactatggcaagaaaactagtggcaaatcattaaactaataagtcagggtaatggttttttatattgtcgttaaaatttaattggagggtggtgcctactcaaatgcacgagaagacactaaagtagattttaatatgttacatttataataaaattaagagaaaagtacggatgaaaatgtgacttaaaagtatctgagatcaaacaaaggacaaaccggtgtgtgagcaatcattaagttttctctctggagatcgtctgaaatttaaatatatgctaatataaaatgaagcaaaaacgcaatttcccacatgcaaacatacgaaattagaatacgtgtaacgtgtgaatacatgcgattgtatacactatatatgcaatgtgttaatgtgaacgtgcaggcttaagtgttaaatttgtacttccgaacatggatagagtttagttataacaggatcttgtttttttctttttgagtgaaaagtgaaaaaattcattggcccattatgtaaataaacctgaaaagaatatttatttgtattttgcttatattatcggatataaaaatgttaataccctgacaatagtttgaaacaagtgttgttgtatttccgtattataatggaatgtcatgtgccataatgaacgcatgtgttgccaccaataatttcgtacttgaacacatatgttcataattatactatcatattgtgcttttgctgcttaaactccttaattactgtattggttttaatgtccccgtaggcctaaatgggccgaccattcaccatactatttagacagtttaccagtatttttcaatactgtatccaaggctggtctaacgttatcatagatctatgaacagtccaagtttatgtgatatttggtattttacgatgtttatgtacagcaacgaaatcgaatcaaagacttccgcctgcagcctgatatgggccctattcgtaggcatctgttactctttacaagttgggttcctgacaagtgctgccttcaaaatatggatgtatctgattatctgaaacattttatctgaaataatataaaacatactcattctttacttttcttcattttcagttgaactttaaaaaataaaaaccaaactaaaccggaaaaattcagttctagtttaatatcattcattgttcccaaatcaggcatgtcaacccaaaccaataaaacagtgatcacaacaaatcatggttttctattctttagtattcattcacacattacaacagagaacataacaatatacgaatcttagaatataacatatcagtgtttgcttaagagacaacataaaacctaaacatcctgataggataactaaacactggacaatactaaacaaacacaaaaagacaaattccaactcttgatgcttaaacgtttgcttgctgtggaagttgacatttttagtaggagggattctggtacgcatctctagcacgagagtagcaaacgtagtagaactgagagacaatggcggtgaagagtgtgaatgcagcaccagctgcaaaaactcctttccttataacttcacagcttggtggatcttcaactttccacatctttctatactgtgtgtggtacgcatttctgattgatgccgcaagcaaacacatctcagcgatcaagaaaaacaccctgcaacataaccatttttcgttgtttcaaatcaactgcttcgagaaaaacccaatccaaagactttataggatggatggatggttaccagcaaatgaggaagagaataatggcacaagctcttgaaccgccagggttaagagactttccacaacagaagcaacgactagcagccataataaggacttggcttacaaagagaagaacaaatgcaccagctccataacttgtagcaatgtcagtaccatacacacagtaatcatattgcttgtctctgtctgtttcaaccttgccctgtcaaaacaacgactccttcaagatatgaatcgtgtaaagaaaaacataagcagaaaccacatttcagatacatacaagatttggatttgatctaaacatataacttcttctttagctaaccacttgttccaatgtggatattcacaacacttatctagaatgtggaatttcaacaatacagtattactaagaaatttctatactcactacaatgttatgctctgcataaattctaggtcatgaatcgaaactatgcatttggatcttcaaattcaagtggaatctgacataacgttccaattgaatgctaactacagcttgatttttcaattcacaatacacttattgaacaggaaacaagattgtgaatcagatctgataaaacacttcaaaattcaaagatcgcacagatttagagaactcgaactagatttcgaactacttatagagtgaagcttcgctaacactaatcgagagattctttcagaatcacagatagagattgagcaaaaacgaaattctatgaagcagaggagaagagaagagagtatgaacttacgacacttcttctctgctcggcggcaatggctaacccaacggcgatgagatcgaggataaacacaattatcactacaagcttcgaagccattgctggattttctcagagctcacttatctctatctctctctctcaagtagctttctggtgattttctcagctctcactctctctctctttctcccttaatcgacgatgaagtcaaagagacattgacccaattttcgaatttaaatgatttaaatatttttaattctgtttaagaaaacatttaagaagattaagtgtgaaaatgtgcaaaaattaaaaacgttttaaaaagtggattagttaaaagtcaccgtctattaacgaagaagacacattgaatggtttagatttaaccggctgatctgtcgactgctgtataatacgcgtcggtttttaccggtaactgattcttccggtttgtcggtcggctttctttttcacagaagtatgttaattgttaagtaaccaataagattgcaggtcagtgtttaagaaatcggtcaatagtgtgtcttatttgcaattatattagtcatacacgcataatgatatttttgattttttttttgttaacatatagtagtacgtaatgatcacttttataacacattaatcttatgtttcgtgaactttagtatacgatggatttatgctactttctgataaaaggcccatattgttatgatacttgggcttgactatgctaatgaatactcctttgttctatgaagtttgatgttttggtttttatttttgttccatgaatattaatgttgtaggttaattttattaatatttttattagtaaccaatagagaaaagaaagaagtaaaacttatattattaaattaacaaaaaagtaataaaaataatattaaaatttttttttttaatttatgtgaaaaactcaaaacatcatttttctaggaacagagagagtagtttatatcttctggtaaaagatcaactaatcatggtgttccactaattttatatttacgagtaaaagatcattgttcgattttttttttttacgactatagacataaaatgacttgcacctatccaaaaaattagtttgagttttggttcgaaattcctaagttattaatgaaaaaaaaagaaccaaaataaatatttatattagctttactacaagactacaaatattagcttgtaaaaactgattctttttacagattttgttttttgggataattatactatatgtatatatctttaaatgatcattaagtttattttatttttgacaagaaaagattattaatttttctattcaattcttaaagatttaaaataataaatgatttaaaagatacagtaaatatttgtttcgttatcggtttgatatggaaaataatttatttattttaagatcgataattttgaatttagtctacgatatatattcccaatgggctacaaaacagagaaaacattttacttaagaaaggaggatttagtaaacataggtataaaaaaaaaaaaataggtacgtatattgcaattttgatactataacacaacgatgatttcattgattgtccttactaaaactgaaatcttgattaaaaaatatcaggcgacgattaaattgccgcctctaataaatggaatattgcaaactcatgattcatgaaatgctttttgtattccctttagttaagttactgatgaatctgttaatacaaggaacgttaatgcatttagattttcacatttcatattggaaaggaaaatgcggggttttccagatttaatacacaaagtaaatcctcctagtaattatctttaatgtaccactttttaaggataatatatgtagatttcttgctatatatattcacatctcattattaggccttacttataagaatctgttcacattcttcacagaggaaagtaaatcatgtttgccaagaaaccagaatcaaagtttgggtgcttttttaacatatttggtgttcttcggtctcgttcttcaagatggcgaaaagcttcgaagtggtaagaatcttggtttacttgctttacacggttaagatttcgtttttgtttcgagttttttttaattaattaatctgtcttgtttgcagcaaactctatatccaaaatctgttatgttctgttaacttacatcggaatagaagagagtgtatggtcagacaatcacggtccgatatcgctcagctcctttcttatggtcgctattcagaagctcttcctaaggtatctgagattaatctcaatcacctggtagatttttgcttatttgatcaaaatctctatcacatcacttaatttgttggttattatcccttgattcatctttcttattctgatttgcaaattttaaaactctaggcgaagcaattctatgaagatgagagaaggttatcggcatatgatcaggttgagctcttctgcacaaccatcttgcagaatatatcttctttgaaatatgaaaagtaagttgttattgatatcttgtaacatacggtagcataaggaaaccaaaacggttcgtaaaccctaatttccgcatgtttctctcgccagcaatgttgatctgttaccggaagaaactaaaaaagcaatggccggaattatatttgctgcatcaagaattggcgagcttgaggatcttcaacacataaggagcttcttcgttcaaagatttgggcttaagtttgataaagagtgtgtagatttgcgccaaggaaacgtcgtgggttttgagatagtcaagattctaaacacgaatatgcggggagatgaaattacacatattgtaagggaactttctcataagtacaaaaccaacatcactacttctacggattcaataagtgaagatttggcttcaagtgacgatctcggcattgccgattctgatgcgatgaaggttgagaaaatgaaaagggctcttcggagaaagaaagttatgaaggagaattctaagtttttgcatccaaatcttagagagtctcagggaagagatcgatcattcagaagataagagtttgattgggattgttatttggttaaaaattaaaatcttattactgtaaaagaaggaagaaaaaaaacgcagcatatacaatttttgttatattttcatagtatacagtatttgattattttctaattttaatgtcaataaatatcattattttatttatgccttcctagaatacttctctcttgatgcaaattttataacaatgatgccaaaacatcacataacattataatgctttcagttttgtaaatatgatttttgaaaatttatgttcattaatgatatgtaacttctcacaataaaagtctaatatcctaatttagtttttttttttttaatgaatcatgatctatagtattaaatataaacataaaaatatttagttcaatataagtgaaagatatcaaaggaatattttgtaacagaatttatctttttgggtttgtattcttacccgtagattatttcaattttttatataaaaaaaaaaaaaaatatgggtgaaaaattgattcaagaaacagttaccaaagaatttcatattttcacaccagatttgagacttatttatcagcgaatataaattgtttcgtcgtgctaaaagtaaaattatctaatgtgaaaatggtacatgtgaaacaccgtcgtgtgtaaaacaattcgatgcttggaaatggtactctcgctaaatttagtgggtctccaaaattccatgcgacgacttagttatttacataacactatgaatgggctatgcagtatttgttgagattgagatataatcgtttttgctctcatttcatcacatactcaactgaattagttcatatgatactacatctagaagattattgggtagttttcggttcagaattgcatgaattcaagagatttaggactccgtatctggtacaagcttaaatgaacctatttcaaacaataaaaattagtgggcctgaaactttgttgggcttaaaaaatcctacatactttatcggctgtagaaatatatcgatacctaaacactaaacagaccaatatcaataacagacctactaaacgactttgttcatgtttagcgtttataaaaaaagttaaaaatgttggcaacaacatcatccgatccatatactcttatcaggaacggaaaacaaaaaggtcaataacaaataaaaaaatataattggccataagtagtgaatagtgattaaatatgatttatcctacaattattcgttaataactaactaaaaatatattttcttataccaaagaaaactatacaaactacttaaatcaaacttgtaagataagatatagttggatgaagtgggggtttgatctacgatggtcatcttcattgtttgattccccctttttcgtttctattctattttaagaatatgaaaagacgtataatatgcacaagttggagagaatatttatcagcttttcagagtttagtatactatatatgatcttatcgaaatttataccttttctatatatatatatatatattaaatcgaaactttctttgttatcagtagcttaatgtttagaaatattcttattatagtgtttgattaaatatgtttctagaatcgaaaaaaataaaaagaaatcattatattaaattacgataaaaaaagaaaaattaatttaataaaaaagggaaacattatttcatttaactagctagtattttaacaaacaactaaatagttgtaatttattgtcataatatatatattctgaataagaaaaatccacatatgtagcaaatgtattatacatgtgtatgacaaaagttttacaaaatggttgaacttaaaaaaaaaatatgtcttaaacatacgtaagactacacgtaatatcaaaattaacatgcttagacatagtaattataaagctttatgtaaagcaagactgattctattaattaattgatggatcaacacttttagcaattggggatattgtactatttactggattatgcttgtggagggagctcatggtgctccagattatcaaattttatatatggtagaaaaataattataccattacaatgtaaagcattcgagttcgaatttcattggcgcactttgattttatataggaagattgaggttaagttgtaataagtgtgatattcatattattattggaagtttattggtttagccatatggtttattcagcaaaccattaactaaactcacatgtcaaaagttgaaacttataccaccttgatatccacgtcatcaattcttaatacacttttgtattttgacccaaatttacggggttacacgttatgtaattatgatatatgcatgacatacacgttatgatatatgcatgacatcgctaaaatagcataatgttaattagttatctaaaactaaagacctgtgtgtggatattatcttccaacattaacaaaaaaatcccgaaaaggagaagaacaaaagcttttaaaaaaactttgatcaccccgttctataccaattgatgtatctttaatggaagagaaccattataaatagaaacgaattaacaccaaatgcaccgtgacacgaaagatattgagtgtaagaaaccccaaattccttgttatattcgcttagaattatttttacagcaccatgtacatgtgatcacaagatatcaattaaagttagctaattaactttatttttcattttttgggctactagtttgctaattaactttttaccgagaaaaaactatcagtagaaagccaaaaaattcaatgaataagaaaaaaaaaaaaaaagcctaaacttacatacatatatgatatatctacgataaatttgctgataaacgatctgacttctaactaagattcctgttttacctattttaaaaaaaaatcgagaaccatgaatcaaagctcaactatgttaatcatgattgaaatcacgtacgttctcgaatgcttaaataaatatgttaatcaataaaccgccataaattggttaaatataaatctacttgcaagaaaattgtaattgaactttattttcaattggtaaaatgttcctttttcacgtacacaaaaaagtgtttgaagagaagcgtgtttgtgttatacggacttacgaaaatcttgtgttcccatttctcaaccacaaaagcctaatttcttggtacctctgattgtatactatcgtttcacaattacagtttcatctgatttcaatcaaaaattacagtctcatatggatcaaatagaaaaataacgagagtctgcatcatcaactcgtgtttgttgtttgtccctctctctgatctttaacggcttttgacgaaagaaaaatatcccgcctaactcaaccaatagacacaagacatgtgtcggcttgtggtagttctatccgtatgaaaaacgctttccatgttaccatccagtgaactcatcccatcattcacttacacgtgttttttcttcttgacgaccaaaaaaaaacaatttggcacatacccattaaaaaaaaaatacttcttatttttcataatacttttcgtagattgtcactgttatgtaactcattcatagaaatttaccgcgtaaattgcatgaaaaatcactagtcttaagaatcacctaatttgtttttctgaacttacaaatattcgcaaattactttcagttaactccctaatacttgggaagaccattgacaatacaaaaaaaaaatcataagaggaggtacagtcacacacacaatattacaacattactaatataaataatcaactttatggtataggttcaaagaaccaaagggatcgcataaatcacgacgctctaattgatccacgtgtcatgataaacataaagtgggacccgtattgaggctgcacgttaacgaagattgggcggcggtgtaatattatattatatatatacatacacgagtagcagagcttcgaaatctttaatctcagaatacaaaaaagaaaatcaaagaagatagttttgtgattgttttctataaaaagtgcagatattttctttgtcctagagaaagaggtgataggaaaaatgggtctccaagagcttgacccgttagcccaattgagcttaccgccgggttttcggttttatccgactgacgaagagctgatggttgaatatctctgtagaaaagccgccggtcacgacttctctctccagctcatagctgaaatcgatctctacaagtttgatccatgggttttaccaagtacgtataacctaataaccttaaccgtgtttggtttctttgtagctagttatgtttttttctcttctaacttgtctttttggttctttgtaggtaaggcgttattcggtgaaaaagaatggtattttttcagcccgagggataggaagtatccaaacgggtcaagacctaatcgggttgccgggtcgggttattggaaagccaccggtacggataaagttatctcgacggagggaagaagagttggtatcaagaaagctttggtgttttacattggaaaagctccaaaaggaaccaaaaccaattggattatgcatgagtaccgtctcatcgaaccctctcgtcgaaatggaagcaccaaggtataaatttagttaaatacatgatgtatccaaaaagataagtatatagtaattgtaattatactgttcaacgaataacatattttaaactgtttttatgttcagcttgatgattgggttttatgtcgaatatacaaaaagcaaacaagcgcacaaaaacaagcttacaataatctaatgacgagtggtcgtgaatacagcaacaatggttcgtcgacatcttcttcgtctcatcaatacgacgacgttctcgagtcgttgcatgagattgacaacagaagtttggggtttgccgccggttcatcaaacgcgctgcctcatagtcatagaccggttttaaccaatcataaaaccgggtttcagggtttagccagggagccaagttttgattgggcgaatttgattggacagaactcggtcccggaactcggactgagtcataacgttccgagtattcgttacggtgacggtggaacgcagcaacaaactgaggggattcctcggtttaataataactcggacgtctcggctaatcagggttttagtgttgacccggttaacggatttgggtactcgggtcaacaatctagtgggttcgggtttatttgattgtgtaatggtaacgtaataagaaaaacatatttttattttttgtccgtgtcagattagttaattaatatagcgtagaattcgaactctagggttagatttaggttctacgacttgtattgtatattcgtcgtcatttgtcctgacatttacatttttgtaaacttttatagctggaacttttgtattgatcaattatttattagaaaaacagatattgcattggatctataagttttgtacttgctattgctaacgataaacgatagaaatgtgaaagtttccttatcattcatgacacatttttgtgtcaacatcatgtagtattatcattaacaacgaatcagcgattcataatttattatattaatcgccataatatatcgataatctaggaaccataaagcgaatatgactttgctcgctatcgctcatcgtttaatattagtaccagctaaaacgaacaatagatttgtcatcatctttcgctgatgacggtaaccatatcatagcgaacatgaccaaaaatgtatgtttatctgagatgatttctagcctatagcactagtatacttttgtaaaatataaaaatactatttatataaacacatgtggcataaagaaatttcgcacgcgatagttgtgtatatattcatttatgtgcaatggcatttgcaagccgtaaggtttgaaatagtaatattgtacagctgtttaaagaacgttcaaaatttgttagagaaattgatatatatatatttaaaaggatatggataaagatgttatattgtttaatgggaaaaggatagtgatggtattagatggccaaatcttaaagaccaattggggtttgaagataagaacagagaacggaccgtttggggtttcctgaaattgcacgtgtgagtcagcatgggctgcttgtttgactagtttagaatcatttctttcctaaaatagtaacaattcacaccgtacaagttttaaacacatctacgctttttgttcgtataagtagattttcataatcaaaatttaaatagattttatctgattaactaattagataaatgttgtgaaaaataatttttacaccgaaattagctagggagtttttctttctagtctacatgaatatccattacattgaaatttaaagagtttatggaatttaaagaattggctataacttacgtcttattatatttattttctaaatcacttaaaaccctaataatcgaattaagagaaatcattgggcgattgttagttacttttgtcaaaccaattctttgttctctttgtttacattgaaatcttttgtcttcttaaataatccaaaaataaaataaataaaaacactgtcttcttcttacaaaaacttttggctactcaaacaacttgcgaaactataattttctttctgtatcttaaaatcgcagaaaaacgagagatggaaatgagtttgttaaatatatattttcgtttaaagtttgataattaaggtggctggatgtgaaaatatttcaatttaaaaagaagaaaatattaatgttctacatgtaaattttgttggacgaagctctacgcaaccccttagaatagcatattctatcgtaaatacatgaaaacgaaggttttgagtttaatactttgtaaccattttgcatagaaatacttgtggtccatattcatcaagatgttattgtacgctaaagtctaaacaaataaccattcattcgtccatatgtgattaatcagtaaacgaatacaggcgcgtacgcaattacgcatggcatggggtttagtgatgtatattagtactttattttttgccatgcatctattgtaaaaagtcaaaacatgaaattaatataaatcatttgtttatattttgttcttacgcgtaataacaaatgatttatacaataatttatgatttttggtagtttataactggaagattccaaaccaaaatctaaattaacgtgttattcaaagaaatgaaaatttgtccatatggtaattaatgttttatataggacttgagtatgtgttgggccatacgcaaaaagtggattcagttaggcctatgtatttctttaacaatgggcctgagtattggaaacgcaaattatatatgtatccaattatatttttgttaaagaacgcaaattatcttgatcgtgattattttcgtactgaccgagacttgagaaatcagactattttctttgacaacttatattttaaacaaaaataaacgtacatagatacaaaaaaatccttgagtataaccttttttttttccttgactacaactttaatgaaaaataaatctaaaaactcaaaaggctgaacaaaatgagatgatgattatcaggtactgtgtatataagtgcataatattttgttataaaaatttcgactccaaatatattttcgaaataaaattcaaaagtgctttataaaagaacaaagtttttcatttttcgcgacctcaattgttctatggagaaagttttttttattggagaaaatttaaagcttcatccattattagtaaactggttataattgatgtcaaacgagtgcaaccgtaaatataatatctacgagtgatttcagactaagcaatcagtctttaaatatctcacacatgcaagtaatgcaatatcttatagtatctaacaatgacatctgcgatataaaatacatttaacctagacaaactttttgttgctgggtgattctaccgttgcttgtgtgaccttccggggcgttgagaaggtaacaaagtatatttaacgaagcagacaattgaggaggtccttaatcactttccattttaagcttaaagacaaagattagaaagaaaaaataaagcaaagtctcagcagaatcatgtcttaatctacttgattgattctttcatcaggcataattaatcatggccattaatatctctagatcatatctctaaggaatacttacgtataacttacgttaagttgtacgtattagacatgactagttttcagaagatatcagtaaaaaacatgtgatttgaaaactgatttatatcattttgattacagattaaaactatgattccaactaagaaaaagcataaatttcgaaaattgtttgaaaaatagttaacaacaacttcataaataaattataagcatatatatacataacaacttaacaagatgtatatggttatagggaaaatatagctatgtatttatacatcttttttacatgtcaaaaatatatggaccgagttggaattttttggtgaaaagggatggccaaataattatctaatcaaacattggggcacacaagattttttagttaatttcattttttcatttcattctttgtatgcaattaaaacgaacacatgtgacatgtgaatatgtgatataccaattacttaatatttcggctttaaaaagaaaaaaaaaaacgaacaaatcggacactgatttgtttgaacggtgcgtacgtggtgggatgatgaagaatttgatcttccatatcgcaagctcataagattctcgcagtagtgtttttattacgtgttctttatttttttgtttagaacttgattacttaaatcaatctccaagtttcttaattatgttaattcttcgttttttggattcttgctataacttatctacgtcaaaattttgtccaattttacagaaaaatcacaaaattagcattttaacacacacacacatacatatatttaattggaaaaaatagaactaacagcattttcttcgtgaaacaaatacaggagcacgcattcaaaaaattaaaagggtcatgcaaaaagagcttttctcaaatccgttttgtatataagaaataagaaaagaaaattgtagctttgtttgatgtcataagattcatgtgttctctttaatattattctcaactcttggaaatttgactaattaatatgtaagttgcacaaaataatgtaattataagatcaattcagagttcagaccaaatgttttgtaagatgtctcgaaatcttatactatatatccaccattttttatatatatcttccccaaaggagtatattatgttcacagccgatgaattcgttatatccgggaaagacccaaatcagttcgaaagcatattcttttgaaaaaaaggttcaaattaaacacgttgaaaaatagaacagtttaattatccgagttagtttctaaaaggcatgtgtcttaaaacttaaattgagtgatcactaactaacaacctaatttgtaactaaatttacatttatttcatttaaataaatttatcgatggaatcataaacgtctacacatcatattggcttctgtttcagatatcatataaatcaataaatctgaatctaatggatgcttgaaatgaaatagcactttttttttttgagctaaagaattttttttgtcaaaatgtttgacaatcgtccgatgtttggcatgtcacgttacataagaccgtgtaatatgatgtttaacttggcttagatatttttctaaatagaataaaagtgtggtatcacatgatgaaaactatggttacaaatgttcacacactggattatttgaaagtaggtcgttttttctgcataaagattttttatgaggaaagttttaaatacaataaaaagtttgaagttaggtttactattattaaacaccttgtatgtagtagagtgaaatttaccaacctgctaacatatgtaatatacatgatacatgatacatgccacgcatgtttttgttatacaatatgcataatagtcatatattaaatgtttgattcttcacattaaaaccaaaaaaaaatatatattaaatgtttgaattgccctggcatcccacttgctttagcttgggacttgtttagagagttataattaaaatccagattatcgaaattgtcttcttatttcaaatttaaaactagttggtaattagttgattggcatgcagatcttagttagtagtgttggtacttttccattgcgcctagtccaaaaaagattgtttttttttccaatacatattattactgatttcatattaaatttgaaaattaaaacattgaaaagtcgagtttacgaccaaaacactttgaacgacatttggattgaagcaaataatgatattctagtggtcatcatcatattggtccatatcaatgatatttttttgatagaaacacctttttactactgtaaaatgtgtgaatactcacaacgtactaaaaattataggttcgacgatctaattcttccccaaaactttcatatagcactagaagtttgaaaactcttggttaaagaaaataaaatggtactttcaacagttacaagtgtctgtatataatataatatattcaatttatacgtagtccagttgtgattgcacgataacaccgttatatatttggtatctttatcaatcaagattgttatatgttgatttttcaaactaaaccataataatattgacatacgggataagcccactattcagtacccacgttatgttgaagataacacttacaaataggggtccctaacaaatagtttagagtgtatatatttggtaagaaaactattttaattatagaactcttaagttttgtaatatatcaaaaaattgtgcgtgtttgtgttgttgttgagattctgaacgtctagcaaaaaagaagtggtgtgcaaccatgtaaagcactagaaatctttgtgaatgcaaatagaaggatgtctcttgatctgatggatgtgactaaaaaatgatgtaattaaattgactaattagaggtaagcatttattttagttggtacaacgtgtgtaaaatatggtccacatttctcctttttttttttttctttttttctttttactactttttctatttgtttttcaaacaaagtgctctaaactgacaaaactggagaaatagtaggctgtatttgattttgtgaaccaaccaaaaaacctttgtatttgatttataatattgtgtgttttaaacataaagaaaaagatatgagataaggaatctcatggtcagaagtcaaaactagaaagtcataaaataaaccactcctaagaatctgataagtaaacaaactatatatttgcacactaaacgtaatttagtggtcgaaaaatatgcatgggttataatcatcttatgacgttggaaaaaaaacaagaataaatcatataataatgaaaatataaaagtaatcgaaacttaaaaatgacatgaaattggtcgatttgtttgtttccataatatttattatctaaaattcaaaaaatattctggtggtgcgattatctcaataacaaaagcgtgacatgtgacatctgaaacgtaaaacttttttttttttcccacacccacccggccatctttttccacgtcatcaatttgttaccttctctggcgatttctgtgggccctactgccccgattgccacgtatgaatatatcgtccataggtatcacacgtgtcgattattcattggatatttaacaagaacagtaaccacacaaaattaataaaatcgtattacagcatacaagatgaaattagaaaatttcttcaacttttttttgttttgcgatattgtcttgataatgtattatagtaagatatagcgagtatttgattttatgtgttagtgtaaatggcgaaagcgatatatatcttgaaattatgtacaaattttttgttttgttaagatatatcgttttcgacgttaattccagcctcctctccattgtcgtagttcgtccgtgtcgcgaggctatacataaaagtcataaacgcagagaaagaaaattgatatttaattcaatggttaattgtagctattatgtaattagcaatgactaatctaaccttatgcagtttggttaatttagtaattatacacagactcgacatgattagtcaggctttgtatatgtgtcgcattgtcgccacattaagatcctttagtgcaaccaaaacacactaaactcggctgaaatatggggcatcttgtaccttttaattatcgctgattactgattcacatcaaatatatggttccaaattattttattaactcaagtgtatagtaatgtttgactcttttttctgcaaatgtttcgaagacaaagtgctattaagttttatcaaaactatgatgttttgtagttttagatgattatataacgtttgtcaatctgtcttttaatttacttaaatcattagggcaggtaactatatttaaataaaaaacagagattgtgtatgagtttgaaataaaaacgtgttaaaatggaaaaaataaaccatgccaagtatttactttactacaaaggaaaaagtatacagaatttttacatgatgtcgtatgaattacatcatgtaataatagtaacttagatattctgtaagaaaattagatttgcataattacgttaatatccgagggtgtatataaataagaaagaaagaacagaggattaaaacccacaaattggcgttttatacatccccatttaaaaagaatggtaacgccgactctgtgaagcatttttcagcactcctttcctttcccccacaaactaaacaaaaaaccattaacaaaaaaaccattcacaaaaaaaatagagagaatcatctgagagagtagtagtgatgatatgatcgcttcttctcctacaatctcagaaacctccgatcacggttttagatatcttctacaacggatacaatggagagcaccgattcttccggtggtccaccaccgccacaacctaaccttcctccaggcttccggtttcaccctaccgacgaagagcttgttgttcactacctcaaacgcaaagcagcctctgctcctttacctgtcgccatcatcgccgaagtcgatctctataaatttgatccatgggaacttcccggtacgtacgacctcatcatcatcatcatcaacaactacttttttatatatagtattatttgatttatatgaatttgtgaccttttttttggttatgatgatctaaatctttttcttcttttttctataatttttttttggtttgtggattcgtttgttgcagctaaagcatcgtttggagaacaagaatggtacttctttagtccacgagatcggaagtatccaaacggagcaagaccaaacagagcggcgacttcaggttattggaaagcgaccggtacagataaaccggtacttgcttccgacggtaaccaaaaggtgggcgtgaagaaggcactagtcttctacagtggtaaaccaccaaaaggcgttaaaagtgattggatcatgcatgagtatcgtctcatcgaaaacaaaccaaacaatcgacctcctggctgtgatttcggcaacaaaaaaaactcactcagagtatgattcatcgaaattttcaaatattcttgattcttgaattcttgatcttgattttgggaatatttttttattgtgtgtgtagcttgatgattgggtgttatgtagaatctacaagaagaacaacgcaagtcgacatgttgataacgataaggatcatgatatgatcgattacattttcaggaagattcctccgtctttatcaatggcggctgcttctacaggacttcaccaacatcatcataatgtctcaagatcaatgaatttcttccctggcaaattctccggtggtggttacgggattttctctgacggtggtaacacgagtatatacgacggcggtggcatgatcaacaatattggtactgactcagtagatcacgacaataacgctgacgtcgttggtttaaatcatgcttcgtcgtcaggtcctatgatgatggcgaatttgaaacgaactctcccggtgccgtattggcctgtagcagatgaggagcaagatgcatctccgagcaaacggtttcacggtgtaggaggaggaggaggagattgttcgaacatgtcttcctccatgatggaagagactccaccattgatgcaacaacaaggtggtgtgttaggagatggattattcagaacgacatcgtaccaattacccggtttaaattggtactcttcttaatcaaatgtgtttcgccgccggtgtgaagaattttccggtgacagtgaagatttttttccgattggtggggtcatttgcatgcattatataatttgagatttgtgtatatgttttgggttaattaattggtcacaggggttagaggaagaagattatttagagagcggagaagaagtgaggcaacatatagaaaacataggtttaaaaaatattactgtttgttaagtttaatgattaaatgtataaatcttatacttagatgtttatatatagtttgtatagatgcatatagtttctctcaatgctattttgagattgtattttcttgtaaaggaaatgttttttaaaaaaaaaaaaaaaaagttgtgtaactatgtatttttcttcacatatgttgaaaatcactgatgtttttggactgagttattggcttattgcttatgaaagtttggagggtattttatataaattaaaaaacttctactatatgattataaatttagttaaggcgaaatagtcgatggtatcaatcaaactaatttagcaattgtctggatagcattaaacgcatattactcactattttgtcgattaaactaatttagtcgtcagttttactaaaactgtggtgataaagcaccatcaataaaaaggattgtataattttaactcgtcccatacatgattaaataaaagtgagtagtatattaactggatttggaaaatgatatgttaaagtatcattttacagagaaacagaatattatgtacatagttaaatgatatgtttttctcttatttcaagcacatgcatcctaatttttttattccatttcctatataacgacgcagtgccctgtaaacatttaaaaaatacatatatttagactttatattataaaagatagtgaaaaccaatcctctttagaaacatcctgaactgatcaaaagtaatgataagcttcaagtacgttgtgtagataagaaatttcaataattgcatgtaaagctataagtataatatagtattatttatattatgttatatatacgaggcccatctcacgttgatagtgatttatctacttattttctatatagtttttgtttgttttttgcatctatcatttatttcataccaaaccaatcctcaatttatagtaagaaactatttatttgtctcggcaacccataatcttttggaagcaagagcgaaacaaattcgcgcaactggataacgaaaaaaacaaggaagaagagattttcattattttaaacataaatttttgcgtttgttataatctagcaaactagtacaaattttgtttactgtattagagtacttaaaagttaataaaaacattttttataacggccacaaatgaatgaaaataaaaataaatcgaatatataaaattataaattaagatatttatttcatattcatcttacctcaaactgtagtaattttgtccttgatcataatttattatatgatttgaacaaataaccccctacttaaagtgtttccagatatgttcagttcaggtgtggatgtcattttctgctcacaactttttttttgtgtgtgtcaacctgctccgaacttagattttgattagacatcgccaaatatattcccattaaccattagatcatacactcacaactacaagcacacaaaatagatcccaactttaaggaaatgttacattgtttgattaaatgatgagaaaggtcaaagaattgcgatttatgaaaggtattcttttgaaagaaaatataaaactaagagatagtatgtattcttcgaacatgatttttgctatatttatctagtggttatgtcacgagttcttcaaaaaaaaatgattagtaaaaaataaataaatttatatatattgctatgagaaaacggatgaagttatctgagatattgattattgcgtatttttggacattttgacacgtaaattatattacgcttttgaatcatattgtatcgtatgttatttttcatagaactaactagtcgtctacttcagacaaaaaaaaaggtcaagaaagtggatgtttaagaaaaatagaacgaaaagatatattggaaaaaagcagtgtgtgtacattaaaaaaaatgacgagcaatggaccatatgcttctacatcagcaaaaggaatcattatctttaaaccaagaaattaaagacgcctttaattacattcctcttctggataataagtacaaaccacctttcagaaatttttatatccatagcacttaattttggaaaacctatagtattcatttcaggttacacttgcacacccatttcttttcttacattttcttttttcttttctatatcttttgagactcataaaatttcttgaaatatctatatttttgctcctcgtaacaatttggtcctaaaaatcccaaaaggaaaatagtgcgcaatatcttgttgttttcacttcataagttgttgaaagaaaaagaaagaaagattctgtataaacagaggtagcaaaataaaattaaaaagcgattaagatgaaaagaacagcaagtaagaggcatggaaaatgcacaacgaagctcgaggacagctatgtatagaaaagcaaaaacaaccgttacattatgtggatatagattattaaattaagaaaccagtaaatacatttcatttaaatggattgtacaataagaccctaaaactttcctcaaaaaatatctttacttcaagaattcaatatctatttgagaaaatacaactcaggtttacttcacaaccatgttaacattaacaacaacaacaacaacaacaacaacaacaacaacaacaaaaagtgaaaacaaaagagcagcaatctattagtacttgaattgatgatttaactcatcaaacacatcttatgtcaatttgcaatacacaaaaaaaaaaaaaaaaaaaatgtgtacgtgtgtgttaatgtaataaatgggtgatactaaattatattttgtggattagtagagactaaataaaaagtgaggatgaaatattaatgaaggtaaaataagggttggttggtggagaggtaatgaagagatgaaatatagacagatcggggaatatgaactaacgctgtcttcaactctctattgggctacatgacgatcctttgattacgataggagtgaatttttagaaaccctccaaattttatttattaaaaatcatttattattgtaggatgataataaacacttttattcacaatttcagttatatatgtgagtcatcattacatgatggattcatcaacgtacaaggatttgaatcccaaaattatattattattttctgtcatattaatttatatgaattgatgttttgttttatcttgtatgatattaaattcagtcttgaaataaaatttacaaaaacggtatttatattgttttatactcctggacaacggattcatcattttaattatttcaaaagtttttttttttttttttttctgttttggcacaaatgtatttaggtttacagcttcaaatacaagtacattccattttagctgaaactaatgacccacaaaacaaaatggtacaagggaagaagaaaatgagatagatccaaatatccaaatgatgcaaaagcccattttttcaatcccaataagatataatgacaatagtacaataccaattattaaaattacatggacctctattatggaggtgagaaactttctatggacctcactaaatttcaattcattctcaatatggtctatacactaaagatagattggatccaaaaaaacccagcctatatagctttggcctttgtgtgagagtaagctggtaaaatgattaaataagttgaatttggcagaaagcatgtttgcattgaattttctcattttgtttcttctaaagtttctccgttgacctgttggtgaacttggaattggtcaaacattcaaactttgacaaatagagcattcagaatttgaaaattagaccaaccgctccattacaaaaacatgtaaccaagtcagtggtcttgttctcttgtgtttctttaatatagagaaagaagactcccttgactctctctcacagctagtttataaagaaacgtttcttgcaaaattcttagcaagagatacacgtcagttacttatgcaggtttcgagaaggatcccatctggtgaaggcgtagagatgccaggaagatccgagaccaaccggatcagacggaggagccacgggtcaggtctgagggttcgggtagcttgcacttgctcaggacggcctggttcaacgaagtgtgcacggcacgggtttgtggtgccaagcgatgagaggcttatgcggaaggcgagtgacggaagcagagaggtgttgcgaagagctttgacacctccgatccggcggatgaatctccggtggttaaatttccggccaacacctagccgtctctgtaaaatgtcttctgtttgatcatgaaactgggactcaaaaaatcaaggctgagaactttttggttgaatgtaaatagagctcaaagcttttctttttcttgtaatgttggaaatccaataagaatcatacccaattgcagagagttgaaactcttagcactctgtttatggacaagaaagtcttagaacgttttggatgtaaagaaagaaaaagaatcaagtggattcgttgatgttgttgttttgaacaggcaaactaaggcggtcttggccttcaattagttttgcagatttgatgatatctccagtcttgatctgcccgagaatatcttttcctgctattgtgtatctgcagaatttggagcacacaagagcaaccatcaattcaaatgcaacttgcaagttctgaacgtccgaataagaaaagttttaaaaccaatacccgaagaccgagaactgtccttcgtcaaaggataatcctcctaagccagactgcaggaaaatacaaacaagattaagagcaagcttcttagtttcaaaaatggaatcaagctaaggaagtttggagtgatgcttacgtttcttttatcgtataggtagaagaagaattggtaaggagaagagtattcttctgagttttcgctgtgcgccattgctacagctccataaaccgataaaggaagcactggtaactccccatccttccaatgtcaaaatgcaaaaaaaaaaagttaagtcaggttttctggttttgatttgggagtaggagtctatacctggacactcaatggcgttctgtagagaggttcgaattgtccagaaggcattacttccaatggaacactaacactctccaccttaccactcccatcctctgtgataacagcctggtttacagtattgagtttggctccatcatatgcaccgctagttacctgtaaaaaaacgagaagcaagagtttgtggtgcccaatcatcatttcaagatttaagagtacagcctctttaggttcaagatctggagctaacaaaggttgttcagagtaaactaccttaccagttttgcaaaattccctgcggttagaggtgctgaatatccatctataacgatctgaatccaccatataagcaaaagcagcattccgtgaaaaagcagcttaagtaatcggggcgtaaaaggcaacaacagctgcatatataagatcagatttagctctgatacctgtactgtagcactctttctttgatcacctccagcttcagctgaaaaagtcgaaccatcagctttctcaatggtgatttccacagttcctcttcctgctaacctacaattccacaaaatatctgtaaattttgcagctaataagaggggattaactcagagagacagaaaaactggattcacctgggatagtttaagtactgctgaggaagtagaaatgacaacccagatgcctgcaataacattctttaacgtcagcaactaattcttgcgcttatgtgtttcatttccctacccataagagatgagtagtgatgtatacctgtaataactccagatccgcaacagtatctagtgatgctgccagcccaagggacactttatcaggatcttgtttcttaatagacgttataagtgcttgtagtccaccctttcaaacaaaggaacataaggtttatacgcgcctatgacaaaaccaaatgaatctaaaacttaaaaccacctgttgtaatcagttgcaaactaagaaaactttacatttaacaaaaccagatcatctttcaccaaacttaaagaaaatattacaggtattacagcccatcaacttgagaacagagttgcggtttaattcccacgtacctttccatcaatcagagttgtatacagttctgagcccttgtcttttaagtctactggtatactagccaagatcttatccttatcatctatagccacctgaaacaatttcgtcaaagcatactatgcttccactattcttgcaaacttaatacaaatcaagaagtaaatccaccacttcaatgccaaccaatcaagagtctctcagaacatacgaaactaagagcctcaaacaagatcaataaactagaagcttctatagaaaataaacaagagtaaaaaagtttacctttaaagctttctttacattgctctccatggtaccgtaaggcttcctttgaggaattctgagaagatatgatatatcttccaacgaagcctaaggaacaacaacacataatagtataacagtcaatgatttccaaaagcaaatacaccacatagaaagtctaagagagtgacgagcctgtattatcttcatgcttggattagcaggtatagcccttcttagagcaagttctccagttcttggaactttagtgtccggagagtaaagaactgcctctgcaggtgaaatgtaagcagagtctagaccaaacaagggcaatggagaccatacttgaacaaatatcaatatcgttgcaaccaatttctcgaggtttttagatccagcttcaaaagtgttcaacttcgaatcaattgaagaattgcaggaatgtataagttcctgcactgctgaaaacaattttatcactaatccataaacccttaaaaaacgatttttttgcctaacgatagatatgcgtaaactaagtaaaaccctaatgtgaaatcagtatagagcattgtacgcattcgcgagaattttaaaacccgaccttagtgccagttttactggatgtagaatgcagacgcatgcggaaatctccggaattggttcgattaaagggtaatttgggttttacgaagaggaatttgcgattgagaggtgaaggatggagaaaaaaaaggcggtgagagacgacggtggaagaagacaaaggagaagccattgatgggaagcttgcaagttacagagacaaggatagggagaataaacgatgagctttcttctttggcgcgcctcatctccgaaacgcttacgtggaggtatttgaatggatacacgtgccctactctgaagttaagagaaacggcgtggtgttctactttgtacagtcgacacgcattgcatcttgcaaaacaactcaacgttttgagaattcgcttgtgcatgctttgccgggtgtttaacagacaaaaatgaagcaagagtagctttaaggcttggcccaaatctggcccaagtatactaaaataataaattaataatatatagggaacagataccacattgacgtgaagtgacaatgacaagtcatttaatgcccaaccatatctactacacagacgacattcttgaaattcactcaacaaagctccaaattttttatttttttttcgtacacagtttcaaagttcagctacttctctccacgacgttagttttttacccgcgtttgaaaacgcaacagtaaaaagactcttctctgaatcacatattaagattcagcttaatatgttaataaaaactataggttatacaaatacaagacaaaaacgcaaacgcagcgttatgcctcttcatcaaagcatctggttccgcttcgcctccccagacgccacatacattttgattttctagtgtagtagtagtagattcgtaattaatatattacaattatagtgtcgaacctccagacttcttcaactacgtgccgttttttatataacgaaccgacacacatcactgtcgttttgaacaccacgtcatcatctccaatcgaggcggacttcacggggcccggcgacgagttcactgggtttccggaacgaaacgatgtgacttccggccataaacgccgtgactcgctccgagactcgtatatcttccatctttagctcttgaagacgacgcacgtactccggcacgtgtaagagatcccaaaccacacacaaacctcctggcttcacaactctcacaatctctccgagcactctcattctctccgccgcagcttccaccgacttctgaccatgctctttccccaccgtgtgaacgaacaccgacgagaccaccacgtcgaagtaattatcgccaaacggcaacgtcttcacatctccttcacggcatgtcacatactcttgcacacctacacaattttgaatcacaaaaacaatgagaatctcaaattcgatttgaaattaggagaaattgatcagttaccttcgagtttagcggtgcggagagtggagagagtggtgcgtttagagcggtctaacccgacgacccgaccggagctaccggttttcttaagctgtgtagcgacggcattgaggaggataccacggccacaaccgagatcgagagcagttttgacacaagaccagtcaccgacggagctaaccatgcgttgagccatctcgtactgaagcggaacatctgagtaaacgaaattagctgcggcgaagagtagacaaaccgcggagagagcggttacagcaccggtgaaacccgcggctaatctggcggcgccggagaggaagaaggaatcgaggaagaagcaaatctgatcgaagtagatgaggaagagaagagagagaagagagaagaagaaagcatggaagagaaggaagacgagtgtctgccattgttcgattccgtaaatagcgtagatctgagtccaatctctgttcccggtggttttacccattagattccgatcaaatctgatgcaaacaaaaacaaacaaaaatccgatctacgagttagttaaatttgaaaattcgaatttcaaactctgaataactaacatacaaagtaaaaagcaagtaccagaggatcagagacggtgaaaacaagctgttttcttctagaaacaaaaacagatctcaaattcaaaaacaggtagttagcaattcctgagctgagacgatgaagaagaaggtgattttgaggtaggggtaagtcagtgaaagagtgtatcgtcgtcacaggaacatgttgggggggggggggggggagagagtgaagttattatggatgaagaagaaaataaaaatggggcaaaggaaggaattatggaaagggatatttttttgcaacttttggtcttacaattttttcacgcgctttctttttcactctatgcttgtcggtttctgcatttttcaaaccactggtttctgaattaaaaaacccgtaaagtcgctagatttttaatttggaggttgctaacagaaaatcattagctaacctttttcttttaaatttatttaagatacctttaagtattaaatactgtatacataacattttcatacgtaatattttctcttgtttacagtgaacactaattaaagctcttgattcaaatttaaatagttgatctaacttttagtgattttttgtaaaataacaccatgcattatacaaattacgaaatgtggaaggtcacacagtaatgaaagtatcatgaaccactatttcatgttatttgataatgcaaacattcataattttggttttatttaatgatgcatttatgcaattttttaactcaatttatggtgttttctgttaactggttaagaaatttttgtttatcatagattaagagacaaatattattaactaaaagtaaaaagataagaatatttatctgattattctgtagtttaattaccacatgatcactagctaatgagtgagtttggttttactcagatcctatctttgaacactgagacagaaaatttaaatttcttaaaaagaattagctgagagagactgaccatgtgtaaaagtctcttcaaagaagaagcgcgttcaagatgagaaagcttataaaggcgacaaagactaaagtatggaactatgtatgcatcttcgagataatgttgtttaatatagaaaatagaaatatctctcttttattaaaattgtaaatactgtaacaggtataaaatatggtttttgatagccagtggagctaccaacagagacgacgcgagatttgaatcgtaaatagatatgtctattatcatgcatgcactgtgttccgagattcgagatcgcctgcaattttccacacaaaaaaacaaaacaaatagagaaatgtgtatgtctctagagaaggatccagaaaatattgatgaaaatatcgtgaatattgttaccatgttgtgacgttgatgaagatatttttaattagtagtaagattaatctaccattcatctatgttatctatccattaacattatccttgtttccactcgaaatactatcatcattcaaatccaagatatctattttattggtatggactatagttgaagaaatgcgatgaaacaaatgatggacaaagaggtggaggtgacacagacaaggagagaacatccgttgcgtaagattttttgtaaatcggtaagttcattcatcaaattgcagccgtacatcttacactctcaccactttacaggacgacacgtggtatactaatacatgttaatatttgattctccgctaatcgtggtcttgtttagttgttaggtgaatagaccccttgtaattacgatcagacagcaactagattctttttccatcttctgcttttaaacacacaaatccgataatttctcataatcgtcgatattaactgcagctagtaaaccgaaactaaccttatttctgtttcagttgtttctaaaccaagattactcaattaggtccattatattttattttgatgtagacaaactgtctcgtatggaaaacaaattaaagatataatcattagctaatattttagatcatactttttttttttgataaagtatgttaaaaaaaaacttcccgctgaatattcacactctttatttatagaaaatagtatatataatgcaaaagtaaagaaatatactataaacttagaatttttggggtccaatggtttgacaaaatgtaagcaaacgtaaaacgagtatgggaaacagaaggagaggcattaaccccaccggctttattaagtgatcttttttgaataacaaacactaaagtctaaagcttacgttcctacttgctacaccatttttcttttcacataacacaaaatagaacaaaagaaaagtctattcttttcgtaaatgcatctgcatccatgggaaatttatttgtagtcaaaaacatatctataacaggatattgaactatttcgaatagatagctactgatgaattttggacgacagaaaaaactaaattctgatattttaatggtcgaaatcaaattctatttgagatattgtctcgtactctcgttagattcaatagctttcacttatcgattgcgaacgcatattcaagaggttaatctcaaggaacgaatatttaacacgaaaaaaaaagtgcatgaatgttgtccaacaaaatggtgggttgtagtaaggacccttttttaacgtactgtgttatcatcacacgaaccagtgaccactacggaaaccttagacactaaaataaccatctcaatttatcgtcagcaatacgtaagttatgtaacaaaagaatataaaaacacgtaatttacgttacatgcgtcctttttatgtgtgtggcttttgtatattcttttgattattgccaaaaatgttgccagaagagctcgaatgaaaggtatctatctattagtataaaataattcgagtgtgtgtggggactaatcctctggagtaccgtgaaatactaagattattaaagcaattaaccatttaatgaagtgtcggtgttcaagtgtgttcacatatgcgggatgcctcatatccaacagaactaataaaaatttcttgattttggtaactcacatgaccagctaagctatgtgaagttatatttttaaaaatcttatgaaatgtcaataacattttgtttggtttataatggtatcatcaatactttacatcacattgcctaattaagagggaaaagagaaaacaaataacctccttttttacatatattacggataacaatttcctgaactatagatattgtatctctacatttttacatattttgttgttgtttagtgtgatatttgagattccatccatatttctttatgaaattaattaaaagaaagactttattatatgtctaaggaggaaaaggaaacatgaatttgaaatcaagcctgatcttgttagctttgtcaaaaaagattattgaaacctgcctgttatgcattttttaacaattatcaacaaaattcaagaacagccaatgtgatataaggacgtatatgtaaaaagatattctctgaaaactcaaagtttactatactataaagtagcaacctgattagttggtagacgcagaacgacctaacccgtcgttgactagtaagtaactctactcacaactttgtttatatatctaacattcctattttattattattccctaacactttcttttcttaacgtcaaacttagtgattagttcaatacaagtatatagttgactgtttatgatgcagaattattattttcgacaaattctcttgtgttgtgagtctatcttgtgaacattttagcttccatttcttcggggaagtaattctggaatagtcaattcgtttaaattcttactatgtaaaccattcagaatcttgaaatttccatgtaaatgaaatcttataaaaattaaactttttgtttcctggaacactgtctgcaaactcagagccgtcgacaggaaatagattaataaggaaaacggacaaaaataaaaaatgtcaaactttcttataagctagcccaacaatacagaccttaataaagagtgcaagtttaaaatgttttaggcccattttgtttatgtgcttttaaatgttaaatatttggaatgagaaaatttgacaattaaaggtagagagaatgggtctttacgcatgacccatattaccgataaggaacagtgacaaacacaacctccaactataattttccacgtttacatatacgagctgattcatcagtgacgtacatatatcgccttcacgcaataacaaaactcctagaaaataggagttaatatataagttgaataagaacataaaacaataaaaatgaagaattcagctggaagttgggggttgtacgtatgtgtacgcacgtcaaaaattcatttaaaaatatcagaatctctataaatattcataattacttacattctacgccaaacacgtgtgcatcagtagggcaatcatcttgcacatctctgacccaaatgtatcttcaagaacacaaggaacagcgttcttaggagcgatatcgatcactatctccagtgcattttatccgaatttgaaaacaagaattggaagaaggatcaataatggtgtgtttctgtttcttggttgaccagaagaggaaggttaaaggaagcaaaccggcggcaggaacgtgttcccggtgtggtcgtggtgcaagagtcgccgatatgaagacttcgacgaggttttgtcttatacctatttattgtagatcttggagagccatcgtctgcagcttttgcggctctgttcttaaatcctatcgttgagattttcttttccacgttttctagatcttttctaaattttagtttcttgtagtaattctaactttataaacccctttgtaaggtttttgtttttttttttttttttttttaaggtaggcttaactccaagtctccaacgtctaaagtttttgtttttttgaataagagattgtatcatcttaagttttttcatctttaaacatattggttgatatgggtaacatgtctgtaagtataattttaaccaatcacaaaaagtttaagaaccgtgatttatgttcaaccatatttgcagtaatgcaaaactaatgataaagagtctcatttcgttcctacactaaaaaaagtgtctcatttcgtagctcatttaggtttgaactctcagatccatctgatcatatggttcgaatcaaaaacggaaacgtaaaaggcggctaaaacaaagggaaattcattatatggaaacttagtttacatgcacaaatttaataattgtctatttgttttgaacttgaagtacataaaaactaacaaatgctaccattatatttcctaatattataattatgcaatgttattggtacaaataaacatgaaaaataattttgttataagaaagtgtgaattgaattgtttttgccatctttaatagggtaccttgagctgctgatacacgaaaccgatgcctatgttttatactttctcaaatttctctaacgaacaatttttttgtttggtaagactaacaccacccattgataatacaataacacacattcaagacaattagacaacattcatttattaccaaatttattatttcttgctgtttgaaccataaacaaaacgcatataatgttttataacttctactaatcgttaaaaaaattctactaatcgtactaaacttttaattagtatcgttcaaaatccaagtgatttttaatctttaaaatggtgtaagaaactcattttaaaaccattgaataatattgtttattttatttttagatccttacgaaaatgggagaggagaaaccccaacactcattttgtaaggaatcggttaatatgtttggtttttgttcatcttcctctctttccggcctagtccattgaataatgtgcatacactattaagttagctatacacatttatagttttattttttattttttaaaagctatagaaatttatgattatttttctacttcaaacaactgaacaagaaatataaaattttcgaattttttggtctcttcacttctgattttcacaacatctattcgaatttgaattgatcttagaatatcccattttgaatatgtttaactcatatcacaatagtctttacatgcatatctctaaacgcgctatttgtagaagtaaagttgggtccaattgacaaaaaatctaaataattttttcaacggggattaaggggtaaaacgttaggacataagtaagtcttcgtatgtgacaaaaatatgaataataagtctttctatcgtgtcttgaggggcaaatgtaaggaccaaattagttttgacgtggccaataatcatatataatgatgttgtaacaaatcaacttgtctcgtcaattctcttcatatttatcttaaactaagtaatggctactaaactcttgtattttgtatttttgaccgtgtttatattgctcagtgtgtccaaaatctggtgggaagctgctaatgaaccacgaggtaagtatttaaactaaatttgtaaacatcaattttaactatcattcaacattttttatgtatacaattctttgatgtaaacaaatcattttttttttgttttagttttaacgaccagagagtggctcgatagactcttcgaaacaaaaaaagcgttccttcgcatcggatttgacgaagatcaagagtattttagatcttatttcgtgctatagatttatttacaacttcacatgtatcatggttttctgaacggcaaaatgttttactaggagaaaaataatgtttaatatatccgcagaaacgggccatatgtcggaagattgggttagaagctaccgaatcgaaagcccaacaagatatcgaaccaaaccctatagttttactttggcatactttaaacagattttctgtatctgacgccgttcatttgttttactttctccttaacatccgacgactattcttatgataaagaaataatatccaagttaaataaatatttactcgactaatgcgtccgctaaacactcgtgctttccttttatagcttgttgcctatttgtcggacaatgttttataattgttaaaaagtttattgaacattttaaaattgtatattttggagtcgagaagaatcaaaagttattactaatatttattaatgaaaatgactaacacaatttaaaaacggaaaagttattcgcaatctaaacgttacataaactataaactaaaacgttacagaacctatgaaatagcatacggcttagggctcactagttattgagagttctaaattttgacttaactaaaagtccttatgaatcaatatttttcattaacagtaaccatttcagtatttctacataggagagccttctttttctgtcatcacttattactgttgcctgaaactattccggtaaagattggtttttaatttcccttcatgcttaaccagatattcacctgattctcccagtacacatgtaatttatgtgctttacataaaacttaaaaaaatactgacaataattaaaatattcgtttgcagtttcataatttagtttatgctgcttatggacgtgggaacatgcttgtagtttaacttttatttggtcgtcaatttgattaaaaattataccttcattgattctttttgaaagatacgtattgtgaataatgtataaaggatttagaacataattatgatccttgagacttgtaatattttattaactaaccgaaaacataagcaagagaatcgtggataacgacctaacgtataagaaacatgagacatgtcacaatcactttaaaagttttcctatcaaaactcgagtagaagcacatgaaatttctggatattaaaaataaataaatcaaaatagccttatattattgctgtcaggaaataattctatttagactacctgaatttccagttgaacggcgtttttccaaattgcaagcatcatatattatgctcatcgtatcattagtgcataaataaactatggaccaatttcatggtgaaaaaggggcttcggatgaaatttttgatcaaattatatttgtttattgataaaacaaacgttttttttaaaggatgacagttgtgcgtttgagatgaaaaccaaacactgctcccactcaaaatttgtaaaaatggaatttataaatatttggtgctacaaatgtcgtttggtagcctttggaaacattaaaggtaaactagagatatgggagtatggaacttaatctctttatgtggttgtatttcatataatttcacgtggcccaacttgtttctgtcaatccattgatcaaagttggtagacaagagtgaacccacacacactcacacacatacacacggtcgatctttttttctattctcgtgtccctacgtcctctaaaccccatcattatacttcttgtgttttattggtatgctgagctagagatagttaacaactacccaacaatgcgggtctggcttagtttgaacctattcgaaactagttatactccgcttgaagtcattggttcgagactaactttggagatgagtatcataaacagctctaacttaagattacaatacatcctcttgttagtctaagttgagaggtgttgccattgactatatatttctttgggaatttggtttaccaggatgttgcaaagaagatttaaatagttataaattagtacaaattcaatccatatgatatgatattcaaaaaacaaaaaaaaaaaaaaactgatctaaaagtcgaaccaaattctaatttgattagagcatgtatataattgaatccctaagtaaaattcaacccaatacttgagaaggtagttatattcttataaattatggatatgatttgattaaaactcaaacctgaacccaaaacatactagaatatacgtttttactttgtaactatttgtcacattccaaaactaaactcggtactatatttgattctgatccatacaaattttgtatatctggtttatattctccatgtgagattaaagcggtgaccaatcaaaatcattgctggaatatcttactattaagctaaatgttgttagttatatacaagccaatccaaaaaaactgatgcaaagagagataaacgaacatatcccaaaatggtaggatttgatttaatattcccatcctcttattagaaatgcaaacaaatagactatagttttatttatttattttcactataaaataactaaataacatgaacttattgaagaaaaagtatactatagttgtgattctgtgatatactagttagaacaagaatctttacaaaaaaaaaacacatgggatgttaggagaaggagattcggattccaatgatccaacggtcagagaaaaatcagaagaaaatttcacaaccgtaggatctgttcccttaaccaccttgtaatgccggtctttattaattttgagaaaaaaataaaaacagcaccaaacttatgtctctcatgtgaccgaccaccgcatcctcagttgacctgtctctgcccccactttgtctccccacacaaactgaataacaagaagaagaagactttagatatcaaatgactccacgtgtcgatattggattggttttcattggttgtatcgtgtggaccaacgaagcaacatataaaaagcacgacgcggtgccattactacaataagagaagtgtaggagaagaaagttctcatttcataattgtatcaaattgtgagaggaaaaaaagaagttcaagaaatggagaaggaaggactcgggcttgagataacggagctgagattggggcttccggggagagatgtggcagagaagatgatgaagaagagagctttcacggagatgaatatgacgtcgtcgggtagtaatagtgatcaatgtgaaagcggcgtcgtttcatctggtggtgacgctgagaaggttaatgattcgccggcggcgaaaagccaggtggtggggtggccaccggtttgttcttaccggaagaaaaacagctgtaaggaagcttcgaccacgaaagtggggttagggtatgtgaaagtgagcatggatggtgtgccttatttgaggaagatggatcttggttcgagccaaggctatgatgatctagcctttgctcttgataagctcttcggtttccgtggcatcggttagtaacaattatgttctcttcccataaaagtagagtggtaattagatcatgtggaaaacaactaattatatatagtttacaagacgtccgattaagaacttagagtgttgtagtcttgtagacgtaatggagtagtatagtttagtgctgttctttctttttatgtctacaaccaaaccaacaccccaatttatgatacaatgacaacactaatacaaatatagttagaattttggttagcagttgaactgattgtggtagcaatgttatagattttaatttaaagtgttatgaaaggacaaatatgtcgagatttttattagtcatctcaggaaatttatttacttgttcttagagacttaagactagtcctaatttaactggttatttttctccaaactgttttgaattatctgaaaattatctatcatagaaaattagaggtttcggttactacatatccgtaatttctaaaaatcagaatttatgcaccacttgtatagttgtattgttaattagacttttctatataccgaattcgccatattatcaacacaattttaaatttacatatatacatatttgtgcaggtgtggccttgaaagatggtgacaactgcgaatacgttaccatatacgaagacaaagatggagactggatgctcgccggtgatgtaccttgggggtatgttctatcttttgacttaagatatctcactacaaaaagaaaatgtatcacaaactaaagtaaatgagtttggatattttgatttgcaggatgtttctagagtcatgcaagaggttgagaataatgaaaagatcggatgctaccgggtttgggctgcagcctagaggagtagacgagtgatgatgacttgaacaagaagcaaggagctggttcattaatttaatcttaaacttgatcatcaagatcctttagaacatttttcctattcatgttatataaatatatatgttatagtatattattttgcaacaaaatttcatgttatggttttgcataattatcttcagaaagacagctatatatatatacactacttgtttcttgagtgttgagttaaaacattaatctgtttcaaaatttattgttatttcggatctatatatgtgtgtagaaacatatgtaataagtatccattatttcatctttttaaaaaataataattattatttgaatctttcattgttgatatgttatgtatacctgtgttttggaaaaaatatggatattataagcaaatctaaatagatatttataaaaaaagtctacgtaaaacattcgttagtttttacttctacttcagtaagtgacatcacaaatctaaatagatgttttcataagtatataagtgtaagataaaaacaaagaattcattcttccttttttttctcttagagttatgcttgtataatttattagtactataagatttttactagtaagtttttattccaaatattcgtatacctccgaagaaattagttaattcataatcgtaatttcacattcaaagttaagattgcttaatttaaagatttaagcttattcttcatttttttttttttttttgtaatgattctttttatagatatgcacatcttgcttttgatagcataagtactatcaattatagaaaacaccgacatgttcggtatgtcaacctagtttttgtttttctatattgttgttctgtacaataaaattagtacttggatttacaaaaattaacatatgtgattatgaaacgaacccatatgatttgttacaactgtgacctacccatgtgcgttccaaaccagaaacagcaaagattcagcccatcccctctcacttgtgcttttttcttggcccaaattaacgataccatcatcattatcaaccacactaaataagtctatttttgattacatactctatactcactatacgtacttttggattcgttcaagccttcaaggcttttcacatattcaaaggtctttgtattaaactttggtcaacattactatctaaaatatttccgttattttgaaaaccacaaacatgcgtttatgttttaaacttttaatgcataggaatgtcaacacgttatctaagtcatttttgactgtaggtttccgacgctggtaaagccgtgctactcaggcccgacccaaatggtgagacagagagaccatagcccatgaatccaaaactattacagaaaacaagaaggaaataggctcagatgttttcaaagaataatagaaataacccaaaatatatttttaaaaaggcccaaaacaatttaaacacatttttaggggcccaaactttttccaagcataagtttatattaaaaaaagtctttctgtttttaatattctctattaacaacaacaaaagttaagaaaaatacccaagaaattcgtaatcactagaccttttgattcacattttaaaaattcaaaaaggatccgtaggtaatcaaagtttttttgtcacaagaaagatgatcatagagccaccaaactaacttactccataaatgaagagcgtgggtccgacgtggcatatagccgttacagtcccacatggccgtttcaatgcttacgtggcactcctttttaaatttttcttctcccagtagctgttattattatttaaattattaaaaagggaatgaatggtcatcgttaaactcaactaaaatccgaccgttgtttgagttttatcttcttctcttgtctgaaaacagaacactcccaaaagcttatttttgctttctctttggttaaaacacaataatctagagagatagttgatcttcgtgactatgatgggcgattatggtataacggaggaagatctggtgatcgaggaagctcaaggctatcctagagcttacactaagatctgtcgcgattttgatgcttttccttacaaaaatggtcctcctttcactttcatgccctacattcttcagcagaacgaggtaatttgatccattcatgttttagccagacctagattgagtttagaattagagtttttttttttttggaataactggtagcttctctgtaatgacaaaagttatcttttttgtttgtttgtcttgtagagcttgagatgcagagaagtagatcagatgtttccagtgattgatccgaaagcgagaccaacaacaaaacccaagatcttcctcagtctcttgtggaaacagcttaatcatctagggtaagtgcttaatctcttcacagtacttaacacactagtagtcaattttcagattcttatgattatgattatgtttgcagaaatgcaggatttgatccagctgttattcggattgatccatatgggaatgttgtttacttccacgctgattcagcttctcctcttgcttggagttttgatcattggttcccttgctcaagtacacacacttctcccttgcttttagattttgagttgctttgttgtcttatttattgattacagctttttctgtatctaaattgttttttgtaggaggaggtttaacagtaccaagcaacctaaggatagtgcaatggcaagcacgcaagaacaagaaggacaagcttgagttcttagtaccatggtgggatcttcaagttggtatttctgtgaatcagttcttatcgattttcgctgcttctagttctgatttcaggtatagataacaacctttggatctataccactatgtatctatttccttgatgacaaacatctaatgaaatgcaaattttataggaggagggcattttcattcttgttcaaagaaggcgaaaacgaagaacttaacggtatacaaatggttgaatcacaccattttccacaacattttgttgaatcaaaagacaagtttgggcttgcttcagctgcagttgttttttcaagaagagatc

SEQ ID NO: 422 - DNA, 81370 bp, Arabidopsis thaliana
gatccatttgcagagctctaacgggtagcaaaaatgtcccagtcgaaattggaagatgtagaagctttactggccattttaacatggtggatagatctctgatgacggctcagaaggtaagttgttgcattactctgcgcttattttcagttgtcatttcacttgtcatggtcacacatcgaaagcccaacagcccatgccaaattactgaatattacaaattgaccccactatttagtcttataatcgtaaacagaccccataaattcgtaaattttcagccacatccataaacttgactcgaatgaagattgacaacgactgtttttcaaacacttgttttgaatttccgtatattcagtctggaagtaaaaacacagtaagaagacaaagagaagcagccatttttcttggttcttttcttggtttaagcatcagatggtttctctgcggtttttccttccttgttaatgtgaaagccttcaatcttacgagcaacctcatccacactctgcttcggctttgactcgctgatctcttcaggattcaccggtccagtttgccaaattctgattgtaccatcttcagaccctgaagcataagactcacctgttggtgcaaatctcacacagtgaaccggaccatgatgtcccttgttgcatcctaaagttcagacaaaaagaaacccatcaaaaccaaaggctttatgtgacttaactagaacagcttagttaatctgcttgtagtttttagtcactcaccaatctcctttccggtgtggaaatcaaagagtcgaacccacatatcttctccaccagcaacgaatttgttgccagattttggctcaagcgatgcagattcgatattgcagggcatgtcgtaacttttcactagtccaaaactggaagttaccaagacaaagataaacactttcaggagaaatgctaaggattaaaaaaaaaatcgaaaaaaaaggaatgagagagcttactgatttgcatcccaaaatttaacagttgacccatcggcagttgttatataccgtccatcttgactcacttcagcactggtgacaggagacttggtttctagagtttgcactattttgccactcctcacatcccataacctgttcgagaagatgagacaagaaacaacacttgagtttctccatctgtctaaaattcacagacagttttttttttatgagatatttacttcatacctcacaccaccaatatcagtgcaagaacttaatattgtttgatcaccgtgaagccatgttagtgttctgatagaaccaggagatttatcaatttctgtaggaggtgcatccaagcgattcaagtcgaaaacacgaagaattttctcaaatcctcctgtgattagatatttcgtatcctgatcaaaaagaaccatgttagacacatgcttgattcttacataatacattgacttgagcaataacacatgaacaatgaagggatacatatagcaagaccagtacaacatagtccaatctaccttaatcaaccaaagagatttactatacctgagagaaggcgcatgctcgaacaatatgcttgtgctcaaaagaatgcaagacatccccagtcaaagcatcccaaagcttcctaaagagattatagatgtagcaggacatcaatcaaaccgattcgagcataaaccaaaaccaaaatcaacaagaacagttgctttcattcctatttctcaatcacttacgctgaaaaatcagcagatgcagaagctgcacgtaaagcattgttatcaagacaagaactccacacagcacctttatgaccttcaaatgtaccaatccaatctccagtttccccatttctcaacattggttgagaatctaatcatcaagaagccatgaaataatatgaagagagtttgcagcaaaacatgtttcatagtatacaaagccaatcaacaacaatagtgaacagaacagattccccaaatttggatcttacaataacaaatctagaagatcatatttttacctttacttgcgctgatgaggaagaaaccatcaggagtgattggactgtagaacaaatccacaacaggtctcgaatggccatggcacactagcggagtcgcgactttcttcttctccatctctctttactaattttaacaaaacacacacttaagaagaagaaccctacttagatcgatcgtaagaccaaatcttagcttctaatcaaacgattcagtggttaaattggcgctaaaattcacagctgattcaatacgatccgacaaaacaaaaattgctgtctattttcgattccttttgatatataaatctaatttggagaaaataattctcgaatctaaaacttggatcgatctataattttgataggaagattttgcagctccagtggaaatgctgcttcccgaaaattcaaaagaaaaaaaaaagaaaggaaaattacaaaagaaaaaaaagtggctaatcgaagaagaaagtaactgtaagaagaagaaggaagctattgttatatgtctgagagatttctatttcgggaagctatttctttgtcttcttcaattttgattactatatgtttccttttttacaaattcgcctcgttactttactaattacatctctgtccaaaaattcaaataatttatatttgcctcaagagaagtgttacatgacacattgatgcataacagatttttttacatagaaatagaaatgtaaccatgattaagtcataccagctagaattattgtaacaatacacacttcatcaatttcagaaaaggtttttaatcctctacctatttgagttttggtcgttggttcctgattttggactcttcatgttcatctttctgaagctttctcctcaaatccctcaaattttcttcatctactttaccatccatcttcttgttcaatgcatatgcttcacccatcttcctcttgcactccttgcttgctgaatcgtgcaataccactgcaaacaacgaagttagaactatggcaacttaaagaagactttatctatcagcaacctcaaattcactagaacaactagcttcatgatattgatcacatcatttctcaaaattttagacacaataatgtttgtatctttctactatgtatatgtaaatagagacggtattactaacttggctttgggtagtccttcccgactatgcagtttgctttagtttgaacgctcaatggtgctgtccatggctcatatatatattgctttggcatatctgaatcagaaaacttattagctaatgaaagaatacacagtaaacaaacttaccaggatggtggaaacaaacttcagttacctttcagtaccggtagaaaatgcctaatgtacttcccatcaggatcatacttctttccgaaagatataggagagtagatgcggttgaactaaaaccataacaaaacattgggacacaagtgtaagcatcacaaaagttgctttacttcaatttaactatacagaacaaaaaagctaacaaagccaaagataattagaaagagaaacagaaaggagagagtgcctggtaaaagaacgacgaacatgataaccacatccaatttccattgttgattgcccagtctgaatcgatcagaagtctctcaaacacatcacgcccttgttcccaatgtatgaactaacaccagaaactaagcatgtcagtgaaatcctcggagatagaaaccaataattgtagaggcagcattaccagatccccacgagtaagaaaacaggctacacagtgacgcgctagatggtgcatccaaccccatttcagaagctataaatttcagagagagaatgattaagaaatgatgcttaaaaggaaagctaaaggcattcagtttgactaaaatctaacctgaaccatgatggcatcaatccaagggtatcctgtcttaccgtccctccaagcagccaacatagcatgatcctcgttccatggaatctagtttgcgtatggaacaaaaatattggtctaaaaaagcatgaacatctaaaaaatgaaggaacatcatcaggaaactatactacagttgttacctgtttgcagatccggtttcccttcattttgtcaaagttaggagttccaaatgcagtggtatagaaaaattctcgccacaacaactaaagtaaaaaagtaaagcaatcaactttctgcagtcaggcagtataaaaaacgctctgtaagtcaatgactgacctgccccaggagagaaactggcggcgatgtatgctttttaacatccttataaatattttgaaggcattgataaaagtacctcgaagaaaggcatccgaacttcttaaatgtcaggaattagatggaaatattaggaaaatcgagggtgaagcttaagtgggcaaaactatgtcatgaaactcactttcaaatatggtgacataactgtagtagcaggcttcaagaaagcagatggatcaccctttggtttctcaaagtttgccacccatgcctacactacaaataaaacccataacgaattcagcccttgactttgataaagaagatataaatctatgaagtcaatgtaagaatatcaattctaaaatcttaaagtgataaaattcaagttctccaggagtaagtttccttcagtccgacaaagtactcaatcgagcagattcctaccatttttttctaaaagagaaaaacttccaagttcttgaccataccttatcactgattgatttagtcaatctttttaaggcttctgattcaccacctctaaaaggagtccaatcagcctacagacatttacatgagcataagattctcagatggataaattgttaaacgacctaaagaaaacagatcacctcttacttgttcatcatctttgtagccaagttcctcaagagatggtacttctgaaatgccaaggtttccaatatctccaattggaggaagtgaagaataagacatcacaagttcagatttagcacatgagggctccccagcaaccttcagaaatgattgataactcaaaggtggcttcccaccgttctaacttgcaagaaaaccacacaaatgtacataaatattacagttccataaatgaaacatctaaactaactcggttaacactaccacttactttctctataatgtgtgcgggattgaacagagtatggctcactggagagaaaacctcaactccagttgaagaagcataatcctatagagattataaaaatgcacttgagttagctaaaatctcaatgacacgcatagttcaatcagtggtaagcaagatcaaaactttaaggcgtaatgaaacgaattttaccttaaccttaacatctaaagcttgataatacggatctgtatcatattcaaagcaaagcctcttcaccttccactgccaaaaaccccattcataacatttcagatttctatgtctacagtaaaccaatttcacagcttttaaacacactgtcgaataagaaacactacattacctcttgcaagcaacgaactagtacttcgccaggttcacctttaaaaacaagcaaccgtgaaccaagtttcttcaggctagaatcgagatccttgagactctcaagcaagaaccggatccggtttaccccggcgcgagacgaaccgggagagaacgcagatgggtctgactccatataatgcgggtcgataacaaaaaccggatacataaattcagaaccttttgaggcgtattcaagagccgggttgtcgtgaacccggagacctttccggaaccaaatcagtgaaccggatccagtagccattgatgttatgggattgagacgataacttgaaggtgaacagacgcagaatcgttgcatgaatatgtttgagatttctatagaagtttcttttgagaaattcgcgcctttgaaaagcgcgagagaaggtttcttaagacgaagatgtggttaatatacgcttcttcaactctgtgtttgctaatttgcgcggtaatcagcgtaagataaaagaagggaataggttattatcaacggttatatttaggccacgtcattactaaggagcaacatcatttgggcgatgtgttcaattatccaacatttagtgcttattagtatccatgattagtgaaattaagaaaatttacttcatatatttgagattgcaatcgtaattatatttgtatactaacattttaatctttatacgtgttgaacatatctaccgatccaacagttagcattaacaactgaggaaaaaaaaaaaaagcattaacaactgacaacaaataaaaagctaaactaactaatgatccaacggttcacaataaagcaacatcatacacgatccagaccgtacaaacagaaaacgacgccgcacaataaagcggttcttgagtatcatcgtaaacaaaaagttattcttcatcccataaaagagagacattttaagttcgacgaattattgattatttctggatccgtgacccgatccagttacttcttgacccgaacgtcagacgcgagtcgcgacgcgatcgcagaatggtacataacgtcgtggaatgtagaagcttcggcggttttcctccgcagctgcttagccttctcctccgtgagacaacatcgcagagacctcttttcagctttatccagatctgattccagattcacggttttgttgacgtaatcaggttccgatgacatgccaaaaagaggagcccaccatgaaaccgacgaaacaggtttcttacgggctggatccgattcggaagatgctcggatcgaggaaagagcggagcaggagatgattgtagccattgttaggtaaaatgtggttatctgagagaaagctcaaagctgtttttaggaagaagagaaagattaaggatttgtaaatttttggattaagaaaagaaaatggatatgtagatatttaggtggaatcagctgctatgcggtgtggttttttatagtgtggaatgttcgtttcactggtttttatcaacgtaagggtattttcggaaagagtgtgcaacggtaaatgcgttgtgcactacgataagtacggtggagatgagagcactggattataaaaaaatttaggagatggataagattgaaggcgtggagcagcgttgccaattgtcaaatgtcttcgtcttcacttttcgctttaattatttgttgattaggatatttttgtttggattttacattgcttgtgtgacttgtcgctttgacaatatccaaaatgacgtgtactcattggaaaatagagttcaactattatggaatattcttaaatcaggaataatcgtcggtgatatttgactatatctctttcaacgtatttcgaactcgtaacaaaatgtcagtcttcttttatcaaacggcaaaatgtaaaggtaaatgcatgtatatgatgtgatcatttgcatggaataggagtttttgttagatttacgaatgctgaacgcatataagtcttttaagactcatggtattatactattattgcatgtttcatcagccataaataatgtgcagagaaaaactaactaacaaaacattgattatatattttattgtatctaataagtaataactaaaataattagagctaagtgattgactgatttccttcgttattttgaattcaatttttgggctttttcctatttggcagattcgtatcacattagcaacactagggatttctgttttagttgcaagagaagataaaacgttataaagcccaaaagacccaattggtgaagcaagcccgcataagaaaaaacccaaatgttgaaccaaaaagatgaggatgcaaacttttcacgctagtgtcgtactaacggaaaacttcatatttggagacatcgagtagattttttttatctatgagaaaaataattcatctagaattttattgaggatatgagtataagataataatgaaagaaactattaattgtgtacgtctttatcgttcatatgttttgttcaatggacatatatatacattctacacacaaactactataccacgattttttttatgctaacattacctctagctacagacagaagtagaaagaaaaccaaaaccatcaggtattacatttgaagttttgaattgtggaattctcaacgaggttcgaggaacatgaatttggttgctaactaaagcaacttgcttgtgcctgtgtgcataactggactgaggaaaaaataatccttacatgtccatttcatcataatttcattttgtagtatatgcatcattgtatcattatttccacttgtatcactaattccacttgaaatgtcacacaatatagggtcccctgacacgtgtgtactatgtagtttcacacgtaccggttaatatcgagattccaagtaaaaaagtgaccaattctaaattaagaatctctctaatctcttcccaaagaagaatcatcactgaggaagaataaaacatttggggagtttcttcgctaatccttcaaggtgtgacctgagaatcacaacacaaaacaatctcactcgaaattcctttgactcatcatcatcaccatgtggagaagaatcgtctcctctcagctcaaaaccctagccgccgatgtcgtcgctgcttctcctcgtcgatcgatagccgccaccaccagacctgtcggtttctatctcgccgccaatcgatcagccatttccgcatcttctttcgttatccctcgtcgtttcagctccgattcaggtgattcatcgttgctatagtttacgcattttcagatctcggctcaggactcttacctgcgctggaattagattcgattcactatgttttcttcatcgcatattagaggatagacttaaatctgtgttggtctcttagattggtgttgctgcaattttgttttcatcttctcaattggaaggtgaatgattgtttattacggattgtattttgcagtagagactcctgcgacgaagaaggtggaggatgtaatgcccattgcgactggacacgagaaggaagagcttgaagctgaacttgaggtgattgcttatgtttactttatgtattgcaattttaagatctgagtatgattacaattgtgtttgtgatcatgacttcacttctcgataattttctggtatagcaatgccaatggagtgtatatttctgcttgataatacacttcagttgaggaaaatttgattttgactttttcattgttttcttgtgatagggaaggaggctggatgatattgacttccctgaaggtccttttggaactaaggttagataagtttcttttaccagagatatgtcgtgactcctctttgaatatcttaaccttgttttttactgcaaagtcatcagtgtttctaggcatgatatagttcttatgttcatcactaacacacgggcatacgtgaaacaaaccaaggacacttaacttagctcgagtattatgaatggctttatgataaatgtagctgtttcaatgatctcaattaactagaataagtatgtatcttgaaacttattgcttcttcaaaactaatatgagtccagctggtttactgacttatatcgatcaacttgcattctttgctatggttcataatattgctttagcaggattactatatcatgcagcaatcactttgttatgtcgttttggagctaaatcatcttgatattacactggtcatatttctggatttttatttttttttgtgaataatgtaattagtatatttccttcaatcaagcactagcttggggttgaatcatatattggttttggtgaattaaaattaactctaagctgtgtttgttaatttacggtggctcactgcctatgatgcttttgtgcacgataatgacgaaaagattgcggatgtcacatacaacatgtgcaagtgtctgtagatcatggaaattcagttcttaacatccataaaaaacttgctccaaattactgaagatatgtaggagtatatgactgttttgcatgctatgacaagacatttgattttttcattttcttgtgtcattttatcttttgagtgagcagtattcattttcttttggctacacaattggatacttattttttcattttcttgatacacaaatttggatgtcattttgtattgccttaggaagctcctgctattgtgaagtcctactatgacaagcgaattgtgggctgccctggtggtgaaggcggtaagttcttcccttcttcaaactttagtcgcatattatggacaatctttaatcggcaatcgttgttgtcattgaatatatcaagacacattatttaccaatctaactttctcctgaaaactgcagaggacgagcacgatgttgtctggttctggctggagaaaggaaagtcctttgaatgcccggtttgcactcagtactttgaggtaagtgaaagtcgtatcagatactctactcagtaaataaatcgacctagcctctcatttcatagtcataggccagacgaatctgtcaaaggattagagcaagaactcattaagctttcgaattcagaatattgaattggttgaataatgtatgcttgcagctggaagtggttggtcctggtggtcctccggatggtcacggtgacgaagacgatgagcaccaccactgattccggcctctcccttgccgcaaatttttctttttttatttgcacattttcatatctttaaaaattttatgaatggaataaaacaaaatatctaccgttttggtgaaacacagttgaaaatgttttttgatctttttagaacaagactcggcatcagagtttcccaagtgccaaaactcttatgaccgttgtttttatttttgtaacactcttgaatcagaatcagaatcattcttggcttttgcttattatatgattcaccttttatttatttttatggttcgatgtcttttcatatagggacgttttgatcgtgtccttgattccttgtgaacggtcatataattcaatagattatagaaattccaattttcttcaaaccttctttgttgattggttaaacactaattattcatacaatgcacctaattttactttccttaatttattgtttacaaaaagaaaaataaaacggtggaggtctgtaatacatcgagccgcttttactcctccgcgcaggtgtctttcgatcctgtcctaacgtctttcgattttttattttcctcaaaggttaacaaattatatatatagaattgaaggttaacaacttttaagaccaaattttacttgatattggaaacgaaatcatgcatgcatgtcgttactatttcaaaattgcgttatttagctatttatgtcatgtacctttgattttctcattctcatatcaatatttgttcatacttacatgaccaagcagagattcaaattatagtattttgtttctctttgcgaacgtaccaccgtgtgaaaccaaagcaaaacctaacaagctataaaatagatgataataaagataaacaaagtagtatagcgttgtcggaatttacccgaggaatatattccaaacaattcttaaaaggaggagtcattaaaataaacaaatacaactctaaagaaaaagaacgtccgagttcaatattctgtttctacttaagacaaatcaccaaacatacaattattctctaatgttcgacacagcttgccctcattacaaatcctctcgttttcaaacatttttatttggtaaatatatctctcctttttcaaacacgcatgcatgatgcatatcagcatatatacatacatctgggttttctacctcaacatatatacatatattttaaaacataatttgatgtatgtctagtgtgattgtgtgaagttagatataagtacaactaatcatattatcggtttagaactaatgtcacgactttacaccgtctccgcttgtgtgtttaacaaaatagttaaataaacacgtagtattagctgactaatatacacgtgtttaatatacttttttctcttcggtgttcatacttaagttttcgttttgggtcacgacacatatttttatatatggtataccaaacttcctttacatatatgatatgctgatcatccatccatgtgtctctccgagttctaatgtagctgccgcatcagaatttttgtcgaattctgagaaagttacaaatattatgtcgtatatatttcttcaaaatgtaacatacggaaaaagaagaaagagtattcttttcaaaattatcatctttagtttttagtttaaccagaactattaagaataccagaaataaattataatttgctgataattttgaagaatgagacataaaaactaagtaactaactaatataaattcaacattaaccttattttgcaatgaaaaaagtctttatttttcaaatttctaggtaacgctgatcttatttaaaagttaaaacatccactgctgaaaattcatgcaaagtagagagtattagcgcgatatcaaataccacttgtctcccaattaaaatactaaaaaaacttgtaaattgcttgcacaaaaagatcaatgcaatatgactaatttctctaaagtatatattaacatatttcaatgtttatccatacagctacgggacatttcatccttcactcctttaactcactcacttgctagttgctacttgataatacttttttttaccggataatttacagataaatgaacaatatatactttagtgagttgattaaattaacttattaaggttgaaatcagtataaagtgataatgaaatgtatacctatgaatatatctcacacactaagaaaaacctatgcaatctatttttgtatacagaattacagacgaagtcacgaaggcatctcgtatcttgtattatgtagaaagaaaatacccttctttggaagtattatattcatcaattcaacttctatattagagtaaaataatcatgttggtattttttttttctcgtgtctaaatagtttaaaattaattggcagagacacatttcagtgatcgctaataaccttaaccaaatataaagaatggcacgaatagtacttcttttcgatgtgctcgctagctcgaaaaaaatagtacgagaaaaatatataacaaggaagacattgttttaatctgcagacatgctattagaattctttactatttcctcggcagaaaagaaaatttatttataagtttaagagtacatattctctaatcgatgggatttatgcaagtcatattaaagttgcataaacctttaatgggttaaccttttattaaacaaacttttaatggattttaatagcccttcatcacacgaacgaacaaacgctatatactttttaatccacaaattagcaaactaacattgtagtgctgaaagcatctattgtcttgttttgtgtcaattaataagaaataatttatcaaccattttttctaatttgggttgactattcaccaccaattttaatgaaatcggtgggtcactaaaagagttgactagccaaaagctaaaacaagttataaaaaaaaacgcaaaagttgttgacctttgttaaaagtttatgtaatctgatgccgtcattactcactactaaaaacttgcaagtaatgtcaacaatcaaatatatcatttgcttagactaagcattgttaaacagttttcacggcgaataattttttttatttcttatatatttataattttctaacatactattgaatcttcagcttctaatatatttaaaactgttgaagttttaataagaagcaaaagaaaaatatcattacttcccaaaaacagagaaataatttcgaaaaattacatttaaaatcataaaataacatttctgtaaaagtaatctatataatcataaattactctaatattgccaattaatatgaattagaaatcaagtagccaacttattagcagttgatatttcttcacggatgattaataattaatcatgtcggaagattagtaatcatttcgtaaaatctatgaagatctttgtggtataatagaaaaggggagacaaaagacaatcattacgcatatacatgtaatgtaaccatgttcgttgttcagtgttcacttgatattcgtctctttatttctataatttgaacacaacaactacattaatgcaaaatagtagactagatgatctggtcaaataatttcatgcaaatttacatcttatcagatgctttaaaacatactctaataatcgcagtacatttttttaaaatctatataccatgaagaaaatgagaaataggtgaaataagtgggcttgatatcgtcagccaattttgctggacaaaaagcaacagtggcaaacaagagagggcagagtaatgaaagaagcgttgaaaggagatagagaaaagatcaaagtcttttttggtttattgctgcatgctccacatgaaaatccagcttggtcacttatgtttcttacgcatcatcattacactcagtgctctcagatttctcaaatccaagaaccctaaaataaaatatgtaattccttttcctttgtacattgtgtaatgcaaatttttaaatcttttattttttctcgtaaagtttcagactttttaagctttctggttaatgggtatccatcaatcatctcacttttgtttttcatatatatttcattaaacaaatgattgaacaagtagattttttctttctttttcaattttggattatgccctcatgtttcttgtaatatatatacatacttgtgttatgctataatatattcttttacgcggtagagtttttattttcctccactgccacaaggcattgattctctctttctctctctctcctctgtgtagttttgccgctagctctgctctggttttgattttgattccttgtgttcccaaaaagatttatttcttttgtttttataacgagaaaaagagaagaaaattgattgtctctttccatggatgccttctcttagactacgactagtatagtttttttttttgtgtagctgttgtacacatttaacatcccatagtgaatgattcagattcacatttcttttcttttattccttcctctcaccatcacacctccaaatttgctctataaatacacatttcccctcccttaccttctcttatattttccattggtatttcaaacttttaactactatatcacaacaaagtctctaaattgtggtgaaaaaagatcattgaacaacaacaatgagctattctcgtcaaagcatgggttctggtttgtttctcacttacttgtttggttcatgttagtattatcttaagtgtgtcacttgtgtgcttatgtgattactctgctttatatatgtttctggcaaaatcttttgtaggtagtagaagtacaaggggctatgagtttggaaggacttatgttgtgaggcctaaaggaaagcaccaagctactattgtttggttgcacggtcttggagacaatggctccaggtattataatactatctcacttgccttgtttttatgaacaaaatcaagtaataaagaaagttttatgctttgaaagcttaaagtcatacttgtcaaaacaatgcctaaatgactttaatagatatcaaaacaaactcttcttaggacaaaacttaacacttttcctctgttagttgaacagtttcaagtataaatgtgttatgaaaagctttaactttttggtttaattgactactacaaataaaatgagctttagaaagtagaattttggcgtgttctttgataacaacttctcactttggctctgtttctttctgcagctcgtctcagctattggaaagcctacctcttccaaacgtaaggatccatggaaacaaacttggaagtaattttttgtatcactaaatattcttagtgaaggttctgataaaagatatatggtattctgtcagatcaaatggatttgtccaactgctccttcgcgtcctgtttcgcttctcggtggatttccttgcactgcctgtaagatcattcagttagcttctctagacttcatcaaaacattattttaagcgtttgccaataaaaccaatttctttgctcctctcagggtttgacgtgggagaaatttctgaggatcttcatgatgatatagaaggcttagatgcttcagctgcacatattgctaacctattatctgctgagccaacagatggtaagccaaccatgagttatatatatcttcattcctttgtcacaggtcttgatataatatatcataatctctagcttaacttgaaaatgttatttgtggtttgtgtcagtcaaagttgggataggaggtttcagtatgggtgcagcaatagctctctactccacgacgtgctacgctcttggacgttatggaaccggacatgcttatactataaacctacgagctactgtaggacttagcggttggcttcctggttggaggtataaatatatgtcttcaaccctttcttgtcacttgttaacacagagacttaacattgaaagcttaaacataacaatgcaggagcttaaggagcaaaatagaaagttcgaatgaggttgcaaggcgcgctgcatcgataccgatcttacttgcacatggaacttgtatgtttacatatatcattatatgatttactgtttcaagataaaatcaccgaagagaatctagaattttattcactttatgtgttttttggttgcagcggacgatgtagttccttatagatttggagaaaaatctgctcattcacttgccatggctggattccgacaaactatgttcaaaccatatgaagggtaactgttcaacctatatcccaaagttatcattatcaatctagttgttttagtctgagattgtgaggttttaatgtgattgtgtaggcttggtcactatacggttcctaaagaaatggatgaggtggttcactggctcgtctcaaggcttggtctcgagggttcgcgttaaactttacaagcatcttctcagcatctctatagctattatacgatggtgtagaatatttatattatatatataaggggtggggggtttcttggggtatacggtgttctctcatgtttctactgttttgtgatttattcatgcttttctactgttcgattcttgattatgaataataaaataaataaataaggctcgttgggcttctttgattttgctatcttagtttaccaaagtttttattcatacgaaatccaaagatttttgagtttctgagacattattttaccgtacatgaaaagacattcttatgaaaagaaagaacaaaaacataataacttccactcgtcagcataacttccaaactttggatcaatcttggtttccggagacgtctttaagcttctgctccaattcaccttcctagaatagtaaaagagacttgtgattaaacaaacacaatggaaacgggggaaaaaaaagtcaaacagggtctgctttaagtggaactaaccttgtgcatgttaaggatgatgtctgagccgccaatgaactctcccttaatgaagatctgtggaaacgtaggccagtggctgcaaagaaataaagacttgaaaatcaaagggaggtctagatcatataggtcaaagattaaggaatgaacggtaacgaacttcaataacaaagccaaactttatgaaaaaactttgagaatgagattatacaactctctgtatgaaactttcattaagtgtccacatactcacctgaaggatttcacagcgtttttcaactcttggtcttctagaatgtttctagaactgataggaacatctaaagaaggatatcacaagatagtagatcagaacacagagcctaacgccaatagtaaagaaaattcacagaaggcttcttcagtttcaatcaacatttcaacaaaacttactatattgctgcaaaactctgacggctagtgagctaaacccacactgaggagattcagggacacctttcatgtagatcataacaggattatccttcacatcctacacaaccaccaaagctaaaacagcattagcaaacacctaacaaagaaacattcaacttcaaatctagagaagctggagtgtacattctcaacgatatctttaagtgagtccgtagaatcgggagggactttttgtgtaggcttgaaatcatcatgtgtatctgaatcacttggcactgttgaggaaaatctcatcatcccattttggtagactgatgcagacgtctgcaaacaaaaaccacatcattcttctccatgttaaattcaactatcaaatgatcatcaataccatcttctattggaaacaaattcattttcacataattcaaaaccatacgctcacgtaactatctaatccggttcaactaacaaaagaatcagaacctcaaatgttatataaaggagcaatttttaagtgattcaagatgggaaaagagaaaactttattgagcaaacattagatacatcaaaattgagtaaaagggttatgagagaatctaaccaatctgctagaacgaacagctttgagattagcgattccttttataagtctgctcgataaagaagccgccatctctaaatcacgcagatttcttcaaagtgttccgcggttttgtttaatcgaaatctgtctagaaaactatcaagaacaggaatgagaaaaaaagattagagagggtagctacgaggaagaaggacggagctagagatctttacaatgtcgcgaccgcttctcttcatctccagtgaccgacccagagaacgacgtcgtgtcattactcataaccctaagatgttatacgatgtcgtttcggatggtcaccaaagtatacgtccgttgacgtcttgataaatttatttggtttgctcggtttagataaattactattcaatttttttggtttacttctctcattttagtagatctatgaaattgaacgattcgtaaaacgtaaaagcagacacaaatgttttattgaaatttttgataaaagaaattgaaagattagtaaaacccgtttggattagcagctatatctgtataatgctaatgcttgatgaccaacatacgaagtggaccatgatgtgtattaataactgtttattgtaacaaaaatagaaatttgagaacacataagttgtaacaggatcaaatctaaacttattggctggaaattagaagtctccaggatcaccgtcacaacaagaaacacagctgaaccacaaccataaagaaagacacaacggaaattacaaaaacacaaacacaaaactcaaaagaccaactaacacaaagatactttcatatcgttctcaattttgttttctcatcacttcctctgataagtctgatgagtcggatcagtggttcgagtagttgcagtagtggtagtagtacttcctggataatgctctttgtcttcttcctcagtagccatcccaaaagtatgcttcactgcatcagctgcacccattgccatttgcttaacatgctcaccagtctggctcaagaatccacccgtcttgtctctaccggcttcagccgtctcctttgtgtactgtgccgcaccttgagccgtctcctttgtatactgagcagcgtcttgagccttgttctttatggcttcgcctgtctccgataagtagctcccggccttgtccttggcctcgcgagctttgtcgccagcttgagatgtcttttcttttgctgcttgcgtcgtctcatgggccttttgctgtgccgtttgggcagtttgagatgtcttctcttttgctgactgggccgtttcatgggccttctgctgagccgcttgggcagtttgagatgtcttatctttagctgactgggctgtctcatgggccttctgttgggctgtttgggccgtttgagaagtcttgtcccggccctcctcagccttgtccctcatcgttcccatagcttgtccagtcttctcctggtattacacagacaaatcatcttagagcttatataatgtggttttacgtatacacatacacaaaaatatattcttattacctgggccttgcctctggtctcaccagctttgtagctctgttggttggatgccatttctttcttcaaatgtgtatcaaacgaaactagataagttttaaaagcttttttcgtaaaagtatttgttgttgtagtagaaactgtgatttgtctccccaaaccatcgggacatttgtagtgtgtcttggtcggcggagaagaagacacgtattagcacattgaaacgtgtatagctgcgtggtgtgttgaggttaaaagaaaattaaaaaaataggagtttaggggtgttgtgctttacgttgcaagcgttagtatgcggtttctcggtcttgtccgtgttgtcctctgaggttgcgacacctcatggttaagaggaagatgcttgctacgtggcaacaccataagtatcgtcgtcgcatgttatgagattgctaattttcatttttttattgtatcatggaaatcggccgtcggtcggtacatgttccgtgacgtattaactatcaactaacatttagattatcacgattaaaatactctttaaattattatcttcacttacaagagccaaacttgatctcatataaaccaagcaacttcgaggttattagctttaactactcaccttcacataaatagtgtgacaattagccaaggaaatttgccttgtgtgaatcatatgcaaatatttagatgatgtaattagtattgtataaatactactaattaacatttaactatagtctatagacacactgagacaactatcactgctacacaagtgtgacaaatttagatgtaaccaatatacatatacgatgtcagacaaaaaaaggggatgagtactaaaaagtgtatttatcaaacacaaatgaacccactaccaagcctcgagcaaattttagtggcctccttgatcaatggatccacttaaaaagaattacattgatatttcaaaattttcaccaattgatatattctctactttcactttgattacttgaaaacattgatccaaaacgtgttatggattaaaacatatataagaacaaatgaacaatatggcactcttttggaacaaacgccatcgcaaaaccaccgagtcatcccaattataagtttgacggtaataattaatcgttggtggccatctatttgtaagaaaattgtttttgttttttcctttttcaaattgtattgaacgaaaccttttactatgtttaaaaacatttttgagcgtttgagaccgtaataaaggttttgttatttgttatgcttgcagttaaaaaagctaattacttaatcttgtaaaataataaacataaaagtaaaatgaaactatgaaagaggtgatgcatggatgggagtcccaaagagaatcgaatcagctcagttcctttttttttgtttgcccactttactcttctccaagagaatggactccagatattagcagtttccctctcttttttattttgttaattataatagaaaattttagtatatttcgaagattgcccatttttgtgctttgttctagttaattttaaaaattttatgggaataaacagcgagagaaataaaggaaaattaaagtgagaaataaaggaaaagatggtcaaaacgaaaacatcgaagaattattccgtcaccatcacccaaatttatctttattgaaactctctattttgcctcatcccttttgattttccctttatcttttcttttcccctctttttatgtttttttgacccataattatactagattttattttgttcactatcatatttgtatggttctctcatatctattatttatcccatcgacgcatttgtaatcattttgttggttatacccttttaaacttaaattatatgaacatcttctttacaaaacttgggaatgattttttttcccggtattattaatgtattgatattaaaactgatatcaacaatatattatgagaggtcatatgttagctcaattttgttcataaacatctattttactaataacatgaaccaaaaatttgtaaatgtaatcaatgaaaacaaagaatgataacgataaaacgaaattatatgatacatattatagagaaatttatgttctaacaaactaaatatattatctttatgcatatttgactgcaacctattttttaaaaattatatacttgaataaaattgggaacccatgtatcactctatagtaaatgaaaaagtcagaacacagtttaaaaaatgttaaaatacaataagattttgtttttaccactttcaacatataaatcgacgtaagagcttcaattatattcgttattaatccactttcaatattatatattcagagtagaacaaagaaatagggcaagctagaagcatcgtttaaatatgacaaatcctaacacaccatgttaaacttatcaatatccatcttattgatcattctttagttttaaaggttacaaaattttgttacgttgccgctaagcaaaggagaatttgtattatattttttgtaaaaagaaaagaagaacaaaagatagtgaatattcaaaattcaaaagtagtataaatttttattcgtgtctcggatgtcgattcctttgcctccttaaagtataaatgaaagagacttaccataatataattatgagattaagctgccttttcctatatcaaccaaaagcttataccacgtagaagataccgaatcgattctctattcaaagatatatcatctttatagttgtatatgtacacctttatctaatttcatttagaaattttgtttacattttttgtgtcctaagcgatcgatttcctagctagggtttattaatgcctattattattcactcacaaaacggtctatacgttaagaaatatatgtatgtgtatgtatatttaggtgtgaaaatttgaattatcaggcttataatgttatatatataacaacttatcacaatgtaaagtactttgtaatattacctttacatttaaaataagatctagaaacgaatatataacgtcatagattaaatcttgtaatttcagaattagttgtaaaataaaagtatctcttctttttcaacttattatatataatacacatcaatatattgatttttcgttgtgatgaatctcgttacttctgttaacattaatgtgttaatttgtttgtgataggtaagcaaggtcgcctagcctagctatagccactagctacttgaattaaatacgatcgttcattggtaactgaatgatgagcttccttggtgttgaagcgtataataatcaactaataaaatatagttatgaattacattagagatagagggtcgaaaaaggtacgagtcaaaggacttttgtgtagagctagaggttaacaagatctctttcttttagttgtatgtgggctcctaagttgttttgttagcttcttattatgactcttaatttgcttaacattacactatgctttgacccaaaattctaaccaaagtactttaaatttacaactgttatacaaaaacaaagaagtgatcaagaagataaaaagaacgactggtgacaaaaaacaaaacatgtcgagtaaaaatcaagttgtggcatcaactgttgagtctatctttgactatatataattttgcataaaggaagattaatttgaaaaacctatcaaaacatccgtgtttcaacaacatgcattacgcatgtttcattcatgtggtaaattttatatccatatctagtataacatatttctaattttaaatttttttaattcttgaatatgaagtagtagtccatgtatttgtgagtaagagtaacatcataatacaacaaaagctatggccaaagtaattatctatgttataaattaaattaaacaaatatatatatatatcataatacaagaagtactctaagctatggccaaaaatattataggcttgggaatctcagccggaattttcacttagtttattttaaatattctcgttttttttgttgctcttcttttgcgaaagtttacaatattgtggtgaagaaaacgaaaaagtaattattattattttttttctttattttttttcaaacgagccaccagttgttcttgtgtgttctatttaagcccatcctcttcgcatcactctttcaaagcctcgtgtcttgatttctttcaccaaactcatataatcacatatctctccaagttcatcaaggtcagtctctaatttatattattttgtaactatttgattattttaggtatattttcagaaatatatagccacaagaaattgacaaataattaatacaagtaagaaaaaattgatcttcaaaactagactaagtgcatatatccagtactatacatatttaaatttgttaaccacacacatcgtgtttttgtccaaagttttaacgtaaacaatagtaagattttttgtttttcttagaaatatttctattaatttctgttaatctttttaatggaaatatctaatagaaagattcaaatttctatgcatgatgttacagaaaataatataaacacacacatacaagaactgaagaatgagcagacccggagattggaactgcaggtcatgcagccatctcaacttccagcgccgtgactcttgccagcgatgcggtgactctcgttccggccccggtggagttggtggcttagactttggtaatttcggtggcagagccatgtctgctttcggattcaccaccggctccgacgttcgtcccggtgattggtactgcaccgtgggaaactgcgggacacacaacttcgccagtcgctccacctgcttcaaatgcggcactttcaaggacgagaccggcgctggaggcggaggtggtggcatcggcggtccggccatgtttgacgccgacattatgcggtctagagtccccggtaacggtggtcgctctagctggaaatccggcgactggatttgcactaggtaccaaaatgaatatacttggttgatataactcgatttatgactataatatatagtttttatacgtacctatctaaaattttgattgataaagattataattgaacttgaaaacaggattggttgcaatgagcataactttgcaagcagaatggaatgcttcaggtgcaatgcaccaagggacttcagcaacagaacctctttctaagttatacaaactgcttttgaagtagccttgtctccaatttcttaggtaattcaactttcaaatatttatatatatttcgttacacaaatactatttctgcctatgattaaaaatctttatataattatactgatatgtttgaatatgcttgatttttaggcaccgtttcgatcaatggaaaggagaagcaggagcaaaagagagaattaaaagatgataattttgttagatgttgcaatgagagccaatattgtaactttagctgtcgtgcttttggatgtattatccatttttattaagatttcttttcattttctccttaattcgtaatttttcttttgcagtttctttttaagagttttattattctaatcattgtacgctgcatgtctttcttaaaagaagattctcttctcaatttcatcgctttatacatgagttgctactttctttttgtttttgtttctttgttgtccagccttttcaccgtatattcttatagctagactgtaatatacttactatcactttttagtagacataattctatcaacctagtgaccagtgactgcaataataatcaaattttttacaaacacacccccaaaattgtctaacttccaaactatctgaattttaaaatgcttaggagataataatatggagattcttaatcaacctaagaaataaaaaataatatttgatgttcttgtctgtatttccaaatgaatatgatcaataatgcaaaaacaattctcttttaaagaaaaattggagctgagagtaagggccaataatgggcttatatgggctataaaggcccaaatgaaacaaaagttgaagtttcgtgcttcgctgtacaaagacaccactctggttgtatcgaacgagcgaaacccaaccaacgacgagcgttcacctcaaatattttgatttgatcaaatcatctccacactcgccaaatcgttgtgtcctcgttcatatcgttatcgtatcagctcaaaaatctcaatctctcttccttacattcttctgtttctcgaatccttgtctccctccatggcttcctgtaagtttctctacctgtctcttgttgtcttgcttgttccagttttcttgggatcgtacactaaattgggtttgtgtttcctcattcaaatttgaatgctttcgtagttttctgctctcatagaatcatattcatcgaaaggttgtaactttggggattctgtttattgagtgataggaaaactcagaaagggacttaactttgaacaattaggttgattttggtataaattagagatctaaagttgaagaatttgtcttcagtatctgtttcaatggagatgagattcaagttacttcatttgatattgaattgccaagctaatctaattgatgagtttggcagtgataagttaatttcataatttgtatctcttaatatgaattactcgacaacattacttaatctttcactgttgagtatacgtggagatcggttaacgtgagtttattctaagacattatattttgaattacttaaaactttctggagctatcttggattgagtgtataagatttgcttatgctcaattttaaaaagtgagggatcatattgaagataagtgcttatttagtctttctttttgactctgtcttgttttggctgatttcccatattgagaccttggcgtatgacgtatgttacaggtagcctaggagttcctaaaattaaaatctcggcagtagaccttagtagagtaagatctggaagcttactgataccatacaatcaaagatcattgcttcgacaaaggccagtgaagtacttgagtctgaagacaacatttggatctgtgaaagctgtccaagtgtctactgtcccaactgcagaaacatcaggtacacttatctctatatgttttcttaacttgaatatgctcatttttaccgattttactatcgatatgttttgcacatcgagtgtgttcacatgtgggctgatgtgttcctagaaagtctcttttagttttcctttaatgctttctgatttattcttgttatcaacagctactatagaagtaaaagattctaaagagatcaagtcatctcgattaaacgctcagcttgttcccaagccttctgaggtgggttttgattttccatttaatgttagaatgtcaatttaagaactctggttcttctcccttattgtcaaatggaagagaagaaatgtgttgtcttgaggattaagtggagaattcacttgttgcctgcacaataaaaccatttgagtctgtttttttaattggatgcattcaatatgatttctttttcgatcttttaggtggaagcccttgtaactgaaatatgcgattcttcatcaattgcagagtttgaactgaaagtaaggctctactcaattgaattgttgtcatgttattgctcttttgcagagtcatctcagctaagtttttgaataggattcttatctaataatttcggcctctttcatttgcacattctaatagctggggggtttccgactatatgtagcaaggaacatagctgacaatagtagtctacaacctccgccaactcctgctgtgactgcttcaaatgcaactaccgagagtcctgagtcgaatggatcagcttcctctacttcactggctatctcaaaaccagcatcgtcagccgctgatcagggtttgatgattctccaatctccaaaagtaagagaccacacaactcaaaggcaaaatgtcatatactctgttggaaaatgctatattttatagtttcaatcagaaagttgatcccaatctaaatggtgtgtaatatgtgcaggtagggttcttcaggagatccaaaaccataaagggtaaacgcctgccttcgtcttgtaaagaggtataaccaatcttcttgaacagaagagagtgtttgatttcatgggggaaaccactgactaatctcttatttgctcttgtttaatctgacagaaagaccaagtgaaagaaggtcaaattctgtgctacattgaacaactcggtggccaatttccaatcgaggttagataatattccattttaattcctgatttagtaattactatcacttgcttcaaccaactcagttaaattgcttctctgtttatcgatcaatcttctagtctgatgttaccggcgaggtagtcaagatactccgagaagatggaggcaagtctctcgtcttctttaacctttcttcgtttttcttaaaacctcggtgtaatgatttttcttatcgttttctcattcggaacagagcctgtaggatacaatgatgctctcatctccatccttccatccttccctgggatcaagaagcttcagtaaaaccaaattcgagctggttttgagttatgacactgtgccttgtgtatgcttttagataaagaaacttcattcatatttgtatttgtcttttgcttgtatgaaagttcttctttaagactcttttattctgtatgctttttcttatatataaaaacattatggtatttttttttaatcgtacatagatgatttatacacatacaatcccaagattttaacgataggtgattctaacagttaaagatttggacattgctgttatttgacagttgattattcctaacgttggagaagaagctgctttcggaatctttgtataaatgcctctgctctttcgttgatgtcacgttccttcaccactggcttcctcgccggaaatttctccaccgtcgccgctgctctcttaggctgttctacggccctccttggctcataggttgatgatctgtaaccagaaaatatgagatgagagaaacgttgattcatttggtggttctttatcagtaatgcttagttcttgctgtcttcttttagtactcaaatgatcatttgtgtgaacatatatatagataaaaacatgcgtatattatttgtaatgtagtatcatgtatggttaaagatgtggctctagatacattgaacttttgatagaataagcttttttggattaagataaacattagtttatagtgctaaatcattagatacgcatatgtttgtgtatttctttttgaaaattcctactattgcatcttgatttttttttgttaaaaaacttgcaaagaattttcaggtttttattttcctcattttcctgaagattatcctactttcgactattaaacattccgataatatattctgactacatatttattcatataatattttctttcacgaattagtgcatattataagatatattagtatatagtgaaatctgagtcgatgatttgaagtttcgagaaaatacaaaagacagataaagtatgtgccgtgatgaagacaagacaaccataatattaatcataggaaggaatacaattattgaagtatggcctaaatttgtgcctaactctcactttaattggctaagcaaatcatccttcaggagattttgtttttatccttagatatttgagatcaataattacggaaaaaggatattaatccatgcgccgcataatttaaagagatgacatcatctatatttaacgagaatcaaactttcttttagttaaaaatgaaatacaaaaccaataagtaaccatcaaaacatcgcaagcttcaccaaattcttcaaactctaacccgtggcgtaaataatacaataactctcaaatagaatacacaaatagactaaatgattaatctccctaatcaaaatctacgcaactatctttaagctctccatgcacaacacggttcctacaaggaaaaaaagaaatgacaaacgagtttgtaagaaaaatatatacaaatttgtctgatgaacaattaatggactaggtataatctgaatatcagaaaagctagtaattttaaaacatgccaaagtattacctcgatcgagtgtacatattagttcctgtctagtaacttgagaactgttacacaattaaataaaaccttagtaataatatatatgaaatgaagcctgtgtagtaataaactaataatatatctatatattaaaaagtttatagaattggacctgagaaattaggaggagaggtactcaagatgtacaaagcgtcacgccattcctgaggtgttttcttagaggccatggctcggccaattgtgaccagagccagcgggaggccatcacacttggctgcaacctcttgagcaactttggttatgtccgggtggctcttcactatctcttctccagcattcatcttaaacaagtcccaagctctctcccatggcagcttctccattttgatcttagtttgtgctcccatttcttgacaaacctcgtccgaacaggttgtgaacacgatcttagacctgttcagtccatccggaggcggcacaccagctttcactattatcaaaattcaaatccctaagaattaggaccaagggtaacacaagaagacttgagtcgcaagtcatatataacgcaggattcttgaatcacaagtaattatttgttacctagatcgactttctcccaaacgtcatcgaggaataaagcgaatcgtctcttgctaagtatctcgaagatcttaccggctttctcttcctctgtcttgctcatccacgacctatcaagaaaccctatcttctctcggatcgtgtcctgaatcttttcaagattcacattcttggacacaaacacccaaatcacaaagtcaaacccatttaacttgtgctgaagcaacctgttgtttacctgagtcaacaccgtcgtcttcccaacaccttccacgccgtacaacccaataatcccggtgttatccaccgtcatacacctccacactagcccggaaaccgcctccaacccaaccgtctgatcatctctatcaacattcgaaatcatcatcgatccactaccaatgccactattctcaaccaccacatcgaatgttcctctgctctttatctcctgaacctctttcagcttcttgcaaagcttcttgtccagcttgtgaaaactcatcatgctcgatccattagaagaagaggaagacatcaacgttatcaacatttcttctgcttctttgatcgctacatcggcttgtctaagccagacttggactttctcgagccgcttcagcttctgttggtcttcatacattttgacccttttcatcacaatgttgcgtaaatctttgagctcctctgtagcggttttcagcttcttcacgttatcgttctcttttccgacgtagatgcatcgtgtcaccatactcttgaaatctttccccatccttacaaagttacttagttacaatctaattttctttaattcaaagaagtaatcactcaatgaacatataagttataaccatataagtatatagaagatcgtgttagccatggcttgtactgacccgcacgttgtgttttctttatttattcaagtgttagtcgttggaggacctcaagatttatttatcctattttattcgatcgtgtgattaatatttagatgaattgaccagctactttgacaataatatgcattagtatactgatttctctttattaaaccaaaataattcgttgattgtctcgtgttatggttatcatgtcatagacatacaatgatgcatacaaatttaatggggaaatgcaaaatatgagaatcttgttttataatctagtatatggctctagctagtagagtttttcaacttttttcctcaagataacgatcattggtctgaatgtcacaaactaaccagtgtacatgtagtcttgaaaattagagtatcatactatgcaatctcatgatcaacttccagttaacaacaaccaacattgtctgatggagatgggaggttttacattggtttatacaaagttgtgttttctaagcctcatttgctaaaccatgaagatgtcacaagaatgcatggaaatacaaaagctgccttgatagaatggtataaatggatgtataaaactctgttcttgagaagaaaagcatttgcagaggtaagtgctcatagaactgaagagaaagtaagctctttaggaggttcataagaatgattttgaaactggcagaggatctgcattgccctgactgcttctgtgaattcaaactgtaatcttttaacacaagttattgtttattttcattaaaagcgtcatatttcaatcgtttttttaaagttcagccgctcttttagaatttaacaaattagtatgtcccttcagagcttagaccattcacgaatttcacttccctaaaactattcgaaaaaatcataaacaacactgcgaaagaagaaattgtcacaaaacgtagctgatttaaagataaaagtgtctataattataagttgaggtttatatgattctacagtttcaaagatgatggctacaaagatgatgacccgagcgttgcagaagctacctccttaccaacgaccagcttgttatgtagtcttagtctttcgatgttataacgagcaaacccaatgcaccaatgagtatatactaaaagaagagaagatgaacaaaaatcttctggtgagtacatatatctcaagtcaaaaaccatgacataaattgcaggccgtgttagaagattgtaccttgatgataggcttttctgtcatgataatagtaacccatccaacataaggcaagaatctgaaaagagatcaaaagggaacaatttacggctcttgaacatttcgcaccagtttcaaggagatcacaggggcacaaaagcttgttgaattagagtgtttacccaacagctctgcccatgatatgatgcctgtgaagccaaagctgtccttcagcatagagaccaatgtcatcaatgtcattgttgtcacctggaaaatgttaagttgtgtcaggaattggttactataaagggttattcattcataccaacaaaaacttagcaccttttgttagaacatcaactgctttagtatctcctctctcatgaacctgtgatgtgttaaaacaacaaacaagcgagtaagcaatcaagtgtaagtatcctgaacctctgatgtccagagatgagaaaaagtacgagaaacattactttgattgctcgatgaacaatgggaatttcacgaccctgaaaaacgaaagcatcaagacaaattaaaccacgagaatcgaagaaagatagtgaattgatggaacaggacaagagatacactaacatcaacactgaacacaacaatctcgcctgctcgaataggctcatcagtcatccgcaagaacaatatatctccctgtgtcacattagcctcaaaatcaataaccaacaaccacataatcaaatgcaatgagtaaaacataatgtgacttactctctgaaagccaggttccatactttcagagagaacaacaaccactggtgattcactgccagtgacacatatcaatgccttccaaattatcaatgcagatgtaacgatcatacctaaacccaaaaacaaaaccaaacccattatatacatattaagcttctcaagatgtgacatttggtgagatttagataccaatttctcgaaatctaaaacgcaaatgagagtaaaatcaattgatatcgaaacgaaccgagagtgatagcctgagtgagaacttgacggatcttgatagatttgatggaatctacagtttctccgatgaaacccatgattgattcttccttcgatttcgtgtttttcccagcgaaagtgataggatcagatccctttgacccttctccttcaaacgcgtttcagtggagaagagaatgaaacacagatttgatttgattcacgagcgtttctgcaaatcggtttaaatatcgaaatgtcggtttactactgttagttaaaccggtttaaatattaatgaatatgtttgaatttaaacctttgactatatctttattacggaaataccaccatttatggctataaatagcaatagatttgattttgatatatgtgaaattttggggttttgttataaatggtaagaaaatcaagtaaatgaaaaaataatctcattgaaaaaaataggctgttgagaataaaaacaagggtttcattttttttctttgataattggttaattaaaccattcagaaaatagttctcctgtttgtaacatagcggagtttgaatccatgtggatgtggtgacacttataaaaacaattagattacaaattttactcgcataatatatgtaacctatctagctaaaatatatgtaaccaaagagataaatgaaactaatatggcaatattgtaaactctaagttgtttccctctgctttgaaaaacccatattggatcttgcatcggttgtgttgttgttcttggttgcactgattgtgccgacatgcaagtttgttccagcaattgcgccgatgaaaacatatctgtggaaagttctaaacattctagacctggtacagcaattgtagacgcacctctcacgtttaaacactgtccttgtgcgacttgtcctgatcctgatgatgccgtttctattttcatgtctctcaagaaaatctctgtgcatggaactctctcgctgcatcggaagtcaacaccgtactctgactttgacgtcccaatgaaattactaaacaccactttgctcacttccactgccgacgactacaaaaccgaacaaaaaaacttaaattttgttattaaaaacagtcttatgatcaaagtaaatttgagatacgtaccttacgatctttggcattatcggaatcgccaccgttatagaactgatcgattatgattggattttcaacattgtctagagtaattccattgaaagtaatcattctcgcgtaacccgatccgccctatgtatatataaccagaacttatttaaaagaacaagaaaaagaaacacatgtaaggtgactgaaacatgagagtttaataagaaaattcaaaagtacctgccaagttttgatccgagctccattcatagttcctctaaagttacagttttggacacatacattctccactgtagctgtctctccatcttttcccaagcttcctatgctatacattttacaatatacatggtttatctatatatatgtaaaacatagataacattttgtagtacatttttaatttggttaaccttatcccatggcctggtccgcaatctataccggaaatgtggatgttagacgtccccgaattaatcgcaatgcaatcatcacctgtcaatgatgataatcagtaaattccaaatgacattatttggataggacatttggtggaccgtctattttgacatgtaaagattgcattcatacatcaaacccgttccaaaacttgcttttgtttttcaataatgtatataaattgagccaatactaactgtatttgtaaatttgccaagagtctccaaaaatcgagtttattcataccggttgcgatgatgcaatcctggatgacaacgttggatgaagcccctacgtcgattccatcggtgttaggacttgattcaggtgcatttattcgtaggcttgagatggtcacatagttgcactcgcttatgtgaatgtgagccattggactatctaaatgcgttaacccactcaatctaaggttgttgcagctcctgaacttcaatgcctaatctcataaatcataattatcttgtttttaatttagctaaaactgcatacaaaacgaatcaatgttttgggaaaacaaacagctaacgtgatactcacggtaggtctagagcctttgtgttcccaccagctcgaaccctggccgttaatttcaccgtcaccttcaatcacaagtccttcaatgtctgtaaaaagaatccattgatctttgtcccctttccaatttcctttactcggtgcaaccagcttgcctaacatcttcaattaaattacaaactagtaattacttacttcaaaatattcgtcattaatatccaaggaaaaaaaaaacaggggaaaaacagagtacctgaacaaaaacaggggtggatttgcaagacccttgaaacttcaggggctgtaacataaatgtcatccctgccggaacgacaaactgcccatctcctgttccgctacacacagcttcccaagctttcaagaacgccttttgtttttttaattccaggaaaaaactttgatattttaggaactttttcggattataatggacaaatgacaactacagaacttagtttttacctgtgaatcgtctgtaactccatctccaaccgctccgaattgagtaacatccaatgcattcgaagatgtgaagatttgaagaaagaacagtgagaaattcaagaaccaagtcttcttcttcatatattttgaagaaaaagcgttaaaatcatgaatgaatatgtttacgactaaagaaaaaatgttgttgaagcgaaggctttactacactagctactatattatactacttacataagatacatatgtacatagaaaagaagatgctaaaggactttaccatgttcagcggatatttgtgggacaggggaagacaatgtgaagaaaatggatacacgaatatacaatttcttaacaaaataatgatgtagtaactatcaaatctcatatttattaccagtgcccatgaggcgtcagagtgggcactgtattaattaaaaataaaaaaaggttctcctaaaagtacgtagcattgtattatctgttacaatattaaataaatgtgtcttcatgttttttggttccattttttaaagatgttttttggttccatttcccttaacttcgtttgattttcaaggaaatgtcaaatatctgcaattatataacataggtaaaaaaagagaggttataatcagctgtacattaaacacatagtgtatatgccgcgatttatatgatagtctccgtccactcaacaaaaacttaaatctacaaaataatctgaattgatattttgaatgcatattaaaaaggtgttatttgagatatcatttttgaatcctacttgagagaagtggtccacggatttgattacatgatactcgagtgtgacatgttcaatcctagcaaaaagatatcatgctaaatttgtcttcttttgacaaaagtttattggttttcagtcctagaaacttgtaaattatgtaagcgagtgacaaagtttattggttttcagacctagagagcagtgaatgacaaagtttattggtttgcagacctagaacttgtgaacgggcagcgaataaagtagctcatatcattacgctttcccgattctagttccttggttttatatgacgacggttatctgttgtgattgataaaccggatcgtataactaattagtaattcctttcaaacttttagtttgaagaagatgttgagccaaaaaacatttatataatctatccgaagaaacttgtgtttgcttcttaggccatcttcaacggtaaaattaggtggattatcttaaaatattgttttttaattattatcatataatattattatttacttaaataattattctgaaaataataatttaacctattaaaatgtaacctattatttacttttctctctctcctactttattattattttatattttttagttagtgaaaaaccatactagagactactgatggagatgttcttatcttttctgtctatttttgactttcatgattcgcttttagtttcttttcttcggcttcgcttttgggttttctattttagcttttttctttttgcttataagaaaaaaaaaaaaactaattatgtacttattgtagtttaattatagtaatattcttttgattttttttcttttttttcctactaaacagttaaagattcacgtactacttatcaaattcagttcagacagtcggacaatatcaataggtgcacctaaatttcattccaagttttaccctaccacaaaaaaaaaaaatcattccaagatacaggcctaaatacgtgtacagaatgttaaatcaccaggcccaattatggcccatattcaaatatcaatagcacctaaatttctagtttctacgtcccttcttcattttttccttgggtcaactaaaattcaaaagtcctattttctaaaataagctaatatagaagcaaaacaaaggaattgggttattttaagtccagatttttcagacaagtcaccggtgagcggtggctgcgtatcagaaaccttgccgtgagcattgctaaataataaacatagataggggaataagctccaaaataagctcccttgtatcctaccattgtgttacaatttagcattacgccgagttgccaatactgtcttaattttccctttgatccccatatatgagacacctctgatctgttcttcaccgcatttttatgattgacggttttgctgatggttagtacattagaacttattagataccagagaatgcaaatacattgtataatccccatgtggccacgttccgtttatgaggagtaatattttatacaactatcacattcttctttacccaaaaaaaacgaaaaaaaaaactacccaatcttatagcgaagatgtgtgagatccaatgatgaagcaattaaattattgctagtgaattcatgtcattatgcgaacacgtactacttgagaaaagtacaccatatagttttcttgtgatggacggtgaggattcagcttgggaaacgatgtcgtaacgtttggatgcagaacgtcgggcgcacgatttggatatctcttttttttttttgtctcccctatcctcaagtcagggattttattacaactttgaatatttatttcctttttttatgtcggccttcttaaaacttttcaagattttcaattagtcactaaactttccattttatctttttcactctattatataattttagatgtaacgtaaaatattactattaggatgtgagataacataatccaaccacaattatatcgttatctagtaacattaactatatattataagttataaattgaaaggaatctcttgagagtaactatttagggcctaattgtgaaactaaaaacgtgtagggctgaaactaataacaattcgtacgttgggtcactattaaatcatcaaagatctgtagaaaataatgaaaaagtggccccacacgctccaattaaattacagcagctccacaaagtagctcttaaagagcttccatcacggaccagatcccgaattcttcttctgaccaccgaacgattgagtttctccgatcagatctcagtttctgggaataattcgaagttagtatttctctacttcatctctatgaatctcattcattttatctttatgtttctctttacttgttttgcgattaaaactcgtttgatcatttaggtggttctttgttttgtgagataagtggaactcgctgacttttttttttttctttttggataatcaacgatcgggttcatttgctattgtcctctagtgttacactgatacgatctttagttttgagttagatcagtgactttagtttcactattcaactagtgttccttgtttttaggacaatactgcgaaaatttagctgctctaaaattttgataccagatctttgagattcgtagatctcgcttttctttttttttagttttttcagaaactaatattgtgttctggtcaattcttattgctaaaggtgaaaaaatggcgcagcatctgttgcacgggactttacatgctaccatctatgaagttgatgccctccatggtggtggtgttaggcaaggcttccttggcaaggtataataagatccattgttattgcatcatttttgcgccaatcctgacgtcttattttgtagttcaaattagtctgtggactaatacacagtttgatctttatttttctgatgaaactttcagattctggcaaatgtagaagagacgattggtgttggtaaaggagaaacacagttgtatgcgacgattgatctgcaaaaagctagagttgggagaaccaggaagatcaaaaatgaacctaagaacccaaagtggtatgagtcgtttcatatttactgtgctcacttggcttctgatatcatcttcactgttaaagatgataatcccattggagctacccttatcggaagagcttacattcctgttgatcaagtcattaacggcgaggaagtggatcagtgggttgagatcttggataatgacagaaaccctattcagggaggatcaaagattcatgtcaagcttcaatatttccatgttgaggaggatcgtaactggaacatgggtatcaaaagtgccaagttccctggagtgccatacacattcttctcgcagagacaaggctgcaaagtttctctgtaccaagatgctcatattccagacaactttgtccctagaattcctctcgctggagggaagaactatgagcctcaaagatgttgggaggatatttttgatgctattagcaatgcaaaacacttgatctacattactggttggtctgtttacgctgagattgctttagtgagggactcgaggaggcctaagcctggaggtgatgtgaccattggtgagctactcaagaagaaggctagtgaaggtgtcagggttcttttgcttgtttgggatgacagaacttctgttgatgtgctgaagaaagatgggctcatggctactcatgatgaagagaccgagaatttcttcaggggaagtgatgtccattgtattctgtgccctcgtaacccggatgacggtggtagcatagtccaaagtttgcagatctctactatgttcacgcatcatcagaaaatcgttgttgtggacagcgagatgccaagcagaggaggatcagaaatgaggagaattgtgagttttgttggcggtattgatctttgtgatggaagatacgacactccgttccactccttgttcaggacattggacacagtccaccatgatgacttccatcaacctaacttcactggtgctgctatcactaaaggtggtccaagggagccttggcatgacattcactcccgtcttgaaggtccaattgcttgggatgtcatgtacaacttcgagcagagatggagcaagcagggtggtaaagacattctggttaagttgagagatcttagtgatattattatcaccccttctcctgttatgttccaagaggaccacgatgtgtggaatgtccaattgtttaggtccattgatggaggagctgctgctgggtttcccgagtcgcctgaagctgctgcggaagccgggcttgtaagtgggaaagataacatcattgataggagtatccaagatgcttacattcatgcaatcagacgtgctaaggatttcatctacgttgaaaaccagtacttccttgggagttcttttgcttgggcagccgatggtattactcctgaggacatcaatgccctgcacttaatcccaaaagagttgtcgctgaagatagttagcaagattgagaaaggagagaagttcagggtctatgttgtggttccaatgtggccagaaggtctcccagagagtggatcagtgcaagctatattagactggcagaggaggaccatggagatgatgtacaaggatgtgattcaggctctcagggcccagggtcttgaggaagatccaagaaactatctgacattcttctgtcttggaaaccgtgaggtcaagaaagatggagagtatgagcctgctgagaaaccagaccccgacactgattacatgagggcgcaagaagcacgccgtttcatgatttacgtccacaccaaaatgatgatcggtaagttcacatttcaacggaaaaaaacttgagaagtatacataaatgttgtgcctgattcatttgatgaaatccattttgcagttgacgatgaatacattatcattgggtctgctaacatcaaccagaggtcaatggacggtgcaagagactctgagatagcaatgggaggttatcaaccacatcacttgtcccatagacaaccagctcgtggccagatccatgggtttcgtatgtcactctggtacgaacacctgggaatgctcgatgaaaccttcctcgatccatcaagcttggaatgcattgagaaagttaaccgcatttctgacaagtattgggacttttactcaagtgagtcactcgaacatgaccttcctggtcacttgctccgctacccgatcggtgtagccagcgaaggcgacatcactgagcttccaggatttgaattcttcccggacacaaaggcccgtatcctcggcaccaaatcagactacctgcctccaatccttacaacctaatctcactaagcatgtcaagtaatgatctctctctccctctctgctttgctgctgttgtagctttgaataaaacttgagtgtctacctttagaattaagaagtcaaatggttgttatgatgatgcacttctttacccctttggtttttatattcgtacaatgacgtggtgagagaatgtagctttgtgatcttgttttgttgttgttatgtacctttggacttatgaatcttatatctgatccttttctttttatttagtgtgtttcacatcaaagtttaaacaaaaatagcaatgaactaggtaaaacatacttcattagaaaagtgaaagtgacaatctagagataaagcatgaaactagggttcatatagcacaaaactaatacaaaaggggttttaaagttttaagccggaaacagggcacgacacaccggacaaatcccactgttcctaagccattcctctccacaagtacgatgaaacacatgcgaacacggcattcgacccgcttccacatctgacccaactcggatattatccatgcatatcacacaatagccttcattctcaacaacaagcgtctccaagtgcatctccaccgcctcatcgttcgctggagcaaccgcaagttgcacttgcacatctacgtgatcatcttcaccgggaaacctcgagacagtaacacctatctttacttgtaccctctccacgtctttcgcaccatctttcttcaaatccttaatctcatcagcaagagtgttaacaatagcagaataaggagggacttggagcgaatctagaatgtgatagacgatggctagtgaatgatcaccgtctccaccaaacaaccaatctcgatcaaactcgtgtgtttgctcaagggttagagtttgaagattgtcaaaatcgggaaaatcttcttcttcttcaacgtcatcatcttcttcttcggcacgagtgtaatgcactttgaaatcgaaaaacaatttttggctctttcgtagttctccgtcgtagtcgttgtagatccgcttgacatcgatcacgttgtctacgttatcgtttacatagaaagccatgattttgttggaagaagatgggtttgattatttgctgtgggtttagggttctaatatagagagattagagaaagatgaggcaattttgagttaacggcaaaaacctgaaaaaaggaaagtttgcttttgcttttatcttgctgagaggaagagagatcagatgatcaaagaaggagatcgctaaagtttcgtaacaaggctgagccaaacactcgtgttatatatcccactcctcaatttccgtttaacttgggaaattttccttttaataaaaaataccgaatattatttataatatgaaagtaaataaagtattaaccaataatattttttgaggatatttaataataactactttccttatttccctattttacaaaaatactcaggtggattccgaatcaaggtcccgatatctcagatctttttgtaaatatcatttcgtagaagttgtggccatcgacgatcctcattgttcttctttactctcgagatcttctttgctcaaaccttttatcgtggacgtctagaactgatggagccgcatgaaggttcctttctatgataccaattattatttcataagtttcataaatcgcccaccagatgttcgatgatattccccacccaaatataattaccttgaaaactttgtttcttaatgatttacagatgtgaaggataatttggccaaagagctttatggagaaagtgtacagctttcgaagcatggtgaggactctttgcccttcatatattatgcaattgacaaagtttttacttttctgatgaaaactcttacaaatttgttctcatagtttagctgaggtcttgtgtttaggcttagagcttgtatttctaaggttttggattcccacatctctctgataagaatcatattcttggtttaggtaataataatcatgttctttagaatttagatgatcccttttacggaagttcagatgaagaagactatagtgaagctcgcgtgttgggcaatgagaataagcagagacgtgtgaaattccactcggtattctttcttacttgatcattctctcatctctgtgtctaaaatgctttttttaatggtaaattgaaatcgtaggctggatatcgtgatgggattgttgccgggaaagaagctattgcgcaggaaggttataactttggctataaggaatcagttcttaatggttaccagtttggtcttgttagaggtgtttccaggtaattacaagtctgttgcgatgtgttacatatccgatgaagcttatcgagtagtaagttatacattttctgtttttgactctttttgaagtgcgttggctttcctcccggatgagcttagagaaaagcttatcgataaacaagaaactagagagaagtttcagaaattacacagttctgtgcatgctctttcgacggaagtcgcaatgaagcggttctatgaaactttgactacgaagcaaggggaagagaagagtggagaagaagggcccgactcttgttctgattcaggttctggttcaggtgttaatgtcacaaccgacttaggaagctatgttactgagctaagttctcttcttgacaaatctccaacgattgaagttaaatttgacacatagaggaggtttgttccgtagacgttattgacaagcaaaagcaagattagcgtccagtttccaaaaactgtttgtaagctcggttctgcctcagcgagtagcgacggctaaatcatgctttctgcctcggcaatttcattcaaccttctctaccaattgtagccgtactcgccaagctaagaaaatttactctgttaatttgggttgacaaaccaacaaagtactctgtcagcaaaattatggctagttatttcttaatgttataaaatggactaaccaataaagatttttaattaaaataaattgtgacaaagacattccatatatgcaaaacttatctcgatgcaatgcatagatattcctgagtacccaaattaacattgttagcgatggacgtacccttagtattgtagagtgtagactaatcggtgctcattaaacgaaactcaaaaaagttgtagaggctatggcaagtagtttcgtagccacatacgtgtacagacttcttctcgagtagttctttctaaatacgtaaatttttggctgtgaaaactgttcgaatgttattggttaaaatgttaaagactttggcaagtttcgggttctcgaaatcttcaggacacttgtataggtcagacatacacgagtattggtcagtggttgacattcatccaagttagtaataatttagtcttctaattaatttttgaaaattccgtcgacatgattcatccattatcaatttacaccttcatactagcttccaataattctcgttactacgtgcgtcttttttcatttatttttttgagaacatcctaaaataatatccattcaagtaataatttataagctaataaacagacaaaagagggggaaaaaacatatattgtgagttggattttacattatacatgtgacaatgttcatatctttgttctgaagtttttatccaaaccatattacacagttggcttcggcctatatgtttaactgaaatagacttgcgaaaatgttaggtcaaaaaccctttgacaaaaaaaaatgttcacttatggattagtcaggtaagagacaatgaaagtagtttttgttttaaccgacgaattattctaaattcctaattagagtttttttcttattagaaaagagttgtctacaaatccaatacatattgaccaaaaaaaagtcttattctaattaaacttggtctacatattatttttttccttctcccactaggacatgtgagtaacgaagcatcaaaatccatatcgcaatctttttctaaattttaatatatagcttttcattaaataaaaaaaaacttgtataaatataggagagagtcaagaaaagagttccaaccataaaaatttcaacagttgttaagttacaagtctcttcaaaaacacacacacacgtctctcttcacagccaatcatcgatcacagctcgatttttctttattgttccgttggttttcttgagaatttttctttcttggtatcatcaaactcgtcggtaaggaaacttcacgcacgtatcttcaatgttgagctgttctaatggtaccgtcgtgatcgcaaccgccatggtttgctcaagcaccgctctgtttctcgccatggctcgtcaattccatggaaatcatcaaaatcctaaggttcttgatcagactctacgacccattctccgttcttgtctatcttcaggtacgatctttatctctatggctcggatgtttttgataaattttcccgggaaaatttaaaggttttcttgggatgcagaggaaacgaagaaacaggggaagaagataaagaaagtgcggttcgcggataatgtgaaagatacgaaaggtaacggggaagagtaccggaggagggaattgaaccggaaaagcgtaccgaagccagtgactaaaccgggaaagaccggttctatgtgtagaatctctaccatgccagcgaaccggatggctctgtacaatgggattcttagagaccgagatcacagagttcaatattcttattgactttttcttcttgattagtcaatagatttaggttttgtaaatctttcttttgtttttcggtactattagattttttcttggaaatttcagatattgtagactttgtagttgggtggtcttctttttctccctttttgtgtctcatagtagtaggtggttttcttatgctccacttatctacttacttgttttaaatcaagtgatgatgtaaataattgacatgtaagtagtcattagaaatttgaaaaggcaaatgaaagaatataaatttgtaaaaacatagtgtgcctattgtacatataaactctcttttgttggggatatctatggaatttatattgattgtgttgaaatcagtgaccacgtctagaagagaaaaaaaaaagagtctttaaatctttaacaaaacaaactttggagcaagaaccggaaaaattaggttttggtatttccatagaaattttggataatttgaccccccaaaaaaaaaaaaatccttccatacattttatgaaccatatcctagagttttattttatactaatagatagatatagccaacacaaacagcacatgtcatggctctggatcacgagtttaatacgccaatcaaagatttttcaaccaagtttgaagaagcagaggcgccttgttttgttaaaataagatatgtgtaattatgtattgaccagaaaatgatgaagatatgaatcttttgctctttactaaaagctaggagtaaaatttaaaattcaacacaacttacacaattttgatgtttattaaattttaaaggtaaagcccgaggtcattctttattgaagatatgtatttggtgtgttaaaatattctttaaagttatacataaaaaacaccctctcctttctattatttacattgtatattaaaaattcaaagaagaacaatataagaaaatcgacatatgtttttttttttgttttaataagaaaattagaaaatggacataagttccaattgcacattttatcggttatctttataaattacataatttgactgtgtattaaccatgaagccagagatcaatttcaaagcgaaactttctaagatccaaatctaatcacaatcatctccaaaacaagtgccgcttggtggatgggagaaaacaaaagctttccaatatgaacagaacaaataacaaaccaatggtccaaattgcacgtagttaattatttcgattctttgaataagttatttcttgtcctaacatttctttaaaagggttataatttgcttatggctcacgtaatcataagtttttaattattacatatatgaccaccaaaaacaccacctaacttttatcaccataccgctttgaattttcaaactttattgtgattttatttacaagaaacgaatttagaattttagtggatatgtttgtttcaatgccaatggatatcgccatattggtataagattctccattacaaaaaaaaaaatacactagtataatagcatgtaacatttatacaacataacaaagtagaatctacaagatcaacataatttttatcacccttgggtttaacctccgattagttttttctttataagaaacaaattaacctataagaacgaatatacattattgtcttcaattatggcaaaacgaggaaggatctaaaaaaccgaacacagtcgaaaggagccaaagcagtcaaaagtggataaggtaagtgtagggtccaaagccttataactccacacgaccactacactctctacacatggctcgtcgtcgttttggggctatacgtggggtcgggcacttcttctttcaagtttcttcgaaatgaagtatccgaaacttccagatacacgcaaaacccagaaaagagaaaaaagaaatcgtctttccttttacttctcttcttccgattgggtctttgatcatttccccaatcgattgataagttttgttgggttgctttcgattcttcgtttgatgatctaagaaagtctctgtctttccacgatggggtaagtcagttaactcgttttaaggttgtataaggtttttgattctgtggcgaaaaatgttatctttttaatctgggccattggaattcgaaagtttttagctttgggtattcataaagatttgagctttgaaggaataagcttttggatataaggatgatgtttttgtttggatgatgatttggtttagctattacacaaaatgaatgatatgtttaatgattttgtaacacagcagtagttgtttggcttgttttgataagtcgaaagcaaaaacaagtgtagatgtgcctttgaatggcacaaaagatgtgttagtagaagaagattggagtgaattgaggaagcctagtgtagtagcttctgaagatttctggactaataccactttagatatggaaagcaatgctcacggaagtgtttcttcaatcagtacaaccaatctgactattgattctcaaggatgtggttccagctctaatgaacctgctgaatttgttaaccatggtgagtcagtgagtgagaagagtatgattggtgattggtcttattgagcatttgaaaaataattggagaattttttggggtgttacaggtcttgtgctatggaatcaaactcggcagcaatgggtgggagataaaagatccgagagccgtaaaagcgttggtcgagaaccgattctaaagtgaggattatataagacctaatggttcgaagagtccaactgttgtgtggaatataaacagtttgattgtttttgcagtgagaatgtgacttatgagagtctacttgggagcaacaagcgatttccgaggcctatacctcttgatgtaagttcaactccatgaactggaggaagtaactatccattctcatccaaattttgtttgttattgaaagttttatcattgcaggaaatggtgcagtttcttgttgaagtttgggaagaagaaggtctatacggctaaaagattcttttttacacatttacaattgtaaagagagctgagaaaaatatatacacccaacaaaaaatatttgttgatggatcaaattttataaaattctcttgatttggagtaatttccacaaaaatgttttttttttaaattgtcgtacacgtgtatgtctgaatcagaaaccccttaaataaaaatgagttcttaattttatcgtcgaggaaaaatggcgatggctttgtccaacccgaccacaagcactaacctctaccactactcaattctctcgccgttctcaccgccgtatcaccttcaccgtcgaaacaccgtcctactagcgagtccccgccgtttacgccgcctcgccgtcgctggtggtcctccttctcctccaggccctgatccgcctccgcctgaggacaccactcagctagaaggttcgattcttcttgcccagattgatattttggtcctttgaatcctactttgtttggttggtctttgttgtacttgcttttcagttttcactttaactgttgtgttttgggtcgaaagtttcaatttttatccgatagtttgatataagtatggagtcttttaggttagtacttggtattgaatcgtgctgagattgttattgtatcatgaaacttccaaaacatgaggatgatttcatccaattagttgttgtgtccatggaaccaaagttcaaatcttgtgacatgattttggcttaggcaattaggattgtggaatttactccttatgattcaaaatggctaccattttatgtggggattttctaaattttctcttaagatgtaaaattgtgcagtagttgtatgttcattggttctgcaattagtccatatgttatgttgaatagcttgggtgatgattcctttataacatagaaggataggctggaaatagaaaaaactgcactcatgactgatactaagtgaaatgaatactcttgttttctttttctctttgtaaaggtcttgtgggagctgtgacaagggttcaagaccgcgtaaagattttcctcgcagtgttcttttggatgtttctcttcttctgggttacagtcacagatgggacgggtaaaggcaaaggcaagaagggttcacgtttcaagtagtttccatatatgaagaggctttggtgattatctactactctatactgtatatatatcaagacttcaaagagatcaaattacctgtataaacttcaccaagtaagcatcttccttgtacatcacttattcagatgataataggaaacaataagatcgtgttatcttcttggttaatgctagtgatatatagtactcaattcctgattctttcccagtctccatctgatcatgcttaaaaaacggcgtcgttgagcaataggactcaagacatgaatgggcctaatttatgggctttaaagagtttaaaccacagtaacgttctgttttaccggactccaaagcaatactccattagagtttttttcccccaaaatggagaaaagtcgttaactatttggcacgtgtattgcatgagcaccaagtaagtctaaatctgcattaaatgcgaacatccgagtcgacttaacaccttttgatcaaggctttaacgtgtcgttgttaccatagaatatagatgatagagcgcattttatatcactggatatagacacgtggttaaacttaattgggttgttagttaagttgttgtgctacctccaagtgactttatcatatactctgtgtgtttctggtagtaaaaaaaggtctaaaaccatagtgttaagcaaaagagaaaaagaagagcagagcaaaatccctaaaattttaaactctgttttgctttccgacaatcaaaccctaggttgtctgttgcttcattcgtgtaaattgttaaattttttgtttttgttttcttggcattttgtggttgatctttctaatttgttttcaggggttgctaaagggaaaggagagagatgggtggtgaagaggaagttgtttctgttgagctaccagcaccttcttcatggaagaaattggtttgttttctttgtttcatacaaagacttagaatttgttgtatatgtgtagtgctgcaattaccaaatctttttctttgaagactctgaatatggtagcttttggtggcgaaatgttagtataagtgtaaataactttatgttgattaggtgattcaaaggttatagacttagaaaaagccacatttgattgtgtttgatctactatttctacttctttgttcttgacttaatgcctcattttgactatgtttgatttacttcttacttttcccgattcttatggattttaagccacttgtaaacattgtttaagctacattaaggtcttctttagaatttaatctttcagcgttttgaacctcaaattttcatattttcagaggtttacattaactgacttgtttttgcagttttaccccaacaaagtgggttcagtgaagaaaacagaggttgtgtttgtggctccaacgggtgaggagattagtaacagaaagcagctggagcagtatctcaaatcgcaccctggaaaccccgcgatcgcagagtttgattggacgactagtgggacacctaggagatctgcaagaatcagtgagaagactaaggctacgccgtcaccagataaagagccacccaagaagcgaggtagaaccaaatctccagtgtcaaagaaagatgcagaaggtgagaaatcagagggaggaggagaggaaaactctcatgtgaaagatactgaaatgaatcctccagagggaatcgccgagaatgaaaatgtgaccgataagaatggctccggtgaaactgagagggtgaatgatgcaaaagaaaacattgttgctgaggaaactccaaatgcggctccagttcaagaagagggtgagtcgatgaaggagaaagctctggattctgttgatgataagagtaaggagactgacaaagaaaaagatactggctcaatcgaaaagaactcggtagatgtagagaagaagaccgttgaagctagtgatgagaagaagaattctgaagctgagaccagaaaccatgaagaaaatggtctgaccacagaagctgaggggaaagagaaaacagcagaaggagaagctaccggatagccctgttctgctctgcttctgttagctcatgaaactgtaagtcagttgtttctatcaatctattgaagtatatggtttcctttttgcttcctactcggagcattatcgcggtgaaaggtgttgttaggctgagatatgtattatgagatatgtgcaagttctgtttggttgtaaggttatgtagaggatatattattgactcttctctaaaaccattgcaatcactaggtttgatgttttatctttctgctacaatctttagtcattttcgtatggatggacaatcaagttatgaacaagtcagattaaagatccacacatagattaatcttctagatttctttttatcattggttcaatcttcatttgaacgccataaaatgggaaacccaaataaaaaaatggaagaaagcagaagaagacaagaggaaaaaggtaaaagttttgctttgagagtaaagtaagaatctaatgcaaagaaagacttacaatgttagttttcttatttccttgattccatccttttgcatggtcccagggacgagggtttagaatctttctattaaggaacaacttcatagtataaactcttattgttcccattttaggattaaaaaaaaaacttgctctgttttcaaaaacatcattcgagacagtatctcaaatgggttattgtgttcctcttcgaaagtctccaacttcacatatggttttctcttctttcttcctttcgtttctcttagtcttctctatactctcttcacaaacggccgtagcattcatcggaacatatggtgtaaactacggtcgcatagcggataatcttccgtctcctgacgcggtagcaactctccttaaatcagcaaagattagaaacacccgtatctacgatgctgaccactctgtactcacggcgttccgcgggaccgggattgaaatcatcgttggcttaggcaacgagtttctcaaagacattagtgtaggagaagaccgagccatgaactggattaaagaaaacgtcgagcctttcatacgaggcggtactaaaattagcggtatcgcggtgggtaacgagattttaggtggcaccgatatcgggctttgggaagctctcttacccgcagccaagaacgtttactccgctcttcgccgtctcggtcttcacaatgtcgtcgaggtacattaccttaatcttgcataccaaacatgtcgctaaaaccatgacatctcgaatttgcttattttgtttggaaaaagtttttttaaaagattgcacgtttaaccaacgttaaatctcataaatacattatttttttccgagtaaagttgagaattttcttacagacaaaatgatcaatcatttttttgtaacccaaaatgattcagtttaaatatataaatctattaacctagtaacagaagtttgtattaatgatatgaccatgtcgatcataatccagctaagatacgttagtaggcatgcatcaatttggatttctctttgaatttttttctttttaaatcatctctaatatttttaggacatcaaacttagaacttaaatgatgatttagcctaaaacattcaatatttgtttataggtgtcgagtccacattcagaggcagtgtttgcgaactcgtatccaccgtcttcgtgtacgttcagggacgatgtggcgccgtttatgaagccgttgttagcgtttttttggcaaattcagtcgccgttctacattaacgcctacccttttcttgcatataaatccgacccgattacaattgacatcaattacgcccttttcgagcacaacaaaggcatcttggaccctaaaaccaagcttcattacgataacatgttcgacgccatggtcgatgcttcttatgctgctctcgaaaaagctggctacacaaaagtcccggtacgtccgatccttattactatcaaccctttttttgtttggtttccattaacattttccctttgttacaagctttgcaaagtacaaacgtaaatgtcaaactagactaaagacatttttttggggtcaaaaacatgcattatatgagtttcaactgaataatttgactcgttatatgcatttttatttttctatcagtaacatgcattttttatcttttgctatcagtactacatgcactaagctacatgtcttgtcgtacgcggatttaaaagcgtcatgcgaacctgatttaatcatttaattgtacctaggtgattgtttcggagacgggatgggcatcaaaaggcgatgcagacgagcctggagcgtcggtaaagaacgcgagaacatataatcggaatcttaggaagcggctgcagaagaggaaaggaacaccgtacagaccagacatggtggtgagagcttacgtgtttgctcttttcaacgagaactcgaaaccaggtcccacttccgagagaaactttggcctttttaaacccgatggtactattgcctacgatattggcttaaccggactcaagtcctcttctgccacacggtatcgttttaagtcgtctcttgtttccgcttctgctttcacgtgtcttcttcttctttttcaccggttgttccacttgtgagatttgtgatttttttaattggtcctttgattatcaagttaacccgtaattcttgatttgcttgtgattagtcacttttaactttaaaatgttaatatacgagctcctaattactttgtgtaatgtcttcttgaaatgatattgtttagtgagggtaaatgttggatttttctacattattctctaaatatttcatcccaagtcaaaaacagttaaagaaaaagtttattacataagctgcatatgtgagtttttgatgggactcaatcacatgaaaacatcactagctacataactatttaaatgttgtgtactcacataaattttgatcaagtatttgttctaactataaaattattttatttgttttgtccattgtctacttggtatatatagctatcaaccatgtatttacgtgagcatgaaaattttgattacgttaacgaatcaaatctagagagtgcattagtcaagatatatcttctctctttattagatgcctatatagttttcttataaatcttattcgaccaccttctatttatgtattaatattcctacgcactctctgatcttgtgtcaactaacactaataaaattattcatgagattcaatttccacttggcagtaaacatgtgtacgatacacgttacatctctcctatatattaaaaaagttagtacttcgatagaaacattttgcaactaacacaataaataaaaatttatcaatcgaacttataattaattaaatctttaacacatctaatctggtcaactgatagattttggatcgtcataattttaaaaaatttctaacatgtatcgataaatttagaacgcacaaataattttgtaacatcaaacgtatagtcaacgaatttcccgagacagactatagtctataaatattatgtaacgtagcaacttaaatgacttaacacagaatgatacaaacagatctccataatcccatatggtccaaatccaaagattgaaaaactaaagattagattcgatatgttaacgtgaagaccgctgagagaggtgagagagagaccgacactaatcctctacaaaagggtgtacctgttcatcaccaatctcaactggatcatcaccgttgatctggtcaagcacaacgaccaaacccatcgcgaaagcgccatcaaaacccggtttaatctctagagtgaacacatctcgaccaagcatcacgttcgttgacgcgtctactttgcgtttgatctcagccacagtacatttcttcgtgtcgtatatgagacagcttcgttgcgagaagtctccatcgataatgtactcttctcctgttccgtcgtaaacttctacttccatcgtacaccgtccgattatcgacgatctacggacgctgaatatcggtttctgaccttccgatctctcgccgagaaaaccttcccatctttggtgtagagttggtctctgttcatcagaaaaataaacaacgagttgactcagtatcatctttagaactactatataacaaataaaggacactataaattgtgttagcaactgagtcgatgactcggaattaggcttatacaaaaagttgattaaaattttcagctcaaaacaatttcttcagatctcgtttctaacaatgatttttatcgattctagccaagtcattatttgtttaccaatacaaaaaacttatcaagattttcttgacaaaaaaaagaggttagcaaaagattcttgaattctgatggatgctcaccaatgaaattcattttttaaaccaaacccatctaatcaaattcagcacaagaagttgagcatcaaaatttattataatcacctagctagtcaccctcacgactagactcttactcatcccaacataattttaagaagaaaaaaaggatgaattaagtttacctttcgtttaacggtaaggagacacttcccggtcgcgtccatgaggacaatctcatcgttatctcttgtgtcaggtccataagaatcaaccctgaagatgatatcaccacggcagtcataggcggcgaagccatcgccggtgtagaagagagaagtcttgcagacggtgagtggtttgtcttcttggtaaagataagctttgtcgaccacaattctttctcccatctttttcccttcttttggaatggtctcttcaactaattccatttttatttttattttcttgtgtatgtgtgttttgtgtgtggaagttagattttgtggtttgattaacgaatgatttttaatctatgatatggacactcttctcttccttcctttgtctctctatttatatgtggttgatatatacgtacacacgcttgacgcgtatgtaatgaattaatatctttaagtctgcttcaaaaaagtcgtaacatatattattgttatttcctattggctaataataccaaagtcacatgcataaataattaaataacatgctataacttaaaaatgttagtttaatctgttttattaggctttattctaaactatttttagactgtttacacgccgcttttatatccaagttgcaaaagaagaaacaggtaggaagattgtttgaagtttttatggtattttaacattttaggtggtattattagtttgggatttaaataaagttttaatgacttaaaatattattgagaatatattgttatttaatcaaattttttaaaaagtttggtattattaatttaaattttttataaatttagaattattgaattcatacttttataaagtcattcaaagttttgtgttattcaactaaaacaaaaaaatctttgaatatttatgaattaaatttttgtgttattggtttataactttctacacgttttttacaaaataaaattataaaagtctcattaaaatagagagattgtttgagaaattttacaaaattgctaaaaactaattaataaaattatagaaaacactttagttataatttagaatcttttatttttttaccacctataattttatcaaaatcttcaaatttattgataaattagaaaccaatatatatcacttctttaatgtatttttatgtcgacaaatgttttatgttttatttatccacacggccactttatacttattgtaaatttataactttgtaaaagatgtctaactactaccctatacgtgattacgtgttacaagtttttttttttttttttaaattataataataagtatgaagaaaagaggaaataggaaattttgtacgtcgatttttttttttgtaaaagttgagtaaaagtgaactaaacatcaacgatgtcccaaatcatagccttgactagtagacaaacacgtctaattgggtgacgattagacagaccagtccaattatgtgaaaactaacaaaatcactacctcttgatttacatttacatttaaatgattacattcataccaccttttgagtgtgattgtatgaaatttacattctttggtacaactaaattcagatttctttctataatctcttaaatgtctactataaatttacaaataaaaaataaaatggttctaaatatatttaaaatctcaaaatatatgttggcatgcaaggaaattcaaaccaagataatcaagaaaacaggtatagcgtttcttctacgtcagatatcaaatccgtgatcgagtgaacaatgtcaatatgacaatattctacaaagaagaaattttgtttcattcatatttcttggtaatgtatcgattgatcattttgtttcttcctgtttttgtttctatattgtttaacactacaccaatgcttctgctgctttggatgacgagatagttttttttttactcgacacatcatacaagaccttcgtaagtatctgtaatacacgaatcattaatacataacacgaataatgcattactatagttttgagaatctcattctcatacttctgtctctcttgttgtcgaagaatatcacacttaacatataaaaagaacaacatgtcagtacacaaaggtaaagcccaccaaagagagaaaagaaaacaagacttaactataacaataaatttaatgtcgctctcaaaactcatttttttcatatgaattttctaacacaaacaattttccttggaaatctccgccttgtatctcttatataactcatctctctatactccgaacatgtccctctccgttaaccttaacggccatgtcagccgccgcagctgaaaccgacgtctctctccgtcgcagatctaactctcttaacggaaaccacactaacggcgtcgccattgacggaaccctagacaacaacaaccgtcgcgtcggagatacaaacactcacatggatatatctgctaagaaaactgacaacggctacgccaatggtgtcggaggaggaggatggagaagcaaagcgtcgttcacgacgtggacggcgcgtgatatcgtctacgtggtgagataccattggataccgtgcatgttcgctgccggacttctgttcttcatgggcgtggagtacacgcttcagatgattcccgcgagatctgagccgttcgatcttgggtttgtggtcacgcgctctttgaatcgcgtattagcatcttcaccggatcttaacactgttttagccgcactaaacacggtatgtcgtgtgagttaatttaggtaaaatatatatttaatgattatcttcaaattcttattgcctcctttcacctaataatttgtttttttcttcgtcattcataaatcctaatattttagtcaaataaaagtggggtagagatggaaacaaacctcagattattttcccgtgttatttaattctccagctggaattttgctgtcaatggtaacaagcaatgaaatatcctaagtatagtgagagaaaattagcaaaagattaatcctaaaatggtcataaaagattaagaccagttagtggataaaatggtcttaatcggattagttagtggacgaaaacatagttaatactacaaactctttgttttagttatgtgatcttctttttaacaactgcttttttgtttgtttgtacaacacttaattaatatagatcgcttttaactttagaaaagccaataaaaaatgacacatggtgaagaatgagttggagacacgatcacatgcaacacagagagattggttacttaaatctaagttttgtacttttaaactaatataattgggtggggacaggtgttcgtagggatgcaaacaacgtatattgtatggacatggttagtggaaggacgagcacgagccaccatcgcggctttattcatgttcacttgtcgcggcattctcggctactctactcagcttcctctccctcaggttccaatccacatatctctccctctttaaggataaaccaaatattattacattagtaacttcattttctttttataatattagtaatgatctaccagtatatatagatgtaacgtcctgtttactggttggtccatatcagcagaagtcgaacattttggacgtgtgatttcccttagccactaccgtatagaaaacagtttataaaggctccaaataatttgttaatctacaactctcattcaaagtatatttgattataatagtcttcaaatgattttatgttttctacctctaaaaaattttcatttaattttctataaaacgtacctctaagaaaactaattggctacgtatttctgttaaaattgactatagttttaacatagacaattagatattttctagttacagtttacattaaaactctaaagatattttaaaaaacaaaatcctctaaatgaccatatattagtgtgaagtgaaaggagtgatagattgtatatattttggtcgggagtgatagattgtgtctaacgcttttaagttttaacttgccgggtttaggttaattttcatcatcttagtgatttttcttcaattatcaggcatcactgttttccatctttcaaaatagttccacgatttgattgaatggacataaatatcagattgtcactcatatacattctacggtttctagtgactcatctatttactttctttctcgtgatgtagcatcggtacatggatttatgtgtcgttttcttatactattgacatgttcaagaaaaaaagtaatatcttaggttaattatctctagttcgtgatcaagataatttaatcccgggtattacataactcttttgcaggactttctaggatcaggggttgattttccggtgggaaatgtctctttcttcctcttcttctctggccatgtcgccggctcgatgatcgcatcattggacatgagaagaatgcagaggttgagacttgcaatggtctttgacatcctcaatgtattacagtcgatcagactgctcggtacaagaggacattacacaatcgaccttgcggttggagttggcgctgggattctcttcgactcattggccggaaagtacgaagagatgatgagcaagagacatttaggcactggttttagtttgatttcgaaagactctctagtcaattaaatttgttttctatcagaatgtttagttgagttgaatctagcgtaatgaatttttttgtttttctttgaaatggttctacttgactaccgttatttgaacctaactaagtgtgatcaatcttatgttaaggggtattacatagtctatttgaaattcataggatctacactatatattcatatatgttcccattagtatagtgaaaaaaatggttagataattaaattgtaggatggtggagagtggagactaattcaagaaaaaaagatttaataaaaaacatacgatgaaataaattattgttaatttttttattttataaaattaggatatggttatagaacaatctaaaactacaaaatcattcaaccttataccaaaaactggccaataaattttgtgtgtacgtacttcctcgctacttttggtgcaacaaatgtgttttattattaaaaaaaaaaaccatatgtgttttgttttccattggtaggtcaagatgggtttcgtatgaagttaacgggacaggtacaccgatccatgatcataaatacttgggtctcaggagaaattaagcaacggatcacaatttatttattttgtcctttttcttggttgagaaaattcttgaataatagtcttcaaatttgttagttcaactaatatatagatcaaccttgagacaataataaaatgaaagatcaacatgtgaacatttataatgctttggtggataaaactcaacctttgatcagatattttaattgtaaagctcttgaataaataaaactcaactgatacatcaacttaccattggggattttaacaagagtcatgagagatataaatatgtatgaataatataccactatatgagggagtaatttaacaagatacgcgatattttcagtttttgtatggttattttgtagtgtgctactttgtatccctttttattattatgtaatttttactactttatctatcctctaaaaaacttagaactgtcttacgttgggactcactatatgagggagtaagttaacattattgaactagttatattgataggtttattcaacgaggcacaaaatctttgatattctccataatcttgaattgaagttatatacacattattcatacatacacaactaacgcgttttttttacgtgatagactagttattaaagtaatgagaatctcatactcttctctcttttcatgtcgtcgaaaatatcatacttacgtaaaataagcgtaattgtcgctctttaatctcatactcatcgttttcgtatgaattgtttttagctcaaacaagcttccttggaaatgtaatctctttatataacccgtctctctaaatcccgaaatgtcactctccgttaattctaacggtcatgtcagacgccgtaaccaaaaccgtcgcccctctccgtcgtaaagctaatcctattaacggaaaacacactaacggcgtcaccatcgacggaatcttcgacgaccacaatcgccaaataggaccaataaatagccaaatggaagatattgctcagaaaactgatgacggtggaggaggagaatggacaagcaaagcgtcgtttatgacgtggacgatgcatgacataatttacgtggcgagacaccattggataccgtgtttattcgcggccggagttatgttttttacggttgtggagtacacgttccagatgactcctgcgagttctcagccgtttgatctaggatttgtggccacacgttatctgcatagcatcttggcatcttcacccaatcttaacaccgttttagccgctttaaacacggtaaacacatcttttatgacactatcctcaaattcctcgcattatgatattcacatgcaacaaagagagactagttaaattcgacttaattttgcattttttttaatcaattgttttggttgggggtgtggacagattttggtagggatgcaaacaacgtatattggatgtacatgggcagtggaaggacgaccacgggcaaccatcgcggctttattcatgttcacttgtcgtggcattctcggctactctactcagctccctcgccctcaggttcaattccacatctaaatctttctctctgttttcttattgatcgataccttgtcgtggacatgtgattcccttggtaactaccgtataaaaaagcagtttatattagtgtctccaaataatttgacaatatggactctttcttatatgcaaaaagaatgttctcaaagggctgctaatttgtactcccttgattttagcataaatcttgtttcatttacttttacttttgtgttgtaacatgggtttatgttcgtcttgtctatattaatatgttcaatatttttttaaaagaacgattaaggtacttatttaaccctttttacaggaatttttaggatcaggagtagattatccggtcggaaacgtgtcgttcttcctcttctactcaggtcacgtcgccggatcgatgatcgcatcgttggacatgaagagaatgcagaggtttaggctggcgatggtttttgacattctcaatgtattgcaatccatcaggctgcttggtacgagaggacactacacgattgatattgcggttggagttggcgctgggattctctttgactcattggccgggaagtacgaagagatgagcaagagacatttacggaatactcgttgtagtttgatttcaaaagactctctagtcacttaaatctattttttttttccggcaaaataattgtatattacactaaatctatttcttcttaaaacgtttagaaacacatttagttgaagtttaatgattttaatttagtttctattaaatggttctaattgaataccattcgttgaacctaattactaaatgtgtacgtgattgtgaagctgcctcattgagttttttaaatggtatatgtgtatattaggtcttcgtataactaatttatgcaaagttcttggttgaaaagttctccaatatagtagtctttatattaatttgttagttcaactaataaatagatcaacaagtgaacatttataatattgggtggctaaaaacccccagataatttaattgtgaagctcttatctaacacatttattgtattcaaatactgatattaacatatgtgtatatatatttacataaataaaaattagttctattcatcagaatcggataactcgaggggacaagagccatcatcaacattagcatatgggttgaaatgttctgaatttgtatccatgcatccaggaactagatccaagttgcatctatctccctgaaatttgttcatacattttaaaatttagtgtattcaaattttataggacatagtttggcgagaacttactccttcgaccgtcaagttggcgatcatcgtgcaacgagttggaacaacgttcgagtcaggaaatattgctctttcgcaggctccatcttggctcaactcgttcgctagaccctttttgcaccaattgataaatgataagttttgcatattgcatatatagatgataagtagttgtgaaaatttgaaaagaaattcattacatacctcattgaagaactcaataggtttgttttgccatcgcttggggacttgaaactgaagtctgtatggaccgtcccaatcgacaccattagtgaatgagaatatcaaattcacagctgataatgattcataggaaagataaaagtgtcaaattaatacaaataactatttggtcacaaaccatgatttgatttttgattataaaagaaaacgaaccatgcttaggaatgcaaatctgcatagtgtatatcggagaatcggctttgcctcgatctttcttaagcattgctcttggctccccaccacacatgattggttggttaaatcctcctgcaccatttagtaaccaattgaatattttcattttttttgttgttataagtactccataagactggtctatgtagctttctactaatttaatttggaaatgaaaatatatcacttgcaagccacacttagaaataattacttgactaaaccccacgattagactgctaactataagtacttgtacgaaaacaattatacagtatgtggtagccccattaaacagccgccctaaccgcgccaactcgttgggacaactcggaatacaagttaatttaattagatgttttatgagaaactcaccgttgaaagcaaccccatagtcttcgttaagagtgagtttgcttgcagctggattatagaaaagtttcaacttttcaccctaatccaaaaaagttttgtaagaagttaattgagttaaagagcctcaacacttgaaaatagctagagaaacttactgaggttggtggaagaccattcatggttttccagtacacaggagcagtacccatctcgaacatggcccatgaaggaagcttgtatctatcaaaataatcaatcatgaactatgtttattattatattcatatagttatatcgaccaaagcaacacgatgaactaaaataaagacagactctttgatctcttcgagaggtgcaagagtcgtggcaacagctttaacttggagatcaagtttcttcctcggaaatctccttagtattggaccaatccttgaactgtacactgtatcattcattagctttagttttaactcgttatatagctagtattatagattgacataaatgaatcaagaatttgagtgaaaatacttacaaaaactacgtttcgaggataaaggctgcgacggagaggcgaaaacggcggaggtattagcggcagcagccatcgataccgatctaatgagaaaccttttttggggatgaaagaaggagaaaaatatgtaagtaattgatatatggcttcaagataaggatttttcacaccacaaatacaaatatctactatagaatttttttcttacacatacaaacaaagacttaagtatcatagagacaaatatcaaatttgaaatgtaaggtctatggaacatgtccctttcactcttgggatttttcctttaatgaataagaaagaatgggctcaaaaccaaaataagcccattcaagagatcaatgagcccaattgtttgaaagcaaatattggggtgatttgttaactttccaagaaaaacacgggcttttcagcaaaacaactcgaaaaattgaagagaagatccgggttttagataactgccccaaattggcaatccaaatccctaaaaccatcttatcctctctttccaaatctagccgcaatgtagtcccgtgaaccacaaaaaagatgagatcttgcacgtctctgtcatcacaactagtactactaattgtgaagcatacaaaaaagaccgacccttatttatacacgcacacatattaacatatttatactactagtatataagttaagggtttaagcctcttctcttccttctttctcttagccatcacatcgataatggcttctcttctaacaaaacccaaacccgttttcctctgttcaccatcgttatctccaagaactttgaacacagcaacaccgtcattgaatttcaccagaatttcattcacccatcaccaaaagcttgctcctttcaagcctcctagtctcgttgttgcattctctgaaaagggtttgaagagagatgtcaccacagctgctgcagcgacggagggagattacagaaggataatgttatctgatgtgttggtgaagaagaaggaaaaagtagtttggtgggagagagaatggaaagctatggactttggagctgttgctgtcgttttgtctatgcatttgcttagtcttttggctccgtttcaattcaattggagagctgtttcggttgcttttgggctttatatcgttacaggtcttctggggattactctgtctttccataggaatctttctcataaagccttcaagctacctaaatggcttgagtacttgtttgcttattgtggagctcaagctcttcaggtgatttgatttgatgataatgtagtttttgttgaatgtgtaattttgtcacaaattgtgtgattgatgtttgtgtgttgttttcttcagggaaacccaattgattgggtgagtacacataggtaccatcatcagttttgtgattcagacagagaccctcatagcccacttgatgggttttggttcagtcacatgaattggatgtttgataccaatacaatcacccaaagggtaacgatttgcttcttctcttttttcatattaatatttttctgaaaactgtattctaaaactctgttttgtatatgatgtttaaagtgtggagagcctaataatgttggggacttggagaagcagccattctatcgattccttcgaaccacctacattttgcatccgctggctctagcggttgctttatacgcaatgggtggctttccattcatcgtttggggaatggtatgttctgtggctagtcttgcattttgaatctattcactgttaatttttcataactagctgataggattatgatgtgttttagctcggccaaaacaagataattctaccagttttttttgtgtagctatcaatttgctgggccaaatctcctcacttgatttccctcttgcgttttcttgtaatttagtgcaacttagattattgaccttaggcacacaagttgtgtttgttgaacaaaacagaaccacaagtaaatatcttatctttcttgtaagaaagatttgtggctcatgctcttctcgtgaatggacttaattctagttgcttgtatttagttagatataaacaacatttgcatgctaaaagtgaaactacattgaatttttttttatcaaatttgtaaacggaacgaaaagaagaaaaaaggcagaagaaacttgattataactactctaacatttccatagagtcacggtttctgatttgattttcgtctctaatcctttttttcttgggttttgcagggtgtaagaatagtatgggtatatcatataacttggctagtgaactcagcttgtcatgtatggggaaaacaagcatggaacacaggcgatttgtctaagaacaactggtaaaactcttcatcgatcactccttaatcactcgatccatcttaagataatatagttgtactaaaagaaactctgaattataattttgcaggtgggtagcagctctagcattcggggaaggatggcacaacaatcaccatgcttttgagttctcagctcgacacggcttagaatggtggcaacttgatatgacttggtacgtcgttaagttccttcaagccatcggtttagcaactgatgtcaagctcccatcggaagctcagaaacaaagaatggcattcaccagcgactgatcttaaaaaactacatggttatgcctaaagtcaaaactgtcggttcgattgaagctatgaaggttttaaaaaaggattttgttctgcttttttgtgtttacttaaaggtatatatctgtgcaagagattgtatgtgacaaactgattatgaataatatctataattacattcaatacaaaaggaagcaaaaaaaagatgacaaaaaatttacgttctgtttggccaaggtgtccacggcaattctagatactcaactggtttgagtttaggaaacacggttttgaaatcccactcaaggcctctaaacacaattcctttcggggttgcctcgtgagcacacgacgatctagggcacatctcagcgtccagataggtgttttggatcacgagtgtagccgttcctaacacggaccggatttggcagatgtgaatcgctggtattttggtttcgccttttatgaggatgattgggaatgaaaattggactcctggctttggagatcgatgccaaccatagtctttgcgtttagattggcatcgatacacgatttccgggcggattaatcccgtcattgagttacggattgttatgttcatgtttacgtagtctggttccttaagagccacggtgttggacgagatcatgaaagcttgtaaaagaagacaccatcgagctagggttttgacgatgttgttgctcttgttgttgtttagatccatctttttttttgtgtgtgttctcgctcgttcgtgtttttccctttctcataaatatatgttaagtatatcatagcttacttgaaacagaaactgttaaaactttcttatattttctcaaatgaaagcaaactaactaacggtattttaatttgccacaaacaaacaaatggttacatatgctaaaaatgcaagatttaatttttgctaactttaactgaaatgccaatgtttaagctgtcacacatataggtagggtttattagtcggttcaaaaaaaatgcttctgggcctgtttatttgagcagtctcggcccaaactcagctcatgagtctcaccatctcacatgctcatcacgtgatgcgctctctgccaacatgaatcgcgcgcgcacgtcagctatagtaattcttatgcgtcatatcattccgtatattggtaacgtatgatccctcaagaaatgttaaaccctcaagaaatgtccaccgtgagtagtagtagccaggctatagcgcgctagaccatttgttgagcaagtatttatttggtaaaactttgttttcagactagagttttcaatttttcaaaaatgtcatttgtggtttcgcagattctgagtggatagttggaatctttatcgattaccagctctctctcctcatgttttgccaaatacggaactactggtacttaacgcttgtgttgtgtcgatctataattggtacgtacgcatttgtttattatttgggccgtaagaaaacacgtggtagtgggtgcgacgtgcaaaaacttaaaagtacttaccaaccattattactacgtacgtgagtgagacgctgtgctatcagtaaccacaccgatcccgtttatattctaagttttactgcaaatggtaatcaaacaaattatttgttctttcatgagaagtggcggtaaattctattatattcattctagaggaatgagtaaacttaagcaaaatacccatgcattaatgcatatcgaatgttcaggggttttttgcacaatatatatacttagtcctgctgcaatttctttaatcatttatataaatctatcatttttcgcatcttgttttttaatttaccggccatggataagtttttagtcatgtatatatagtagcacattgaatatgcatgtaaaggcataaacttttagaacattaagccatgatgtctctatctacaactctcaaaccgctttctcatttttcaccttttgttaaaagacataaccccaaaactaacaataccttgttcacacttgacacacataactttacaaactctttttggtccaaacgaggaggatctgtgtctcacaggaaacacacggtcgtggctgtttatgaggcaccggatcatgtcgagagctcatggagaagactcttgtcggaggttgtggtggtgagaacgaagaggtcattttgggaaaggagttggacttcttgggacgtgagcaagttagtaatattcgtcgggactcatttgttgagcctcttggctccattttacttcagttggaggctttttgggttttcccttggctcgttttcatcaatggaatctgcattaccttgtcttatcataggaacctttctcaccgaagttttgatctgccgaaatggctcgaatatctatttgcttacggtggcgttctggcttttcaggtttacatatatatatatatattctcactgtttgatatgaacattagattaagaatatatatattatgtatctttaatcgcaacttctaaattgtgtgtgcgcgcagggagacccaatagagtgggtgagcaaccatcggtaccatcataagcattgtgagacacaacgtgacccacacagccctacacaagggttttggtttagtcacatggcatggatatttgatacaagttctatccttgagaatgtaataaaaattatcaatttgtaaaaccaaattaatttcttgatggccatgttaagatgatcaagttttttcgatgctaagaataccctttttcctatccggggaagagacctaaccctgactaaaccgttgggtgcatgctcgcagtgtggtggagaggagaatgtagatgaccttgtgaggcagcccttctataggttccttcagcgaacggtcctattgcatatgatggcttattccttcctcttctatttttgtggaggcatgcctttactcgtctggggaattgtaaggatacataccattccttgtcttaatctcaatatactattatccatgtaaaataatatgagagaaacggcaatggcagggtatcacaattgcggttcgacttcacctgacttttctggtgaactcagtttgtcatatatggggaacacgagcatggaacacatctgacttctccaaaaacaattggtaatgtgcatacacacacatacacttatacatatatctaatctaactaaatagtgatattagcaattactatattggtgatgaatatatcaggtgggtagcaattttaacacttggcgagggatggcataacaatcatcatgcgttcgagttctcggccaggcatggactcgaatggtggcagctcgacattacttggtgtctcattagatttcttgaagctattggtttggccactaacgttaagttacctactgaaactcaaatgaagggaaaggctttggtttgatctctgctcctcctgcttccatctccaactacgaatcactatttcttcagtagttagagctgtgatttgttgtgtctaaagaacaccaagactttataaacaatctttttatctacataccttgaaatctagataaacgttaactgttgcgagggggaaactctataatggtactaataagggaatctcaaatgaaaccatttagtaaaacactagaattaatggaagaaactgctgcttcacctttcacctactatgaattgagtaagacaatataataacctacaatctcagagctatcctctcaaagtgtataataataacttgggaggctgcatggtgcgagcttggtgaacagaccagacctcacctcggttgttgatctgacccgggagctgaggagacgcttggccctgctccgttttctggtggtgcggatattccccacttcccttctggacctggtggttcgatcacgtggaccccaccatcggttagtccaactgcaaactggtttggttcagacggatgtgctgcaactgtggctggatatactctcgagctatattcaataaaaagccagatgttacttatgttgttgtgtttgtcttaactctgccaaaagttgaaatatagcagagggttcttacctcgggtttgaaggcaaatatgaattgggaccaatgcggcacttcagttgcaatgttgttgccgtcaagatactcacacttccatcatcaaaggctgcatagattgactggctatcacatgaatatactgcatctgtgactgaaccacttgactctttcggtatccactgaaagaagaaagaaagaaacagatcaggtcttacaggacattaatcgatcaggtatttaaggacattgacaaaacatttaatgtaatgctgctctatgagacattttggcagcatacctgcttcatgttctctaatttaggagcctcatatatggctaactggctggcatggacaacaagtacatgtatctggtcttgatggaactgaacgcgtgtatgagcaagtggatttggtgaatgcccgcttggaatttgtatctgtttgctagcttgtttttcccatccatccatgctccatacacaaagctatacagatagaaccgtttatatattaggaaactgataacacggcagatgaaagcagtggcaagatctttttttataacataattggagggggaatatattacagccaatgcaaatgcagcatataagcatacctgagaatcagcaccagaggaaacaagaacatttagcacgtttgagaatgctaaaccagtcactctcttctgatgacctttcaatttacttttaacctgcatgattcattaccatccaaaagctgtttagaatatttgtttctatgacaaactaaaaaatccttttaacactttcagttgagtcaggatacctcatcaactctgacattgtagatttgaatagaagagtcatccattccgatagcaattatattattgtcttgaggatggaaggcaagggaagtcgctgctggaggaggagccatgaatgtcgtcatcgtctgcaaaaaagaaagataaataagtgagcaaacacagagcttgagaagccaactagccaagcagatgaatagacgtgagtaggacatagagggaccttaaaagtcatcatgttgaataaggaaatttttcctccagaggctgacatgacataagaatcattttttgagagtgcaaagcatggaactacatcctctttgtttccctcacgtgtatcatttgtcattaatactccactagatggctgccaaagctgtggtgggacattgctgtttgcctaaacaaacaaaaaccatacaagaagctataactattgagtttcaaaaacaccattatatgtggtattaacggttatggtatacctttcccaaaagattccgctcactcttttgccatttccatagtttatgtgcagcattttctgctaatgccaatatagcacctccagaatttgtatatatcaacttaacaacctgcatcgagaaataagatgacatcatgaccaagataagaagagagaatcagacaaaggactccagaaataagttttatgcaaaggaaactttaagataattttcatttgaactactagtaatgaaaattgtctatttaatcatagaattccaaatataataaaaggaagtattttagctctaatagtgggaaatgattgctatatcattcttttaaagtaaggtctgcaacgcatcctagttggaacaaaatgacaacatgtttcaaatagattggatacatactcttgctggtagcagggtgtcaggaagccgcagagtacgaagctgggaacgttcactgatctcagtcagcttccaagtctttgatttctctgcatcatcagcgattcgtggtttgacatctggcagactgcgattatctccattctaaaaccaaaaaattatgaataaacttagcaggaattcagtaaagcgttttgaatgaaaatatctaaccgaacaaaatatcttaaaacatttcacaggtaggattaccaatccagtaacagatgccactggtccacttctttcacccattgatagactcattccagtgcttgaatttggagtgccaaatgtgccaacaataggaccctaaaacaaaaatcatgcattcaaattttttgttttctgcaatagcaaccagccagaacagaataagaaagaatatgatgacaagtgtttaccttagcaactgacccaggaggagctctagagctatcaaggccacggtttgccatggaatgcaaaattctggaaccttcagcattcgctagaatcttaattccgttatcagtagttgagacggccagcagagttccttctttattgatccttaagcaaggggaagactattgatattaagttagcaaccaattcttttaaaggtcaatactacaaacagcaattgaggtagacatagacccttaccggtaaacccccttctgcagccgttgaactcaagagatcaacactatccatatcccaaaatttgacttggaattcatcaccagctaccaaaaatttattcttcatggtgtcgaactggacaacccccacagaccgtttccccagtccaagataagtccgcttcacagctccttcactttcattccattcaacaatgaatgactccccctccttactagtaccacaagaaaataatctacaacaaacgagaagataaacaagatatgaacaaaaggatagataagtacagcataataagattataatattacagcatgggaatcatttacctagtcccatcagcacaatatgccatcgacgtgcaagatcgaccgggggcatcataatccactctagaacccatgttgtcatataaccaagcctttattttcccatcaacagcagttgagaatatgaactgacagaaagaaaaaatccccattataactatctcaatggccaaagagagcaaaagtgaaaaatcttgcacagactataaatgtagattgagaaacataaaactgctcacatcattgtatagcaatacacttgtaattatcataacataaatttgacaaaagatggaaatgcgagaaattaggcattctgcttgagcagagaacaccaaatagacaattggtaaacgagattgcatctaattggatgccttaaaataaagagcaagagacactttatgcattctactctacctgaatattctctttctggtgtgggcacacggaataaacaggtgcctcatgaccttcaaaagtgtgcaatttatttccggtaacagcatcccagacctgtatagaaattatttatataagcaggatggtctcattatacaaatgtaaaaacatacgtcaagatgcaaaccttgattgtcttgtcttctccacaagtcacaacacataattgctggtttggttgggagaaagcaagatcgttgacattaccagcatgggcatcaatctgtaatgataaaccaaaaaacaaacatcagcgtgttgggatcccagctgtttcaaagatttaagaatgctgaacggtgataaaaacatatattcaaagatccaagaatgctgctcgatgattataacaaagatttaagaatgctgaacggtgataaaaacatatattcaaagatccaagaatgctgctcgatgattatagcaaacctaaacaaaaaaactactatcagaatcctacagaaaagaaaacaataataaaccaaggaactataaattcttacagtaaacagattccatgcctatatccacatataacaatgaatatatatataaaaaaacataagcggaatggtaacctactaggaaaaaagacagacctctagatgattccgtaaatcctcgccaccatgatatgaatatatatgcacaatatgcttggaatatgcgacacctgaaataggaagtagacgttacaacacttgatttgccataaaaattatatgacaaccagcctcaacccatgagggacacaaacacttgactaacgatacgcccataagatcatagaatggcttacccagtagacctccatcaggactccaaacaactcggtttactgctgcagtatactcgctagcaagtgaagcctaatgaacaagaatgaaatcagacaacgggtcagcaaaagataaagatgtccttgatatagtacgtggcaatattgaaagcttttatgagtaatctatctcagaaaactagctattaaccttgatatgttcctcactaaaaagagaagaaaatcctctgtatagttttaactaactaacaacaaatctcccacctcattcgactgttacagtagatcaataaagaggaactatacctgaaggttcacagtgcaagtagcaagatcccaaactttaaagcttctagaaacgagcttctccctgctacccacctcccatattgcaatatcaccaagattggtgccaactaggaaacaaatgtaaatccaagataaagtaagcagattgtactgagaagatgaaagttatgctgtctgatacaagttttgcaggtttctctggcataaaccagaataaaacagaagaatgatgcgtgcttcagaggagaaaaccaaccaaggagcatagtttgctgtactggatgaaaatccatgctcttaatggcagaaccctgactcaaaatcctgctaacgtttttgggcaagtcatcagtagaataagttgcatgagcatggctttgccctggatatgtgactggcaagacattgactggaagattattaacctgtaaaatgttcaaagaaagttgtgacttctaagaaaagttgagaacttaagctgaaaaacgaacaagcagccgttaataccccatctgaaataccaaaaggtctgggtctcttcaacacactttcagaatctgccgtctgataatccattgataggctattagttggaggactcctgggacgctcacgctttaacatagacactgcaaggaaaaaaagaagaataaatagattatggtaagctatgcaattggtaaacacacacaaactgatctccacgttatggactacaaaaaatgaaataaataaaagtttcagacctaagacagcacttcaaggctatctgacattaaattaaatgtttgcttctctatctattatctataaacaagagtattgtgaaattaaacaaaacggctgatatgagcatatagttctctctctctctctaatccaccatagagacagtttaccactaaaaactgctttagtccgtaaaagaaaagagagacagtttaccactacagctctggaaaatgtaactcagtaaatatatttatatcatttcatgcagttcagtcagtcaaagaagcacagataaccatccaactaatgatgatctaaacaagggatggcaaattacataaccgtataagctaatatttggtaaactaaatctccaacacacatatttcagaagaataaaattagtagggacaacattaccagcactgttgggggcacctaagccgataggcccagcggaaacagtagggtgttgtaccgatggattaggcatccatcctgcaagagatgttgtaagaggagctggtgttggctgaaatggctgaacaagagcatacaaactagcaaagttaaattcatgtgctaaaaactaatccaacagaagctgtaatcttagagcaacttacaccgtgagcacctaatggtgggaagcctccaactttagggactgaacccattaaatgattagttgtaggggaaggagtgtgtgcaccattgggatgcccacacgtatggtcaacaaatagtgtttttatatccgggttaggcctaggattcttgcaaagctgatgttgccagttcaaactatgattcagcagaagcaacgttcagttagttgttccaccaaaagaaaaacgggagcaaaagttaaaaaaacaaagcttgtacctttgatttattaaggttctcaatctagaattcttcaaactgggaaattgaagtttgtctcggaagagaggatttgcttcaatcagttttttaagttccccaagcatgatacctcttgcggacttagtatctccatacttggaaagctgctcattttcccttgaattattgcaagtaaatgaaacatcaacaccacaagcgcatggtttataacaatccagtggtcaatgaaaccataaaaaaaaagtgctaagaaagtaaagaatgtacctgaagttagtcaaggttaaaagcatggtaatctccttaaaaagctcttcgttgaatgtcgagaacactttcaactccttaacaagaatatcaaccgccttggcatgatctttcctatggtaaaacaaaagatgggaaaacaaatcaatactcaaaaccacacttcaattcaataaaactaaacaacacaagtgaaactttacttgtcaagtgcttcaaggtacttctgcttccgaatctcgaaaaatattttcatagagtatctattatcatcaactttagtgaatccagaaagatacttctctacatcatcccattcaccagctgttacactatcttcaaagtacctcatgttgaagaaaaaaccagactctttctccaacctaattagtcaaaaaaaatatccaaagttgtaactgcttctggattaacattgaagaaataatgctaaattacaaaatcaaaattaattaatcttaatccctactttactctaatcccgacaatcaaaggaagagggaccgcaattaaacaatgatataatataaattacctgtgaacagtatctttgaatttctcttcatcgagaaactgaagtattaaaaacacgagttctctgctgagtgacgacatatcctcttcttattgctcgctctccgaaagtaacagatcgatcacaataccactcatgaaccactaatcaaacacaaagacacaaagagagaattagggttttataaaagaaaacatcttcttcacaccccaaaaaaggaaagacagatc

SEQ ID NO: 423 - DNA, 35762 bp, Arabidopsis thaliana
taaaaaaaaaaacgaaatcgatcgaattcgaaagacgaatccccccaaacccaggtggcacgagatgtgcacgtgcgagaatatacgagagaggctcccgagaaagagattaaagaaaaaaaggaaagtttataaatataaatacctgttgaattttgactttgaagaaggagagagacaaagcagagaggaagaagaggaagaagaagaagaagaagaagaagactttggagaagagagagagagagacgtgggggctatttatggcgataatttctgatgctgtctcgttttcggagtttcctttttttttttttggatttattgctttttattttaatttatgagtttttatgatttaattaatttgtttttgtgtggtcgttgggcttctattttttttaatagaagcgtgtattttgtagataggaatttactcaaaaagcttaatctccccactataataagtaaccttcgttttaattactttttctaaaatttattttaatttaatgttttcgtattttattttaatttaagtgacgtattgatgttgttgcgaatctagtacaacactgctgtctaatttaatgctctctcgttaggttttgaacgtagctggggatttttttttgtttttcaaactatacattaaagtagagtatctcataattggtttatttctgtttctgtatagaatttagtgccattatattatttttatgacatcaactaaccgtcaattaatattgcaaatattttttttatgaattaattatttaagtaatggattttgaagtttttaatttagagaagaatagcagtaaatcagatgtgatatttttatttccagttatgtagtacgcaaattaattaaattttattttcttcatcttttattgtcaaaaaaacaaattaaaggttttatggataatttacttttggaaaaatataaatcttatgtggtaacaaataagtgaattttacaaatgtgtattctttcttttttgttatagtaattcacagtaaaaagtggagttttattctataatacggtttgtaacgcatttccgtgaatatattatgctaatttgttaggaatttaagagatatggcctattcacatgtttagttttgttctatttataaaaaaaaaaaaaatcaaaatttatatttgtactttattttttttcccatggatgttttggctagtaattactatgctacttcaacagtccatccacattatggttctagtaggagtcatatcaaatcttcttacaagtattcctacaccagtattgcttacattggtttgggcttttaggtctagattatcgggggaattgactggcccaattgctaaacatgattgggaatcaatttcgtcccaaacatgttttccttgaacaatcactttgatgacaatgacacacccagacagttatcaatgactgcaattaatcagcaaatggttccataagcccatctgcccatgttggtgaagaagcatcacctcaaatatataattttaagatgagagagcaaacattcctttctgatcgctctgaatattttagcaatttactaaacgtaaagttattttcatagctttaattcaaaatttctgtaactagagctagcaaagaaacaaagacttgtgtttaatattatatttttgaagaagatagtagaatcttctgtctatttgtttaatatttgaaacatcgaataaatggtttcaatgagttgtcctgactcatcagccgacccttaacaatgactacaacaacttcaaattttaaaacatcaagtatcttcaacaacataccctttccgttttatattaaataattggtaaaatccagcttatttataattatgttatttctgtataatacattacagaagagtaaaacaaaaactttaaaacgacacatataataaaaaggaaaaataaataaatagatatgagaaaaaaatacagttggaacttaatatatacacttttatacaacggatactaacgttcaaaaattttattcttcttttggttaaagttttatttattgtttatgacttttccatatcagcttcttttttaatactatatatatatttttaaaatttgtttattttatgcgagcaaaaaaaaaaaaaagtgtgcaaaaataataaaaaagaacaaaataaatagtctacttgtacttctgtctctctctctctctgtttatcaatctcacatcgagacgaaattagagctactcagacttgttctattaaactgttaccttctccagacaaagcgttacctttttttttggtccgtacgaggaaaaatctaggagacagagctatttgttcgaaagatgcaacttttaaatagctgttgtggaaaaggatttgatgggtatgtttgaatcattgactcgataattgttactcttcctgtttctctctatgggtttgtctgttttatttcctttgtttgggttgctgcaaaattctgtttattggttaaatcggttatggttgttcttcttgattagggtttaaagattctatatcaattttggatgtttgaaatttggagcttatcttttgttcaattctctatgccttccctttatctctaatgttttaaaatgtaaagtctgttcttttttttatcatcctcactatataatatatcacctgattgatccttgaaagtttcatcattaatagcaatttgagtagtttcagggtggtcttattccttctaaagacatggttttgcaagggataattgattcaactgttgttctgcgtttcataagttatttgtttgttaatgtgttgatgaatgatctaaatataagtttttgaggatactgagattaaattacacaggaagaagaaagaaaaggaagagccatcttggagggtattttcactgaaggaacttcatgcagccaccaacagtttcaattacgataacaaactcggtgaaggtcgatttggtagtgtctattggggtcagctatgggatggctcacaagtaatttgacctcaacatgttatctaggacttgcttcttgttcaaactggagatcttgtgaggttgattattttgtctttttacagattgcagtcaagaggttgaaggaatggagtaatagagaagagatagattttgctgtggaagtcgagattcttgctcgtattcgtcacaagaatttgttgagtgttcgtggctactgtgctgaaggacaagaacgtcttcttgtgtacgagtacatgcagaatttgagcttggtttcacatcttcatggccagcattcagctgaatgtcttctagattggaccaagcgaatgaagatcgccataagctctgctcaggccattgcgtgagtctctctaaaaccgttcatgaaaagtttaatatgtcattgtttctgactcttttgttctttgctcagctacctacacgaccacgcaaccccacatatagtccatggagatgtgagagctagcaatgtgttgttagactctgaatttgaagctcgcgttacagattttggttatggtaagctgatgccagatgatgatactggagatggagctaccaaagccaaaagtaataatggatatatctcaccagaatgtgatgcatcaggaaaagaatcagaaactagcgatgtgtacagttttggtatccttttgatggtactggttagtggcaagagaccactcgagaggctaaatccaacaacaacgcggtgtataacagagtgggttttaccacttgtttatgaaagaaattttggtgaaatcgttgataagaggctgagcgaggagcatgtggcagagaaactgaagaaagtagtcttggtggggcttatgtgtgctcagacagatccagacaagagaccaacaatgtctgaagtggtggagatgctggtgaatgaatcaaaggagaaaatatctgaacttgaagctaatcccctcttcaagaatccatatagcagcaacgaaaacaatagagagcatgttgcagaggaaagctcagatgtgatcttagaagataaagatcatcaacaacaacaagaatagcaatggttaggcacagtaattcgtttggcagattatttttagaggtcttgcttattttttttagtgtgtttcttggttcataaaattgatttgatcattactgatactggagtttgtaaggtgtggtattggcacatataagattgaaacttttattctggattatactgaaactttctcatcctttaacacgatctttttcacaatgaggtgaaatacatttacacatttttttaaccaatcagttctgtttcttggaggaagatgatgatgatagggacaaaaggataacggagattacaacaggagctatgataatgaagagggctagagtgagattaggtcttgtgatctgtgggaacaagacacttccgtatttgattatagctgcacctgccactgaaccaactccgatcttcaacaagtagtttaagtcctcctgtacattttgttgaagggcacacaagaaaagagggcttatttgtatttgaaattatttgagtccaaaattaagtaaaaatattatgactttttgggatcaaatttaaaatataggggcaattttataattttgaatgctttgagcccctccagcaaataaaaaacaaaacgctaatccacagaactgacctgaattccttgaccgttatctgcttgttccgaccggtcatcggaagccataacgcgaaatgaccgttttgtccctgaacagtttgacgggtttcgaaaactggtcacgaatttgacactactcatagtcatcttcttcgtcggttctaagctccggtgaacagagctcgaacgagaaagcgtgggaactccaatcgccataccgggaacgaagacagaacctgacatctctctatcttttctctctaattctgtcgtattttgtggtcacacaggcttgtgaatggcgtgaacagaggataagagagagagacacgacgcttaccaaaaacacatctcacgttttgcgtcgattcttgaaactttagaacgcaaacgctccccacaaacccacgtttgcgttttcactcactttcataacaaactaaagattctgaggaacaaatacgtaaggaaaaaacctgaaaaaatcttagtttattttttatttgcctgtttaatatctatattatataatttgtccaaataatacttaggttaattattttctctttaaaaatcttcattttgtattaatttggcaaaatcagacatccaacttaacggatgttaactttttaacagatgtttatagttaaaatttaactcatgatatttacaaatatatatacaatctattttctatattctataaatatgttaccttagtctagcggttaaacacagatttaattttctgatatacctgggttcgaaactttcttacgacgtttatagtctcttttttttttccttcttcttctttctcggaatttaaagatttcatccagacaaaattaagttcatcttcttcttattggtacgatgtttttaacttctcaagagagacaaataacacgaattgatgaagctcggcttaacttcgacaaagctacttttaatttttttcgaaggttctgtaaaaaaaattcagatccaaacagcgatttcaacatgacgatttcttttaggtttattaatttgattagcttttgttattgtgtggtcaatttgattgggggattcaaacctaaatttgagaaagcaaaaaaaaacgaatccagatttggcgaagaagatgaagtcccaaaaaaaaaaaacgaatacaaagacgtaagcgagattcgtacccaggttaaacatgaattgaatatcatattttgccttgactaagataacttaattgtaaaattttggaaatagattgtatatatatttgtaaatacgatgggttaaactttaactacagttagaaagtctgttaaaaagttaacagcagttaagttggatgtctgattttatcaaattaaacaaaaatgaaggtttttaaagagaaaaataattaacctaaatattatttgggcaaattatataatgcaggtattaaacggccaaataaaaaataaatgagagttttttcaggttttttcccccaagatttttataatacacctaaaaagaaccagcgatctttgtcttcgctaaaacaaaccaaatctaggaaacttgtttaataataacatgcttaaacttgtttatttttaaacaagtgttcttgtaccaaatcccactcatatgtattcatgtgtctaccgtaagaccaacgatctttttcttggttaaaacttaaaaacaaaccacatacacaccatgttttgtgagtttttctttgatagaagacactggcaagaatgagcatcttattattaaacaagtgttcttggctttgcatttgttgttattctattaaatttaacgtattgcagctagtatttagggggaaccttgcattcaccattatatagtgaattagtgattgtgtatgattttataatatgtatttcaccacaattcaaacatcaaaccgaaggttttttccatatcactggatctccgaatcgaattggtaccatagcagatcaatagtaatttgattaaaaatacaaagaaaagcagatcaatagtataataacttcttaatgaaatatttatatatatacacattttttataagcatatttttgtataaataaataaataaatgatatatataaagaaatagatagaggaatatatatatatatctataagcattttaccaaaaatgtatctattttagttttatttattttgaaagataatttatattggttaaatgaatggatgaccatagaatatgatataactataagagaatgttgtttgaattttaacaattttaactaaattaaatggattatattttacacataagataccatttactttatccatatgtttagcaatattataatttaggagaatttgtatggtgttcaaatgcatttaatattttttatatagtttaattcaaaatatttaattatggtaagtttagtaattatggtgttgaatttgtatggcatatgtttggcaattagttttatcatgatatagtttctaatttaaatgtttggtaaattgaatagtagaattaaataaataaaaaataaaaatgctaagaataattgtgggtttaccacatcagaactaaaacccctcttttaatatatacactagataaggcccgcctatttaggcgggtgtacatgaaatttttaaatacttgaacgggtctaaacttcaaaatccaaaaaactcgaaccagaacctgaataggtatccaaacatatctcaaatataaatatatattagttacatttatacttatatatagaaaatattaggatatttttggatatattagttatttttgtgtatttttagatatattcaagcaaaactactcgtgttgttttggaaatttttgaaattttcaaataatttaatagatttgcacacaaaatttgatatttcaatatataaataaactcgaacccgaacccgaacccaaactgaacccgacccgaaatcttaaattacccgaacgggtcctaaacttctaaacccgaaaacccgaacccgaaatatccgatccgaatacccaaacgcctaggcttaaaaattaatagaaaaaatagaaatccacaaaaatatttagaaaccaaacattgttgaaaatatattttctatatatgccgtaatctcgtaagctaattttacatcatgcaaattaatattaaataagttaaaattaataaatgaaaataattgaaaagttaaatcttataagctaagttatttttctcaaaatgttctattttcacttataattacatgagttaaacacagatttgttaattttctttttgttgaataaatgtttataaatatatagacatataaattagtatatgtaaatttgtttactttttaagattttctacttttttagagaataaaaaagttaaattttgaatgacacatgtaaacatctgatcgtttgacttgacacgtgacacgatcctatgagttagcaactttgaaaaccatactttatataataagattattatgagatcattcaagaaatagttttacctttttacaagacataaatgtgcaaaaaattacaaaaatcaacgcccaaaattatgataatttcagtgggattgttctcagttgaattgaacgatgcgcatagatgtaatggcctatcgtcaagcttaggtattgttcccgtatttctaggaggccaactcggttccttggctcagacttgactacatcccccggaatatggaacgacagagattccaccaagttctttgctcgtagtgatgttttgaagatcggaaagtttgtggacgggaggaaattcatgagagatatttggaaccgctcttattaacaaagacatcaaaagaggcacatttctccggctaacatcaccaccaagagcaactggggctctccaaagcttgggcgaaagcagatactccacgccaccgttgatgcctatgtctcattcaaactcgctatcgcctttgttccagtcaccaatttcgatttcgatttcgactgatctaagattccgatttcgcatgttattctccttttttttttttcttcatgcgttttttttcttttttctttttctgatatggatttttggcgaataataattagtagccatatattttctttgtttgtttgttccaagaaaaataaaaattgcccacgtgttccttctagaaacttcgagcccaataagtttgggcttgtgcaaagaatggtgtcgctttctcaatctttttatcatcacaaaaacaaaacattgtattacaagaggaaaaattcgaagtttattttatgtataaagaaaaacattaacatttgatgatgatggaacagttctctctatgcatatcaatatacttcgttccattcaaagagagcagggttgcattgcatgcatacgtacaagaggttatataataatgttttacaacaacttttttttttttttacaactattttgacatatttcttttttcttctatattaattttcccgcgttcttttcataatatttgcactactttttttattttttttgtatttgctaatttgtttttcatcttttaaaccgatgaatacatatatatatatatatatatatatatatataattataatctgaaattttctgaacaaaaagttaaactaaaaacatgttaaaagaaatgttaacttacaaaaaaagaagaggaaacgatgatatctaccagaaatttaaaaaataaataaatcgaaagggaatagatggaataattaaagattgcaaaagataagcccaaaagatttagggtttaggacttgctttgtatatatagcatgttaacttggagattttaagaagaaaaaaaactaacaaaagatggcatcattgcgcaaaaaaaacagagctttgcattggatacaaaggagacgtgtcaaaggaaaactcaacgatgttgatccttgtaatgcaacaacagaagcaaacatgatttacctgagagcttattgctgctagagatcttctcgaggctacgtaatcccagagatgtcatcgtttgcaaaagcgtgagcaagaggtggaattctttgctatcttcttcttttcattacaatcagagcttggctttgatcctcaacacacaacctccgtgtgctacaaacgaaatttgcttagacggttggaaaggattcaatttaagcaactatatcgatcctgagtttgctcattctctggtttgtgttctagcctcctacaaagatgtcttgctatgcatgaaatattattcttcacgtcgtgagctacgaacacaattctacatcgtgaatcctgtgacaatgcgatggaccagtattcctgaaactcacagggagttctcaatattacctatcgggttatcacggaatgggtcaaagggaaagtactatgttgtcaagctgacagcgactacaccttctcagcttaaagtttacgtggtagattctaagcgcggtcaaaggaaattctattgtatcgagcatccgccttggtcagagtcgggatggtggccaacgcaatgccaggccgtgaactttaacaaagctctacactggttagcccatgacggacctattgtagcttataaccctaagtataggcatgcatgcataatcatccatcgttcccaagagatgcaccatgcttctcatggtcatggcgccgtcgtttcagagaccttaaccgtctccatgggccatctacgcatcattcagctcgtttgctatccctttcccagtgagttactaaaacctagcccattcaaacaaatctagacactaataataataataattaattttctccttttttatgtttctagatgatcatcaccatctttctatttggacactcgtggattacgaacaatccttgtggaaaaaagagcacgattctgtctatttcagagacatggtttctggtattccgtggatacaagattacatgcggcaatataatctggagacaactaaacaaatgtccttcctcatggcagttttcatggataaaagggcacctccagaaacgagaaagcggatcattttcccacaccctttactttgccatccgaacaatcctcttctagtttacttgtatttacctgaaagcatcgtctctcttgatgttgcaacaaaaaagctgcagttaattaccaaagacatcaaaagaggcacgtgtcctaaagttggtagatacgaatcaggatatgacatggtgataccaatgacacttcacttagagccatctttgctctcggaccatgagcgtgtgctgctgccatgtcacaaacgtacacatgttgttagataggtccattggagttccaaatgacatgaagaaaatataatgtcaattttttttaccatgatatgaatgtgcttttctttttctctagaatcaaagctacaaagaattttcttaaattatcattcaatcaatcggcttaattactttcagaggtgattcccttgggagctagattgtatttgcactttataaaactgacaaggacagaaaaaaacttatacttcatgtcaaatcaagaaagaatattaatagtgtgattcttctagtcatgctttgttaaaaagagactcaaatccaagatggttgtttgttctacagagaatggtaaataatacaccgattcatcgtaattggacaaattagaaaacgaaatatacacaggctaacaaaacttatgtcatgaatctataatttgcaaccgaacaagaaaatcgccaggaatagaagaacaaaccatgccttagcttgcagctctctcgagtggtttcgagttaaacctctaaatcttttatctacgaacgcgagcaatgccaaacatgcaaatcaatatattcattccattcaagagagtaagatcgcatccatacaagacaatagtcacagtacttacatataaactcttgcaaatttatacttaacagtattttcagaaagataaaaccatttgagattagcttagtttcacgaaaaacctgatcaaatcatttctcaaggatcttgctcataacagttcttgctagatcaatacttccttcttcgtcatctacttctgttccggcttctctgactgatattccatgtccggacaaagagcaacgaagaacagagttaacctgcttccttaatctggcattatcaatcagaacctctgtcagcatcttccttactagatcgtctgttccacgatgccctcctgatgttagcttcagcttttccacttcctctgagagaagctgcgtctgttttcgagaaaacattaacctcttttgtctcaacatgcgtaaactcagtatcaaagagcaatgggttgatcctatacctcagcaattagaagacctattcggttatcggatgttgctagtagctcgatggcttcggatagagatgatgagtccattattaatttaccctcctcttcaatgtcgaacttgacattgcattcttgaagccggttttgtagaacatcacactcatgcagcaacttcttgtctgcgttttttgcagtttcttctctatccttctcccgttgaacaattctctgaacattgcataaggtttaagcgttaaaacttccagattctccaattcttagaagaagattttacagaattaatagacttgaataaatctcctgcgacgagggtttttacctccatctccagtttttctttcattatgccgctaagctcttgtctcaaatctgattgagtggttcggagagacttgacctctttaacgaggactttcagctctgctttcgctttcacttccagctcttcgtgttctttatgaaaattctcaaaattttctcttatatcattgatctgctgcagcaacatctgattttcttgaacaagtgactcatttgcagtctcaatatgtgttttctcgtcctataagccaaatataaagaaaaacatctatagttgaatgcaaatgaattttacagtgaaagaaactaagagaaacacaaacctttatagagtttaaaaacgattccatttccatgcattgcttgcggagttcctccatatcccactgaatttgagtaaatctttccttttcatctaggactgttttctccatgccttgcttgcagctctctcgagttgtttcaagttcaacctctaaatctcttacctacgagaccaatgccaaacatacaatgcaacatattcaaagaaagcaagatggctgatcatttgaagcagaaataatgtgggggaagaagacagagaggagcaaaaacacaggtgatagttgtgcacacctttgttgacagaaattgtcgaacggctaactcctgattcagccttgagataagatcttccgtgtcagcttttgctgtttccagtctctgctttaatgtatcaataaccctctttaatttatgtcgctcctcagactgaaatacaatagcaagatccttctgagtctcagtatctccacctactgcaccatacatgtttccatgggcttcaccatgaatatccatagcgccttggttaactaaatcaggttccacagcagttgacgcctcaaaatcgcttacatgagtttttttaatgctttcaatggtcagttcttgaaactttctatcacttccatccaacctctgaattccaactccactagaaatgccccctctggttacggtaccagttgctgcatctccattagtactagaaagacgttcaactttttcctgaaaagaactttgatctagaagtccatattctgtgatcaactcatgccaatcagtcacattatctacagcagttgaattccttgagaaaagatttttgagattagcttcgtcatgcttcattgttgaggcattagatgtctcatcagcagaatcattgtcatgatctatggtaactgatgaactaccagggacatcagagatggtggtaggtagaagtgacggaatgtccccagaggtatcttcagtttcttgatattcatcattaaaatctgaagagatttaaagagtaaagaagcaaattagtaaataggcaaatacatgcaaggtttttagacaacaatacaaaatgaagtgggagctcagacaaattaaatttaacttcctattgcatattttctctaccaagaggaaaaaaaaagagggaaaagaagagcacatacaagacctgacagcagcttcaagctcaagaaatgtagctataagagcgcttctggatatatcaatatctgacaaaagtctattcatccaatcttccagagagcacctcctctacaatagactaaacatattgagaatattattgctgtcactaatctaaagtgttgagagaatcgaaatctacctcttccaaaagtgtctggtttctcatcctcagaatcttctttggtggtgcctggggtaagcttttcttcacaaactcctttttaatctgaaaacacggtagcccaatgacaatgtctaaatatctgaaatgagtaagccagaacaaagaaaagagtatcgaggaaagaaagtactcacagacgaatataactccaagaaatcattgaacctcctaagtaccagcctagcagaagtgattccctcaggagattgtatcgctacttgcactctataaaactgataaggacacaagtaaaatcttaagactaacatattatagctagaatgactataccaacaggttggtacaaatatctgtaaaagataagataatacacaccacggcaggatctgaaacgcttgacttgggaaggtcaacccaagaagggacagtgacacagtaactccaaccagttcgatgatcatgtggccaaaccgtgtcccttccttcctaagacaaatttacagttagaaacaaattccaaacagaatcaacgaattcgaatattgcagagagaaaatgattaccaaatgacgaggaggagaactccaatccattcccagaggtaacggagacctcccgtcgtggcgatgcggcggagatgctcttgaatctgtgtccggttctcgtccattagctccgtcgtgactgtagctcgtattacggcggtaatcgtcttcttcgccttggaagaaagggccaggagagaggaagcggtgagatagtggctcgccgaagggaccggagacgttgtaattgaaatcgagaagagaaagatcgtgcgcgtatagattcatttcctttctactctcttgattccttcttctcctttctcgatctctctctatcaaacaaacaaaatttgctctctctgtgttcttggagcaaccgagtcaaaacgctccgttttgctttctcagtttagtttatgtaatttgataagtagtaatttcacaacaagtcgctctcgtctagtggtttgcgtattaatcaatttgtgcgacacgagttcgatcgactttaagagcggtgaagatagaacaaattatgtgacggaagccgtcacagtcgtcctgaccaactgtgacgatagcaagtgccgtctgagctcttttttttttttggttccggttgagtgacttggttgttgaacatccggtaatgcgacccggttcggttcgaccgattatgaggagacgacagaacaataaacataacggccgagtcctcccgtcactgtccgagctcgcttttgattattgtagatttttatgtgtttttggagatgattctgcgaaacccactaaaatctccttttaactctgaactatcgatcttcaaggcactgctcatgtcaacgatcacagaatctatatccaatgattactctcgtttcatctctatccttggagtttgcaaaacgacggaccaattcaagcaattacattcacaaagcattacgagaggtgtagcaccaaacccaacattccaaaagaagctctttgtcttctggtgtagtcgtttaggtggccatgtgagttatgcatacaagctgtttgtgaaaatacctgaaccagacgtggttgtgtggaacaatatgatcaaaggttggtcaaaggtggattgtgatggtgaaggagttagattgtatttgaatatgttgaaggaaggtgtgactccggatagccacacgtttcctttcttgttgaacggtcttaagcgtgatggaggagctttggcttgtggtaagaagctgcattgccatgttgtgaaatttggattaggttctaatctttatgtgcagaatgctcttgtgaaaatgtactctttatgtggactaatggatatggctcgtggggttttcgacaggagatgcaaagaggatgtgttctcgtggaacttgatgatctctgggtacaacaggatgaaagagtatgaagaaagcattgagcttttagtggagatggagaggaacttggtttctccaacttctgttaccttacttcttgttctctcggcttgttctaaggtgaaagataaggatctctgtaaaagggttcatgagtatgttagtgagtgtaagactgaacccagtttgagattggaaaatgctctggtcaatgcatatgctgcgtgcggggaaatggatatagcggtgaggattttcaggagtatgaaagctagggatgtgatttcttggacatctatcgtgaaagggtatgttgagagagggaatctgaagttggcaaggacatattttgatcagatgccagtgagagacagaatttcgtggactattatgattgacggttacctacgagctggttgcttcaatgaatctctggaaatattccgagagatgcaaagtgcaggtatgatacccgatgaattcaccatggttagtgttctcacagcttgtgctcatctgggttccttggagataggtgaatggattaagacatacatagacaaaaacaagatcaagaacgatgttgttgtggggaatgctttgatcgatatgtatttcaaatgtgggtgttctgagaaagcacagaaggttttccatgacatggatcagagagacaaattcacatggacagccatggttgttggtcttgccaacaatggacaaggtcaagaggccattaaagttttctttcaaatgcaagacatgtcaatacaaccagatgacattacttaccttggcgtcctctctgcttgtaaccatagtggtatggtagaccaagcaaggaaattttttgccaagatgagaagcgaccatagaattgagccaagtttagtacattacggatgtatggttgacatgcttggtcgagctgggctagttaaggaagcatatgagatactaaggaaaatgccaatgaatccaaactcgattgtgtggggagctctacttggggcttctagacttcataatgatgaaccaatggctgaattggcggctaagaaaatccttgagttagaacctgataatggggctgtttatgctttgttatgcaatatatatgcaggttgcaaaagatggaaggatttgcgagaagtgagaagaaagatcgtggacgttgcaattaagaagacaccaggctttagtttaattgaggtaaacggttttgctcatgaatttgttgctggagacaaatcacatcttcaatctgaagagatttacatgaaactagaagaattagcccaagagtcgacatttgcagcatacttgcctgatacttccgaattattgttcgaggctgggtaagataatttttcgtaaagaatttagctgtgactcttgaggttattgcttctgaagctaaaggtacacagttcacgattatagagaaccgtgagatgtgaacagaaccatagattgtcaaagtaaaagttgttgctaatgcagtggataagatacagctcatggttcagttatatagtaagggatgcctacagtgtggctaacagatttgtccgattgtcgggacacccaggaacaaagaactggaagagcacagtcaggtaaccaccttgcggaccaaccccatagaaagcataaactggtttcgcgaagtggccttgttttggaaatgtgcttgacactcacatgtacaaactgagcatcacctgcagcagtcgccctctctgatcggttctaagcaattaagttctgatcctctgcaggagcctgagatgtctcttcaataaccaaaaaagcttctggaactcagagccaagcctaaacattgagaacagccccaacatgcttcatatgatccacacagttatgtagctgagttgggtctgggacttgaacaagagtcaacatgcagatgttgggcgatacagaagagaaacatccagggaaatccagtattattttgttctgactggatatacagtcagcaattcattggattccatcaccattttgttggttgtggttgaaaaaaaaaacaaatgtggatttgaacaaacctcttttctaagagtctttcatatggatatgtaaagatcttgtatagatttactgttgaatagagacaattctcacatatattttcgcaactgctcgtgttttttcttaccttgaaaaaagcactaaaatagtttgagctaaatcatgcaagtctaaattactgaacatcttcctggattgaagtatgaaatcaaagtcaaatattgcagagaaaaatggacaaaaacataaccattagagactcacttgtctctggatttctaatcaaaaagtagaaaggttgttttattccttcagaattctttaatagatgataaaatagcagagagagagagaaaagaaaacaacacataatatatggactacgaggagcggagccattgaaagaaaataactgaacgaaacagaaaaggagatggatgatgcaaattattaaagtatgatcgaaaatggaactaattgtatagttgcactaagcttggagcataagaagggcacacaagtgggagacaatacaactcgtgagggtctccgagatacggagcttctccgaggctaacaggtttgaagtatccatcttgtccaatgatgtaagctgtttggtagcgacgggtcacggtctgtttatgtttggttagatcaaaaacgacagcgactttcttctcctcgtcgatgaagaagcttccaccgtcgaccataaactgaaaaccagtgagtggtctcatatccagtttcaaaaacatgctccacgaaaccgcactaggctcaatcttagtggtaagccagatatccaagatctcgtatgaatccaagcgctgatataacacggcaagctgctcatctctaacactagagagagacacggtttctaaaacataaaagtggaatggcagaggaagacgcggttcaaacctctctgtggagaaatcaaaatagagtaaaaaatcttcaaactcttcatactctccgtcctctgtaatcttctcttgagcgaaaaagtaggtatttccattcaaagataccccgcgttggtaaaactgtatatcccagtcgggagtgacatcgagaaccctccatgagctagagctaaaatcatagatttcatacccgaaaacgtgttctccgacagcgaggtgatcatccacaaacctcaggatcttgtggttacggttcttgtcgtaaccaagagcatacctgtctaatctgtggaaactgtttctcggttggatccgtacggtttgacctaaatagggattccacaccaagagcatcgagttatccttcaccacgcataacaacaagccgtcgcagtgaagagtttagatacctccatctgatcaagttgaccaacttgccttatacaaggatatatcgaccaaggtgttgttgcggatcccttggagatcgaatttcatccaacagactctagaatccatcatcatgaatcctagaaactccttccttgctgcgcaaataatcctatctttcgataaaacgttccactttttgcaagtacaccgcactgctttcaaagatgtcatcggaaccctcgacagtatctcgccgaccaattaaggtgaaaaatcggaaatcgtcgtcattattctttcgagctttcaactcacaaacaacccttttgacaaatcactatgagttaggttttttttttttttcgacaagaccttttttatttatactcaacaaatagttaactttctttttttaaaaagagcttgtttccttttaaaccgagttcttattgttagaatataggaaagatggaatatttccttattcctataatgaaaaatatgtaaacaatatacttgtaaagcactcttgttatatgttaatatcataactctccaccgagattcataatcttacatggtatcataggtaaccctagcataaaccaaaaaccctaatttcgttgctagctagccgcgatcctacctccgctctttttcgtagtttcgttttctctgacctaatctctctttcttcttctctttgatctttgatcttttgatatctctcttctcacttcttcttcttctctcctagtcattgatcttctttaatcaattgtgtaaaatcttacacttcttgcttttttaaaatcttaaattttctgaacaaaactaaaaacatgtaaaaaaaaatgttaactaattacaaaaaaaaaaaggaaaagcatctaccagaaaaaaaaaacactcccaaaaggattcaggtttaggacttgctttatatatatagcacggcaatgcatgttaaattggagagtcaaaaaactaactaaagatggtatcgttgcgcaaaagaaagagagctttgcattggatacaaaggagacatgtcaaaggaaaactcaacgatgttgatccttgtaatgcaacaacagaaacaaatatgatcgatgatttacctgagggcttaatgcttattgttcctagagatcttctcgaggctacgtaatcccagagatgtcatcgtttccaaaagcgtgagcaagtggtggaattcgttgctatcttcttcttttcattacaaccagagcttggacggtggaattctttgctatcttcttctttgctacttgaaggcatatcttgatgttgaaacctattccatccattgaggatgtttttaatattggtgcacaagatgagcgaccgaaagctattagcctgttgctaaaatggataatatagtttttcaaagctctggtcgtactgagcttactgatactggttattacagtggaaacaatgaaaattataatgctggctattactctggacctcttgagaacactgcttatgcagcgtttgaccttctggtcagcatctctgttgtactcattgtggacgttttggtcataccattcagaaatgttaccggattcatggttatccaccgggacagaagaattctaaaaaaaaacaaatgtggatttgaataaacctcttttctaagagtcacaccataagttccatatggatatgtaaagatcttgtatagctatactgttgaatagagacaattctcatatattttcgcaactgctcatgtttttttaccttcttgttactgctgaaaaagcactaaaatagtttgagctaaatcatttaattctaaattactgaatatcttcctggattgaaatatgaaatcaaagtcaaacttacggcggatcagaatcttaactagtagactaaactattattaactcactctgccccataacaataatcaacctagtgaacaattaatgcctgatgccttcacgtgtaataaaattcgccaagtaattaagcttctcaggatacagattccaacaacaaaagatgcgagtaaagatttcgaaagtccaaagaatagcatgaaattttataagaattggtgggatttgttttttctttctgaaacacggtcttaccatagaactgaaccaaaagtaaacgatggaagtacacacacagttagggtctcatacatttgactagaacatccacaaatctcttgtacatgtgctgcttcatgtacatcttctcaacgatttcacgtccttggctacctagttgtagccttgtagatgggtttctaagaagaaacaaaagattctgtgccaaaactttgttacctgccctccccacaggatgaagtagccctgtaacattgtgctccactatctcttttgttcctccagcatctgttccaagcacctgttcccattaaaaacaatgattagaatgagaacattgcattctttttgtctctcccgaataaccaataactctatcgtttgtttctcaccggaagaccataagccattgcttcgatagtcactctcccgaatgtttcaccaactccctgtttcacagttgaagaggggtaaacaaaagttgaagaacgcttcaaatagcattgattgtttgttttgagtgcagccataaaaggatcaagatgagaaagattacctgggagtttgttacgtagacatctgctgcggagtataatgaggcaacacgagtggtcgctggagtccacagaaccgagttcgataagtttccattgtttgacaagaagctcaacatctccttaacgtatgctactttgttgctcttggacccaactgatccaagaagaagtttaaggtcttgtttctgtgttacgttgccagacaacagcagctttcttctaccggtggcagagagaactgatggatgattgtcaacagcaggagacgtaattttcatcttccgtgatgaacctcttaaacgatgtctggcagaaagactaatcttttctttcctgatgccattgaggttcttgattattttggactgattacgtttagctacttgctcttgtgtttgttctctctccagtgccaaggcgacagattcaagtagaagaagttgtccctttcccgggtttatgctgctaagagacatcacaagcatatccttatcagtcaaaccgaactccgttctgactgattcacgtagcttttgtcttttctccttcatagtctcctgggtcagtgttggagtatttagtgaagaggataccccagcaacaaaagctaactcatcattaacagacagcggaacaataactggctgagacctaagctttacatggtcctcttcacaccatgttaaccattgtttgctctgtacttcagatagaaaaatcagcaatttcactcggtcaagcacaggtttcgctcgatcaaagtactctcgccggttctccatcacccaccaagcgatttgacttccaccagctggatggtgatccatgtattgatctgcggagattgtaacaaacaccataataagtatcccaacttgaggcagaaaggaatattgaacatgttttaacaattgttttgatgaaagttttcactaatagaaaacaatctaaagtgagtatgctatatatgacaatttctattacaaaatgcattttccagtaatatagctgaaggacgaatgagctatggtacgcatttctaaacatgatagtcagcaaatagtgatgtcaaagaatcagcagatctacttttccttacctatccatgaagcacagacggctgatcctgcaatgacaagatctgctttcatggcagttttgaagctgagttctcctttatcttcaaccactttgatccttctccttgtgagctcttgcaataatccaccccttctgctcagaactacagcatatactgttgcaccacagctcaaaagctcggaagccaactccatcattgaaattggagcaccagtcattgatagttcatggaaaagtaggacgaatctcctagaccaaacaagacgtttgaagtctgatttcctgtcacaggtccctgatcgcttttgcggactccattcaagaattctatcctccaatgatccaaaaggaccaaaaagtttaccgtaggtaacatttatgtttggaagttcctggtcttgctcatccaattccttcgtctccatcacttttctcaccttctgcgtactacgaatcctagtacgtgaactacgactagcttttctggtcctcctcctggggctcacgcttcgccgagatgtgctatcctctttcttggccaaagttacatgcatccttttatttacacctagatggactatattggtatgatctactacagcatgagaactctcatcagcaactaaatcccgtcgtttattctgctcgacatgcaaaacatcttctctgagtttgcctccaaaccgcaagaactcaactttgttatcatcatcatgtgcccatcttgactgaacatagaatccaagatatgtccaaagagtaatcaagagtaaccaatatagcagccggttacttctgaaccattgaacagctccaccactacctttaccctctctacgtggagtcctgcctgaatgcactttccgaagtgtaggtgaaccccttggagtagacctccctgacaatgaagacttaaagctacctaatttcagcggtgatagccgaagatcttccatactttctttactacaatagcatcctcaatatactattcccaagacttcaataagccacaaaaccactagcaattagacacactccatatgaggtcaatgaaactgcaatttaggaagagaaatcaatcatcagctatatatagaaacagtattgatccaagttcatcaagtactccctaactgctccagttacaaggatttcgaattccaaattgaaatcgcgttgacgaaataaagaaagttggtcggttatggaaaataaaaagccgcgagagaaaaaccaatgtcacaatgaagatcaagatcttagcgagtatcttactatttccgataggtcagagtcgcgttatccgaaggtaagtgaacttccgacttggatcgccgatgctccaatgttgaagctgctcccaagtacaaaaaaactggaaaagcaacgcaatcagattaaggagaaatgttgagaaattcacgatctaaagaaaacctaaagtcaacaaaactagaagaaaatcgtcgatgcagagagatgagtaacaacacgagcttgcagaagaagcagacgaagacgaattagaaagaaacgaaaaaaaaagaagaagaagacattacattgcataaagttttctccggcaatctaagcttgcgccgttctcagagctgagccgagtcgcggcgatggagaaagagaaagagagagagaatgctcggagactcggaagttaacggagtcagagagctgtgcacgaggagagagcggtgagagatggctcattcttatttgttgattttttttccttccaattattccttctttatttatcgttgttttgatgacgtcattattaatttcaaataatgatcgttttgctttttccgagtatgatttgggtcacacgtgttagcgactcgtgtgggataatctcttttctttatttttacgtgtgaatttttctaggacatctttaaaatattaactcatgatataatttaaatttgatttataaaaaaatgacaacattatagaacattttcctcactcaagtcaaatgtaatattacttaaatttgttgaattttaaaaataaaattagtagccgacaaaaaataaatattgaagtagttacaacgtcctttttttgtcaatttatcaggaaaatgttagatgaactaatctctgttttatgtgatttatttactaataaactgcaattgcaagaaataaagacactcgatttctgattttagcactttaactcttatttcttgctagttctggcctatataattgtcaatcttggaaaaaacatgcctgaatatcatgattcatattaaaaaaaaaaaaacatgattttacctttttgcagtattatcaatgagcatatataagaaaaaaaaaggttttattataagacgactaaaacattatttgtgtttcacaaatctctcatttatctatctctctcaaaggtttttcaacctctctcccctgatataagcaacaaacaaagtctcaaacaaaacaacacaagaaaataaaacacaagaaccacaactaattgaacatgtgctttaaccacaatcaagaatctcattagttcaattaagtgaactaagaaactcaacccaaatatgttctgctctctttgtcgtctccaccgcaaattcctcagccgcttgctcgtcctttgccttatgcaccgcctcgtgatactcttcgtaagcctgtgacgcctccttgagaagctctgacagactcgtcgttaaagaggtgaactttgaatcaacgtccactttctctgcttctagctttgccaacagtttcttgatcgctacgattctgatgtgcaacgcgtctcctctttgagcagtggtctttgctgctgcgaaaaccgagtctacggttctctgcttctccattgcggtttcttttagcagtttggctcgggtttgagcaatctggactctctgagaagcctcgagtccttctttaatgacggttttgtatttggctagcaaagagatgtaaccaatagaagctgagctgagtacctcgtaacgtgtaccggctgctataatcgcatcgaaattcgggtggtttacgagatcacgtgcgcttagaccgcgtagcttccttagtgtttgctttaagctctctatgctctctgatgtagccgctgattcgcttgtggtagaagtaactgatgaagatgagccaaggactgagcctacctttgaggacgtttcttttctatgagtatcaacaagattgttcaatgatgtggtgagccgagaggtccctgagccctaccaaagtcaaaagcaaaagatataaacaaaaatgagattggtttagatgtgagagccttccattgtctattcaagaaagatctataaaacaaacctgtaatttggattcttctgcgagtatctccgctatgttaatcgaagaatcagtgtctgcctgaagaccatctttatccttgttgaaacaaccacatacaccatctgcaagaaacaataacagagagaagacaattaagattagcactcttgtgactttcttcggttaaaaacattcacaagaatgaataagctttaaagctaacctgcaggctttagaagaccttctaaaccagctgaaaaataaagaacatataaacattgagatcttgtttctttttgggaaaatatttgtttgtgagaatctgaagattatattaccattgtatccgccagaagatttctgcactgtagtacttatggttgatggattctttgcagctgttgtgacaaaacatctcagacaaaaacttaaaagatagaaaatgacataaggaaaaatatcaacaagctttcttacagttttctccattagcctttgcatttgtagcagctgcaaattagaaaaatgaacaagaagatgaaaccaaactgtcatattatatactatccttgtttctatatgaattcatgcgtttggttcttaaggttaccttcaaattcgcgttcgaatgcttccaacatactgtttctcttgttttcagctgttaacaaaaaataaacatcgtcttaaaaacttgtctcagatggatttgagaggagcaaaaggatcagattatttaccttgttctgattcattctttaactcttcaaggccttttgtcgcggctgaaacaagaaataagaaactcagattactttgatcacttttatatgattccgattcatctagttatcaaggcttggtcaccaacaatggctcaagaatatatgttaaagtaccttcaaactcgcgttcaatagcttcaagcataatttttctccttgcaactgtaacaaaacatggaaacagagctggctcaggatacaacagaacaatatatacaaaatagaggaatatggggaagaatagttaccgtgttcatcatcatccttgtcgccggttgaatcattagcctttagctcttcaagaccttttgtagcagctgcgagtaagaaaataaaagagaagaaacttaagtacttgaccttttagaatggatttacatttcagctaggaagttcaatgttatgtgaaaatgaccttcaaactcgcgttcgatagcttcaagcatactatttctccttgcagctgtatcaaaacatacaaaaaaatcttcaaaatactatagaagatgcaaatatgatcagagaaagtagagaggacaagttattacattctgcactgtcatctccttcactgaaatcgtcaaggtttagttgcttaagactatttgtagcagctgcaaagtagtttgataaacagaggaaataattcaagattttatatgggaaccataagaactaattaacatcaataataagtaccttcaaattcacgttcaatctcatccaacatactttgcctctttgcagctgattaaaaagacataaaaacctctctcagaataacactacaataaaggtaaatgaaccaaaaaatgttgagtggaaagatttttcttacattcgtcgtctccttcagctttgttatcggcgatatcttcaagttgtttaaaactctcggtaacggctgcaagagagaaaaaaaaaactcttagaacttctttgaacaataaagagttaaagattctctctgcatatgatgattggtatgtcgatttaccttcaaactcacgttcaattgcatctagcatactttgtcttttggcatctgtaaataaagcataacatctagctatctcagaaaactaaatgagggacataagttatcaaagtagagataacagtttcttaccttgttctttatcatcaacatcatctttgacagtgtgagcattaatctttagctctttaagaccacttgtagcagctgcaagtacaaagatgaaacataatcataaatccaataagtctcaacacaaatattgtgaatcaattaagacagatattgagtgtgtcaaaataccttcaaactcccgttcgatctcatctagcatattctgtctctttgcagctataacaataacaagacattagatttgtgttctgagtagtgtatctgagactaaaagatcatttaaatagagggaaacaaaagattacattgtgcttcatcatctgtgcttgaggtagaatgccttagttcttcaagaccttttgtagcttctgcaaacagaggaattacagagtctaagatggttctcaagaagatatttcattaaagacttattggttatacttatacgtttcaagataccttcaaactctctttcgatctcttcaagcatcttttgtctctttgcagctacaacaagataacaaaatccgactcaagaatactgtaatacagacaaaggcatcaaacaacgtgaaacatagaggtttctttaccgtgttcttcatcgttgattccagttaaatcatcagcctttagttgctcaagaccttttgtagcagctgcaagtggaaatggaacagaagacacaacccaattgttacttcaacttttcaggttcaagaacttaagtaaacaagaataaagattttgtagagagaccttcaaaatcacgttcaatctcgtccaacatgctttgtctctttgcagctgtaacaaaaagaacagagaaattggacttagaatgttgaagaagaaccaaaatgtgatcgtaactagtactagacaaagagtgtttagttacattgttcatcatctaatccttgggcggaatcatcagtctttagttgttcaaatccagcatgagcagctgcaagtaaatctctgtaagtaagactctaccaaaacaatggtttcaaaaatataaacttcaagctagacagaaacattgataggtaccttcaaattcacgttcaatggcttccaacattttatgtctccttgcagctaaaacaacaaagaaagtataagagaaatctcttagcacaaaggtatctgatcaaagagacgtgttcttttcttttctttttaaccttcttcatcatctttagattcctcaactttgttgataccatcagatccagcttctttaagttcattgatatgtgctataatcaagaacacacaaacaaactcttcatgtcaatattttgatccaagcctcttccatagacataattatgagacttttaagaaaacagtgcaaatacagagtaaaggtctcgacttaccttcgaactcaagttcaatatggtccaacatacttgaaggtttatcgacttcatcagtaacagctcctaactatatagatccaaagtagaagaaaccagatattaaatttcaggagtctttaaaacatagtcatcctaaaccaaaatccaatcccaaaagttaattcatagacaggaattaacctcagctgatgtatcaacagattctttaagagtttccaatgcaggttcttcagatagagacaaagaaatagtgttgttatcagacactgtactgtttttctgaccactggtctcagctgattccacacacacaacacagtgactatatcaaataacaaattgcagaagaagaaaagaaacaagaaagagagacagagagaaaggtcttactttgatctactgcttcattgccttggagagaattgacactagctgcaaccaaatgataattttaagagaattgtgtttcatctaaaagattattcagacaaatatatcgtaagccttactttgatattcatgctcaattagatctaaagtactcaaacttccagttccttcatcctaaaaccaaaagtcaaatgcgtttgaatatcagttgatcatttctttatcgtaaaatatatattggtaaagcaattgtatttttgtgtactacctggcaagaaacttgatagaagcttgagagaacaagacacagagacaaacccagagctaaaaactttgttcccatggtggaagattgttatcacaaagatcaaaatacactgtgttgtgaagcttgaggaaaaacaagactttaaataaaaccaaagtaaaataactcaacgtggctttttaatttaataatagaattcacgtggcttttatttttatatatattccacgttcctaattacaaagaattcaacgctatttttaattttattcttgtcttcattagtttctgtgtatgtgaaacgcctataaattatgattatcccactcttaatcttgccaaaagaaagactaagaaaaatgatatttttaaaaaagtgaaaaaacgaaaagtttattattgaaatatatctataatggaatccactaatgctggtaaatccaactattaatcagtttaacttactacaatattatgaaatagaagtataatcattagagtataattaattatcctcataggccatagtccacgtattgtgaactactttgctgatataaataaataatgcgatgttcactacactactaccaaatcgtatctgttagacttggtatttatttatactataagataatattagcgtgctacatgagaaaattaaatacatatatatgattgtacttgtacagaactgacaaccacatgtgtcacgaccctaaaactcaatgatcggctataattaaattttcgttcggcagtaaattcaatatcaaaccttttagcttgacttaattttctagtttactttttaaccaatccactttttcctaatactaaaaatatgaaaaaatcttgtaaaataataaacctgaagtctctctctaaatattgatattttaacgtctctatagataattagtagacgacagcttgacgatagacgagtcagattcgattcgattcgatccgatccgattagagaatataatattgagaggggacacattgacattgtttatccggaagtaacgcgacctagctgcccatgtatcatccatttcgttgctcttcgatctattcctaaaacgtgctacatagagggatactattaataaaacaaaactgatttgaagtaagaaaaataactacacaaaaaaacttatagttctgttataaatagaaataatgtctagtgtcatatttcattactgctttgggccacataatgaaagctgagtcatgtctttcgaccccaaataatttttttttaatggtaattggtaaattaattattattctttacgaagtatttatataatctgctgatatcattaaagtaaagagcaatttgacaaggcgctcacataaaagctttatattagaaagggaaatgacaaggaataagacataaacaagagagaaagcatgtaattaaaagagaagaaaacaaaagacttgtctctagagagtgctgagaaactcaacccaaaccatctctaccctctcaatggcctcacgcgagaattcctcagatgcttgttcctctttccacttacgcacgaccacatgatactcctcgtaagcttgagaagcctcctctataacgcgtgatagattcgcaactgtcttttcgaaagtcatatcaacctcatacttctcggcctcaagtttcgaaatcagtttcttgatcgcaaatattttcacgtacaacatgtctcctctctcagccaaagccttgactaatgctaactcagcgtctacatttttctgcttctccacggccatttctttgagcaatctagtacgagcatacgcaagctgaactcgctgagaggccttgattccttctttgatcacacttctgtacatggacagcctcgaaatgtggcttactgaggccgagctcagctcctcataacgtgcagcagtcgccagtatctcttcgaaatctgaacgagccacgagctcacgcgcacttaaaccacgatactttttcaatgtcacttttagcttctctacggtctctgatgtttgtgtggaagaagctcctttggttacacttacacttacaccagaagaccacttttctttcctatgcttctcaacaattttagtcagagatgctataagactagaggtctttgacgaggagccctacgtaccaaagtcaaagacgtgttaaacaagtttcattgtctatatttcataaaaattatgtccaagtttaagaagaaacctgggaagtggattcttccttgatgatcgaatctatgtcatactttggtataactatggaagtatcctcctcttcactaacaccatttttgtcctggttataacaacgccacgaacctgccagatagaaaaggtacttcaaaatttaatattgaattttacatgacatggtgtccacattaaagcttagaattgagagataaacctgactgtgaaattcctagagatcccaacatttccgagccaccagtgcctttattaaaactgttataagagctagacgactgacgacgactttccgatgatgcactacttgattcactttcaaatttgacgacctcttgtgtttcctccaccttactctttctctttgaggttccatcttctacaacaatatttgtagcagccgcggctagaatccaacggtaaagatataaaaagaaaaactctttagatttaaagtgacgttcatatatcgaacaatcaattcagagcaaaaatatggtttaaaatttaataataaattaagaaaaatttaataataattaagaaaattttaagcaaaacataaaaataatttagaataaaaatacgatcaaaacaaaaaacatttcatcgaacaatcaatttatgcatatatgatatataggcaaagttacctttcagttttcgttcaatatcttccagccgttgccttctttcatcagctgactcaaaaacacgtcaaaataattaccaaaaacaatatatttatatatatatgcatgtgtacgagaattagagtagaaaaaaatattttgaaacaaaatcttataccaattccagcagcatccatagattcaccaactttactgatatcatcagatccatctcgtttatttagactatcgagaatggctacaaaatacaaacgaacatcgggccatcttcaataagtagatagctttaaccctattaataaacagctttgacagtactataccttcaaggtcacggtttacttcgtccatactcgaactttgacctaattcttcacgactactaacagcttcagactacagatccaaagtacaaaacacaatattaattagatgcataaaaaaaaatgttacgctttaaatttgtctttaaagacatacctcgataaacttatcaacatcaaaagaatcttcttggttttcctccgacatagacaatttagtgttctgctccgagctgctgctctggctttcactctcaatctttgtaactgaaaatagattagttttgttagagagaaatagaatccaacaccaataaaaagaagaagggaaaagctcttaaatacatttaccttctacttctccttcttctaggaagctacctgcaaacaaaacaaacccaaattcagttcaattccggctaactatctagatattatgaacacatgtatattgacaaatctcgtcttaccttgaaattcactattactcgactctatgcctccctcggcctgaaaatggatataaaatgcatgcaagtcaatttgatctctcctttcttgttatccctctttgactgtgttacgtacggtacgtataaagaacagtttgtttaattatggttttacgtacctgacaagaaacctcattgaagcttgagagaaagagacacactgctaaacccaaaaccacatatttccttcccatagcagagtttgtcattacaaagaaaaaattatacacactgcttccttaatctttaaaattgagtttgtttgatgtttgaagcagaacatgatgtctttaaatagaccgaatgtctgttttaaaataagaaaactaaaaaagaaataatacataattacatcaagaaacataaatatataaatattaatatatctacatatacttttatggtaaagattttggtccaaaaatctctaaaataaatagtatttagtttttactctctataaaatctatctcaaaaaatattatgctagatttatatccttaattaaatattatactatttaactacatgcaattaattgctatttttttaaaatctatctatatacattaaatatatataactatatatatatatatatatgattcttttttcacttatttttcttatatctaatttatttttatcatatataaaatacatatagttaataaaggattagatttttttcatgtatatataattcaaaaattttaaaaatagacatatatcaatcaatgaagaaaataattaaatgtacaagatccaatattgcttaaaaaaattgaataatagtttagagtcaaacaataaaaaggactaatatgattataataacataggcccgtagtgtactttttaaatatgttattcatataaagaatattaattaaaataaaaaaaattaatttataaacgaaaaatatcaacctacattataccgctggtcaatctatagtcaatataaaaaatagtgataaatatatataaaatcaactatctatttaatttgttctattgtattgttgatccgcatgcaattatatagtataatttagtattatccactatgtttgataaatatttaggtgattatggaaagttttatgtaatggtttgattttaatgttaggttattattagtttttgggcctcccttgaatcactctttaatttatgttgacacctaaaataattttgtctagagatatattatttagatgtacatcatataaacatcactctgaaaattgaaaccctaatacatatggtgtacgtacatagtctgctttgaattttaaggtaacaagcataagaaaaaaatgatagtctataatatatgtctaacaaaatctctgaattttttgtgacgaagacatattagtgtaaataaatcattatacaatgaataaacaaacaaaacaacaaacatgagagaaatatatgtggagaaataatgaaatattgaaactaagaacttttttatataattaaatagagtatacaacttgttg

SEQ ID NO: 424 - DNA, 79355 bp, Arabidopsis thaliana
gatctatatattgacatgtaatttcaaggaagaagaaattgcgtttcttcttcacaaaaaaaaacaacaaggaagaagaaacgcaatttcatggaagcaatgatagaaacataatgtctcagttcacatgtaatttcatttcaccataaggagatcaatcttctcacgaagctatatctcgtgagtcgtggcaagaaacatataaagtctcatgggccaagtcttccaaatctaattgtatactcttccatatgtttattcctgtaatctaattttaatcccttgtgtcttgatattcctatgtagtgttatcattttcagaacttaaattaaccatcaacaaaacaaaaaggaactaaaaaaacttaaataggacctgaaactatcagtgtttgtcgaatcctaatgtatggctccaccacaatttctgatttttagactaagaacattccgttgtaccggttttcttcatggaagcaaatgcaatgatcaaaatttcaattctcatgtaatttcacagcaaagagatcaaaattcccatgaaactttatcttcgttagcaaattcatatcaagcctcatgagccaagttgcagttccaacaatattgtaacgacaactatctcaaaatcgtaggacaatttgtgatcaccattccatcttaaatattatttgcaacattgcaaatcaactgtacgatgaagcacatcacttgtggtgaacttcatgaacattgttcataacatggcggcaaacactaatacgaaccactactgtacaaaatcctgatcaatagtgggaaagaggtaatgtagccattattcaagaacccaccccaaaccaaccttaagagaaatggttttcactcaaaatacttgtcaattgtttatatggaaaccggattctaacatatgttccgtttgcgacaagattgtctggccttgaatgagtttttttttttatactggattggctactgattatgccggatatgtatgactatgaatgtaattgatgctgagttatatgatagattatgttaaaaacagtaacttcgaatattcattcataagagacccataaggagttcaagtgatctatatagtctctctattctctctgccaaatttgaacttcaaacaacatagacaaatagaacacaaggatactagacgacgagttgtttcaaagtttttaaccttcaagcatcttcagcactcggtgagttctcaggtgtcttcaaaggagctgctgcttctgcaacggaaggtttactgtctttatgttcttcgataactgctcggaactcttccaccactgttgggtccttgaacttcagtgccaatgtagagagaccatccttggcgtcacttacactattcacacaagcaaatgtgattcctttcttgtccattttagccagtttcatttccgggtaaagacttgcgtttaaggtcaacctgtagtttccttttgatctcattactaacctggcttttctgttttcagtcgttgatatattcaccttgagttctcctttcccacgctctttccatcctccctcaagatattcgaacattactgagtcagctgtgaaggctgctttttcgttctcttctcctgtttccactgaaacatcttgctttgatgggaaggcagtagtagtttccgtgctcttcgtggtaatggaagtagcaacggatgcaccaaacagggaagagtttccattgtttgcttggccaaaactgaaggatgactgttcagaaccagacccagtcgaaccttcttgtggaaccaaaccgaacgagaacgaagaagcagagaaccctgtgctagcaagtcctgtgaatgcgtttttgctacttgagtgctggtggaaggagctcaaggctccactatctccatttttctctgtgtcttcatttccatcgccctcttttccttctttctcagtctgattaccacctgtatccttgacaacacagtcacttccctcaacagtgttgctattgttgttgtcatcttttacagtctcttccccagcagcaacttcagtaaccatcgttgtcttaatctcgtcttcattcttgtttacagctccaccaccctctacggaattaactgcctcactcatctctttctctccaccatcaataatatccttggtcttagcagatatttcatcaccctgtgtctcttgttttcctacagcatcaattgcgtcactcttttctttactgtcaccatcagtttccttggtagcatcagaccttccatcagccagtgtctcttgttttcccgcagacagaggtttagtcgtttctgcagcagcagtagaaggagcaggagcagtaaaaggaaccaaacgaattccagtaaatggattagaagctggtggtgcagtagcagatcgatctgtgcgcctaactctgataattcttctgcttgccaacacctccttactagcagtgttgaaggtaccactctcgagtgcagaagtgtcttcatcatcatcatcaagaccaggattgtcacgagacagctctttcagagcagttctctttctggaaaatggtatagcattatcggagtcccccattgtaatctcttaacagttacaggcaagctagagtccctacaacaccatgcaacaaaaaaaagatacatcaagattgtgttaacaaccaaataaccagaatcaatctcgcggataaggaagtcccgagcttatatgttgaaagcatagttctaacctgtaaccatccaaacaggaataggacgcccaatttgtacgcacataagttaccaaccatagacaatgtgtgattctttaaatcaaggaaacctaagttaacatgctactgcaattgaaattgataatgaacacgagacaaaaatctagaggcaacaagagcgtatatatgagcacatgttaacaattcaccacgcgatcgcaaatcatatgatagtacagaagaaatttgaaatcaaaaaccccaaactaattcagcaaacacaaaacaggaatctgaagaaacagctaattccagaaacgcacacaaggataatctagcaaggaggttcaaaaggagccgtagaaaaaaaatccaacaacagaactatgacaaaaccctaagaaccagagcagcgagcagtgagatgagtatatagaagaaaagggaattagaaaaatccagattcggccaacgagaccagcgagaaaatgaagattcggagaacttacggacaagcaaggagcagcagaaaaaccctgccggagcaagaagagagatcgccgaggggagtgataaaagagaaaacgaatcttgtcagcacattggaaaaatggtaataaatcgagtttatatttttgtattatttgttatatttatatccaaatcgatattgttgctgatagtcatcgcatgtaataagatgtttacgttttgtatataacatgttgtattgtcgtagctcatttgttgtaaaatacttcttgcagatttgtatagctaatgttataactttataggacaatccttaactaagttattcaaaaagagtggaaattaaagtgataaaggcttccaaagaattatatatgcaccagaaatttgtaattttgagctgaaatctaaagcagaaaatttgtataactctctactgtgttataatatactctttcagatgaaaaccacaatcattagttgaaaaaaccacaacaccaaattccttaatccaccaatcccatcttcgtctttatactctccatccaccaagaatcgattcctgctacaaaatggatccaaaaatatatgattgaagttaattcatggtccagtttcatagaggtttgaactcatgaataaggatgatagatctttaccttggagtatcggtgccggctactggatctagctagggatgtggcgtaagcactgcaaaacaaaacaaaaacgataagttcacttttggcaaagatggaggggttttgagagacaagtctccaagtattagccacattgatgcagagattataataaagttaactcgtataactaaacccatatttatgccaactcaaagattgtgttactaagggtaatgagacatataatcatatagaaatgttagaagcggcaaaatgtttttcttttttgggggagaggtttcaatttaatcaccagagacaaaatttcgactattcaacattgatcctggactgacttgcttattaggctgatgggtttcctttgttattcgtaccccactcttcctcaccctcacttccattaacaagtacagcaccgtccgtagagtctgcatccacaactccctcttcttcattcacttcttcttcctgttgttcctcttcatctccttcattctctacatgaccgttttcttctgctacctgcacaaagttcaaaaaacaattcagtaactactcctgtggaaaataaagctctttgcttcttagcaaacgaatcacttccaaaagaagttacctcgtgatcgatgtttccattttcaagtgattcctctgcttcaacttgcaggtttctaaaggcttccacaagggtaatggaaggtttatcggcatgggatggataattttctgcagcggtataaactcccctgtagataaataagagtcaattttttgggttggcctaaataataacacgcttgagtatgaacatctcaatgcataatcatgggaaaaatgagtggctcaagtatgaagttcttttcctaaggcatccatcacatccgtacaatcatatctaggtacatatataattattgaactacagttcgaaagccataacgaccatggaagaaaaatgcgaatagcagaaaataagtgctcggataccttgtctctgcagtgttcgcttcaacagaaagagcaacttgccaatcctcaaaaagatttgagtactcttcaggatcagctaaagattcagctgcttttggattaacctgatgacaagtcaaaggcaatttaaagccacatgatgaattttctcattgacacagtaaacaaaaaaaagatgcgaaaataaccttgctgagatcttccctccatagagctactatctccgaaactttgcttggaagataagaacgtgccatcagagcagcttctggtatccggttactgtcaagataatttcttgtcataaagataacaaaagacacatatttgatttttccaaacggccaagtgaacagtaatgaaatacctctccaccaataactgcagacaatcttccaatctacccagcgtaaataagcaaagaaaggcaacattgttcttcccctgttccttagcaaggcatgcaagttttgacaccccttcagcatctcccaaagaagaatatagtagtaacaaaccactcaaatccatagcgtacttcatgcaatcctcggccaattgcagctatcatgatagaacacacacaaatgcaagagaatcacttagtaagtagtagatatcagcaatgaatccgcaaaagctagaagaaagctcattggcattgtaagatctaaatataccaatttgctcctatagatacaatgtaaagtagtaaactgactgatatatagcatttgcaaagaaagttatttttctattttccactacaaatcattgggcaacatttttatagagaagatgtaccttccccgaggacatggctaactctcctaactgcttccatttagactcgctctgtacttcttcagcaatttcctacaagcatggaaaacaaagataagaaaaaaaattctacttccaaaaagagtagagtaaagtaatgtctaagcaattaagcatcacatatgatattacctttgcaatttcaagtctacccagttgtatggccagatcaaatttgtagtctggatctgtcgcaatttctaaagcatcttcaatcattccccgagattccaagaaatgagcaacactgaatattaaaaacattttcagatcaaactaaaagagatacacacaaaacagtgaaaaacctattggtaggggggcaatatctctaacagaacatatccacaatattcttcaaaagtacattcataggacatagcaggcaacaagagataaaatgcagtagtaaagaatgaattataagtgaatgcaaaaaatttagaccaaaataacctataacatacttgttatgctgctctttaggaattgtaggtaaaatttgattggctctatccaaatcgcctcgcatcacaagagtcttgtattcaatcaggctaagcagcagggtatatcctatgacactgcattcccaagaaaaagggaaatatgttagcaaattatgtatgcaagataaaacagtctcaaataaacatatataaaggaacgtacttgaattctttgtctaccaagtaaacccggctttggttggcaatatagcctaacaaatacattgggcggtccaaatgatacattgtggttacctgccacaggtatattagcagctattatataatgtagctcataaagatgattagaaataaaaatagactcttgagtacctcgcctccaacacaatagttaagcttccaagaagagttgttgtaaatgaagcagtccccaacccatataccggtcctaacacgttcatcattctcgtggagaacctcaaaagcatcctcaacaccctcttcatcagttggtcttccactatcaaaatgcgaggaaaccaactctcgctgtaatagcgaggaacaccagagtaagcttttgaacaatccacgaaagtgggaatgaaaataatagctgaacatttgaggttgaacagattctcacattgtacttcaagatgtagaatgacgtatcactagcaatggctactaaatcaccactttcagcccaataaagattctgcaaatttttcatgggagtaaagagttagtaaagacactaattgggacaactttcaactgaaaataaaatgtaacgacagaattggaaaaaagtgatgaatgctaacttctcacaacagagacaaggtaattggatacctttacggtgacatcaatttgttgaatcagcctgcattcggcccaatcatagaagcagatgaaatcattcgaacacattgctaacaaggttcctccaaaaatcttctcagctgagaaagtaggccggatactcttcctttcctgaaaacaccaccttttattaatataataagccagtaatagctgtctctattgcaagcatctgcaatttcttcaaccctagaatcatactccaacaaaatagtatgagtaaggccataatgagaatagcaaacctggaaatttttactgaatatctttatctttgatgagctttctctaaccgcacattccccctcagatgaccaaacaaattccaggccagacccaaaagatctatttctccacgccaaagcagtgtagattatgtactctccatcaccgcagactacgacaaacctcccattagggttgtgcttcaagctctgagagttagaatagctatatgtgaggcaagacataattattctggaccacactcttgggacttcatatgaaacagagtttcatttttatcatctattaacgcttcatttcaaatataatattgttttaagtaaccataaaaaccacagatttagctgaagcatgctctagtgatacccaccacaacttcaatgcacaagtccatcacactcatttaagtgggacatgcaccgaaagtgtttaccccaaaagatccaatgataattcaacacaacaggaaagtttcaaaggtgctggatagtaacgctcacttgtggataaagatcacaggtccccaactctttaacagacaagggaagtctttctccatcagtagcctaaggtagagagatgaaagcttaaaatcatcaggcagtacaaataaatagctgagtcacgcaggttttcccatgccagaatacaagagttacaattaggagctagacctcgtaacctgcaccaatacttttgatgtttgcggtttgaatttcattatgcttagcccatatgatttttccgctactgtccatgctagcgacaggaatttctcgtccaagtttaaccatgatggttccttcatcatatccaatcacaaccctgtaaagcaaacacattcgttgttgatggtcccgtatgatcagtttaataaggtgctaacactgatccctaaaaaactcctagccactctaaacgcccttatctctccaaatcgtcaatttcagaggaaaactagctacaataatgacagaaacaaaaattctaccaatagagaacatctactttttgatcaaaattctaataagcattaagtattaaaagtacaaaaactcaccgccgagaacttttgatgtaaccaatggcccaaactctctcgagaccataatttaatgtgttttctagcctgaaaagagaaagagaatcgaagataacaaatcaaacgacaaaatagagaaagcgaacctatggtgaaaatgaatacaagaaataaccgcatgtgaacaaagtgtattcaagtgttaaaaaaccccaaaaaatgtaagcattgttatgtcttttgacaggaaaacgttaggtaaaaatacctgtaggtagtggcgtgccaaatgcgaacagtgccatcctcagaacctgtgattattattggaagctctggatggaaacatacggcagaaacattgtgtgtgtgcccatctagcgtctggacacaacttttggtttgatagtcccatacctgaaaaagtaccactagtaaacgatctgcaaatacataattctcaggggaatcaaagcacagatattggaagcttaaccagaagcataccttagcagtatgatcatcagagccggtaattagatagggtttatcaccccctgtgaaataatctacacagttgactcctttctgatgagcatccagtgtaaaatttgggtctggggaaccaagattccatatctgaatatgaacaagcatgaaaattagtctaagaaaacccttttaaaagtacctcgtgctaactaagccataaaagctcagtgcttggacctcttacacacctttatggtacgatcaagcgaagcactggcaaaagtgttggtatcttttggattaaataccacttgcatcacatagtgcgaatgtccctcaaatatctgagtacaagcccaaccgttttcccagtcccaaagctttatgagcatatcatcagaagatgacagcacatatggaagggtcggatggacagctacacacctaatgtaatccgaatgagcctcaaatactttgaccttgtccattgtattgtaattgtatacacggatgtacatatcatccgctccagccacaacccattgcttgcgcggaataaacttggccgacctaactgcaaagtcatatataaatttcagtaacagcgacagactatacaaggcaatatacagcaagtgaaaaatctataacaatgaaatcagaagatgctcataaacttgttatacctggcaattccgtcacctcgaaggattttgtaatcgtctgagtataagtcatattaaaatgatattagacgagatgaaatgaaatcataaaaactatatctaaaagactaattacagccctctgaactcataaaatgtgtgatgttttggttatcccatgtcatggcaagcataaatatatattaataaaatagagaaacaaattcaaatattcacccacctgtgtctggtagttccaaatacacacggttccagaatacaaacttgctagaatcctgtaacaccgtgttgtttattaagtcagtcatttgtagcagcaataaaagtacaaacatacagtactacccacagcaactgtgaaaattgttattccatcaacacatccaaaatataacatataactaagttgcaagatggcagaatcaaatttgaaattaccatggttcagtaggatgcagatcaacagatttgactctctctgatcgttgagcaaactttctctgatcaaaacataacaaaagcaaattatgaccacagctataataataaaataacagaagcagaaagttgaaagataagcaataccttgatatctagtctgagaggctgttgcaacataaagaagaagaacaatagttagttccagacttaaacatatcagaacgcaaacaaatgttgctcatagagagctttaaaacccccagaaaacaccagatcttttcaaaacacgatgatcaaaatccaaattcaacctcaaaaaccaaatgccagacactatactcgatttcacgaaaactacaatctataggcgcacgaacacaaagacggcgatgttaaaccatatgatttcggattccacgatctcacttgaattacgcaaaactactacagatgaaatgcaatatccaagatcgcatcgcaagcaaaattcaattgagatctggagaaaaataaagaatgcgagatgcgactacttaccatgtttacagattaagcagaagatctgctcgtcggatctcgtatctcgcttgaatctgctaaccggcgatcggagaaagacgttaggctcgtcgtagagtgcgttcagagagcttgtattaatacggcggagatgaaaattattaaaagaaaatttcacaaattatgcttcaaggaactgatgaagatatttacgagagtgccactggttctgtttatgaacgtcgtcgtaaaatgaaaaaaaaaaaagtagtaaataattctttcttttttctttttctgctatgaaagtgaaattagtgtgaggattatttttagcctgaagtatttatgatttaagtttcatcaacaatatcattttatactatgtagaggacaagtcagatatgcaattaaatcgtgacatgttgcattttttgacaattcaacctaaaaatatattatgttgaaaattccttgcacttttaaacacaagtcacttgtgcaataaaatgatgacatgtggcatttattcaattttttcaaaaaaaaatgttaaacgaggaaaaataatatatggcgacttctttttaacgtttctctaaaaaaaaattagtttgtattttgcctctaaaatatgaaagaaaacacaaatgcctcatatacgaattcctatatttcatgtcaacgatttatggtgatggaaggatacttggttcaggctgtgaagtagcccaaacataaaccttaggtaatgaatggcccatgtcacagactaaaaaacgagagtttatggcccgactctttaaatgctacttgtgtacacttaccttcactcctttttttgggtcatgtttctttcagtgacattgctaacgtatgaaaaacttgattttcttggttaatttaacattatcaattttaagagaaaatcttttaatggattcagagttacaacaccaacatagcttatatagttatatagcattcatcttttatatagtttgctttttcttttcctttttgttaaattggttatagttgcttaagtttaggtaatggataacacgcaatattcatcttatatatatatatatatatatataatttaccaaaaaaaggaattgtttgatgtatttatagctttccaaattctgtttggttgtaaattttaaatacataaatatcatttactaggttgcttagctttgcgaaaaatcgtaactaaagcatcattattgcaagttaaacaaataattgacatttcagccgcttgaatcgttttcgtgtttataccatcattaatttatccattccttagcccttttctactcctttctaaatgtctttttaatcatggttttatattcaaatagaattctaattggcatattaccctaaaataaacataggtaatcgagtttaagaccaaattaaagaaagttgatagaaagtgtgagacagaatgtcattagaaacttaaaaaaatgaaaaggcatgttgtaagtgagaataaaccttcatgattcctaccaaaaatagtatacaacgtattggttgaaggattaacctttcatatatagattgatagaaagtgagccaaaattgcattagaagctttaaacatattttgaaaagggatgatgtatgtaagaataaaccttcatgattcctaccaagttttatagacaacatattcacttggttgaaggataaaccttcatatttatttaaccaacaatatatgtacgtgtgtcgaaaagaatatatcatgattagaccataatgaatatatacttgcattacttgttgcatagtttatttcacttctactggtaacatagatggactcgaggcatcacacatcaagtcccaaagggattagttgtttggatgccttttgtcccattttatcgaattttcatgcaggctcttcatattaatgagaaattgcaaaacaaaacccacatgatcattatatttttattataaacaaaccaatcaaacacttaagttaacacaattatgacgcctcgctctaattgtatgtttagtgggaccttgcattggccgtcagaggagagaaattgaatcagttcaaaattactgaccaaataaaattagtcaaaattaagagaaatgattgaagcacgtacgagaggaaagaaaggtcgaaagagaatgaacttggtatattccaaagaatataccagtccacttataatcttttgaaagtagaaagatataaaccaatcaaaagtaagttggacattcccattttttacagaagagctatctaccgttggatcgatcaatggactaataatgttcaagttatcttcgcatttgttcaagatcttgctttcacggctaaaaggctaccaaaagtgggatgcgcctgaaggtggacacaccaacaatttcacgaatctaatgcgttcgtttttgttggagtagtacagtcacaacaaacgtatagttcatcaccattttcaatattgtgtgctagtaattaaaggtttactcaaaaagatggttataagcaatatgaaatgggtgtggcatagttgttatctcattttttttggtggcttacttgtatgcagttattcagaattgtcactcaacatctggtttttattttgtttcaggaaaataatttttttaatcataatctgaagatttcaaggcgcaaatttttggttaaacccattagtcattagagtatgtaggataatcattaatttaccaaaaaagagtatgtcgaataactaaatattttgtatgattagtcatgattgaaactggagtgagaaaaaaaaactcatcttgatccaaagagatcaattcagtattcaaactaatttcaattcttctgttcattacacgatgttttgtcgaatcttgcaacatccttgctttaacatgcggaccataagtcaaattttacattttggatattttgatatatttaacttggtatgtatatatgtatatatgtatatatttttaactaatatcttacttaagacttataacaaaaaaaaaatgtatgtaagacaaattaaagacaatcgtgttacagtgtaagcttatagaagcaaaacaattttacttatgcatgttttttttttttttggataaaaacatacttatgcatgttcaaaaacgtatatgggggcctttatttccgttgacaccattatataagtcataaagccaacatcggccaagggtgaccctttctgaaatgaaaaaattcatatatatatatatatatatattcatgaacatcataaacttaattaagctttaggtctcgagagaaagcacacgtaaacattttggtctcatcgcataaaaatgtactgtgttcatacaatgccaatacatgcagaggttgtgaatttttttctttaaaagttgcaaacttgatatattcgaatatttattattttaatatatagggaaaatgtatatcgatgattcgattcagttggcaatgtatgagcacggccacgatatgtcgatatggagcatgaatctacctgtttccacctgacgaaaattattttaaagccattaaaaatagaaaaacaagttagtcgtgtgttgaactattgtttaaaacatgttatatgttataacatttgcgtatctccataaccatacatctgtttacaatgcttgcatacgatatatagattcttaagaagaagaaaaaaaagattcgtaagaatccaatattgaataaacatattaaaagtaatattgcaactaatgttttaggggatcggagacaggagagcaagtggataaagaggttatatatttctgcaaacctagaaaaattattgtgcaaaaatatatggttcatcgtttgtggctatctattaccatttttttgttcgcaactataccttttcacaaaatcatgagacgacacaacctacaaccaaaataaactaaatagagcgagaaatagtaacttcatttttccccaagaattgccgagagaagaaataaactaaataaaaagtaagaagaatctaatttgcaaaaaaaaaaaatctgaacaagtaaaaggaatataatggtgattggtgcctctacgtacttctcgccgcgtaacgaaagagaggtcgcgtcctcgtgctctctctctctccttgaaattcttcttggcctcctttttcccacatgccacattggccttttgcgtatttgcatattgcatgcacaacaattattatcatcatcgtatggttacgtttatgcacagaaatcgatgaagtgttcataaatgataagtatttataatttagaacccaaattttagggtccatataagaagctttgcatagagttttatatataagctaatagaaatgtaatacataaatttaattgaatataaaaaaaacagaggcagagaactgccgatagagaaaaaagttaagttgatcatgcttgtttaatattatatataaaaactgatcatattcttgttaaattaacaagaatttagtccattgcacatatttttgagaaaactttaaacttcactatatttgtgtgtgtatatatataagatttttcgataaatttatatatatttcattgtaattgtatatttctaaaaaatatcccttctaattatatttattgtaagactttgtgttgagaaaaaaaaggcttcataattatttttgcccaataaaaataggcttcataattattctgtacgatctttaattatttatctctgattaaatattatttaacaggctgggctatcaatacacaaattaagacgacataaaaattgtaattccacacaacttatttatttttggacttaaaaaaaatgtttgtttaatcaaagattgatacttattactggaatctctttgttgttatatttaagaaatttggggaaggattagttatttgtgggatggagatttaaagcaacattttgcgatataagaatatatgcatttattatttttgtctattttaatttctcatttttgttcatttctattttagttaacatgctttcaaatttaaaacgtgtcaagtctttgttgatagtggattcccttttgattttatttagctttttttttggacaaaattttatttagcttagattcaacaaaatcatcatgatcttaaaagtgtgggaattgagtagtatacttcaaatttgtttggtcatcttttaggtacctcaaattgtcgctaggccattcgttttttaatacaaatgaccactataaagataaaataaccaacaaaatgtatatagcacatacatgacatagataatactcagaggtgtttatgatcttacgtaaatcgtctaaattcacgtcgatggataacgatgatcaatagtataaaactaactaaatcgaatctaaagtaataaattaatcttaacataaaggaagtaatagatacaaagataggcagggggatattgatgataattaaagtgcacagtactttagcaaaatagaatagatctttaagaagaatcttagaaatccagatggagctcttcaagtggttcatcttatgccacttactattatatatgttgttatatgcatagactgagacaaacaaatcataccagtcaaatttcattttagaagatatatgttattaatttcttcgagtacaaatatctttattagttttctatatgaatgtcggttttagacttctagttagatttgatcttctttgatcctaccacgtttccacacaaattgggtttcagtgtttcactctacaaagtgcaatatataagatttgagatccacattttctgaaatgctcactacataaattgactacagcctatctcgaaaaatatataaacctttacgtgaattttgttttgcagacttatattagaaatttaattattgttgtaattattctagctagtctaaaatttctaaaaatataacgttttatcaaatcgattttcaaatttaatatggtctggtctatagattctatgatcttcaaatcaacgtgatgaaaaagtcaagtgtaatttacgatttttgttgcataccgttggaatcatgaccccaaatattaagaagataaaacatgatgggaaggtaccaaacaaattttaaggcctaatatatccttacaagtatttaaaatacgaacaaattgcgatcaatgtttaagtaaaaaaatcaatactgataaaaaggaggcgactagaaacaagagtttccttgataactaatcagatggctttgttcaatggctgcttaatattggggtaaaagaagcttagtgacttattcaaatattgctaaacaccaatacaattaatattctagtcaataacaagatcccatagatatttgtaatatttttttccagcaatttgtatatttgtaatatttacttgtaacgataggattcattttttcttatggacggaagacaatattttggtgatggactgatggtgcatgtatttttttagctagtttaacaaaatacccacacaaaaaaagatgatcggtagcattgaattataaaatcggatataaagatccataagtcagctgaaattaaaattttaatttcagaattaatgcaacaacttttggctaaactaaacaatatatacgtgatgctacacaaattttataaactaaaacgacaatatttaacccaaacatagacaaaatatatgaattgtacgtaagaacttgttttgaatcaaaatatattcaaaaatttgttcactaaatagaagagaaggggaatgggtttgcaactaggagtattatttgaacttaatcgtgttttctaccatctatctgagcaacacattccattattgttcatcatttcatcaacacgtcatattggtaacttgaggaagctgtttgaccaatgaaaaccttgttatttgggggatacttgttttctccatcgctaatgatttgttgattgttcaatggctgcttaatgtcggtaaaataagagaggcttaggtatgctaaacattttcaggtcaataaaataagattccatatatctttgcagggatctgtacgtatatatatatttataagatacgtgaacccttaaatctttagataatgctttttatttatgatggaagataagaattaggtgcgttaaattaataattggagtagtatacatactttagcaggtataaattattgattttgaatcaacttggaatctttgtaacgttttcccctttttcgttgtttagtactcatatctaacgtttgatatcgtgaaaataaaaaaaacgtttgatatcattaactatcaaattttattgtattttgttctggaaacttaaattgaagccattaaaagtggaggccccatcagtctcccaaattcaactgtcctcatgaccccaaaaatcaacgttcaaaattgatccacgcacttcgcaaacattgttgtgtgtaactcttgtttttctttaactcgagattagatagtaataaccctgtaagaaatctacttttttttatatatcttatctaaaaggctgaaaaccacaaatttacattcaaagatattgaccaaaataatacacatccattaactaccccaaattagcgtataaatctgacatgtaaagaacatacattaatgacgacctaaaatctgctttagttaatttgacctgcaaaaccgtgttagtgctgaaaattaaagacaaatagtatcttagtttagcaaatatttatgctatgtaaggaatattttttattacaatctttatagtaacacaaatcccctaaaaacaaatagtatacctcaactataaataaatttccagtaaacaagttttataaatgttgaatttgacccatatagataataatcaaaagaatcttttttttttgttttattttgttgatttgaccaacacaattatgttaatgatgatatatagaaacaaatatgttagtttaggaaaaatatatttaaatgtgctatacaaggaatgattttattagaataacataaaatccaatgtttttaatttaattattaataatataaatcatgtatagtcaatactatagtatcccctaaccataaagaaattgccagtgaacaacaatttttgacttcttttttgtaatcacaagtgtggtggatactcagaacttttgtcgtcgttttctcttgactaatccaagtcacactaaacgattcatctgagttaagtttttatttattatgattttcatcacaatcttatgagttctgttttctttttgaattatagtagttttttgttatatatctcaatgattcatccctcttcaatcttcatcatattcttcttcttcttcttcatatgccatgctctacagaaaatatgatttctttagatttcatctttttttacttgtttttattttagtcacttgaatgtgagggagaaaaaaaaaaaaaaaaagacaagatgtgaaacgacgcatttacccttaggaagccaaacatcgaaaatagaaaccgcttttttctttattttttttcttaaagtcaatcagtaaaacaaaaactgccattacccataataccaactacactttcacagccaagtgtctataaatacagagcataattacaccatctttccttacaacacaatctcacaacaattacacactaaacaaaattcaattttgcatctccatttctcgagaaactttcgttttcgtagacttataaaaccatgggtcatggcactaacagagtagaagacatggcgtcaccaaacaatggaaccgcaggagaaacggtcgtggagatacacagcgtttgtctaccgccgaagaaaacagcgtttcagaaactgaaaaaacgcgttggggacgtgttcttccctgatgatccgttacagaggtttaggaaccaaacatggagaaacagagtgattctaggtcttcaaagcttgttcccgatattcacatggggttctcagtacgatctcaagcttcttaggtccgatgttatctctggtctcaccattgccagtctcgccattcctcaggttactatttgacaaaactcactcttttacttttacattgggtttttatgaccaaaaggaaagttttatggaacgtttcgaaattttgaaaaagttttaatccgtgaaatcattttgtttttttatgttgaaagaataataaaaggcgtaattatattgaagaggttttgtcatttttacatcttgagttgtgtggggatgctagttggacttggagaagttaaagcaaaaaataaatatactttttgtgtttgttttggattatcaatgtcattcaatgttttcaataaatgtaaatggaatacagtatagttttaattcgatgatttcatagtgggttcacttagaattatccacacaaaatatggttcttttaaatgtttatgtctttacatatttgtttttgttaattttgaaactttattttgcagggaatcagctatgcaaagctagcaaacttaccacctatagttggtctttgtaagtattcaacacctaattttggactaatcagtctaatttactaaaatcaagtctaaattaatcaattttggtggttgcatgcagattcaagctttgtgccaccactgatatatgcagttcttgggagttcaagacatcttgcagttggtcctgtctcaatagcatcacttgtgatgggctcaatgctaagtgaaagtgtttcaccaacacaagattcaattctatatctcaaattggctttcacttcaactttctttgctggtgtcttccaagcctcccttggccttcttaggtactaatcagaaaactcaaatcaatcttaggaatctgcaatcgtcatgtgaaagaatttgtaaactctcttattgtagtttaagtattcttattagtgtagaatatattcaatgtttgcttaagcctcttttgttgatcttatcactgaacactaaagggtaattagtcatgatgaatagagagattaatatataaaaagaaccaagattctaaatatagttttgatttgatggtgacatgtactaatatctacacctcccaagatgcttcctagttagtgctttcactgttttattttttttcatggtcagcaactcataatttatgtattaataaatataattaaatttttaatttcaggctaggatttatgattgactttttgtcaaaggcaactttgattggtttcactgctggtgctgcagttatcgtgtcacttcaacaacttaagggtcttcttggaattgttcatttcactggcaaaatgcaaattgttcctgtcatgtcttctgttttcaaccatagatctgaagtaagtcaacatcattagttaattataatgaaaactttaaagattttatctcaataatgttactactacaatttcagtggtcttgggaaactattgtcatggggattggcttcttgagcattctcttaaccacaagacacattgtaagtgtacttagaaaaacttccaagcatttacaaaaagcgattaaccgcaatccaatatttaacgtttcgtattgtttttgcgaatatgtagagcatgaggaagccaaaactgttctggatatctgctgcatcacctttggcatcggttattatatcaactctgcttgtatacctcattagatccaagactcatgccatctctttcgtaagtacattttcttaaccagtctgacttatgttatggttacaactgagactcatagacattgaatctttaatgcagattggacatctaccaaagggtttgaatccaccttcattaaacatgttgtacttcagtggtgctcatcttgctcttgccatcaaaaccggtatcatcaccgggattctttctcttacagtaagctctccaaaatctcaagcttctttgtaaaatatttcagtgttaataagtgactaaagttttggacttgactttgatttttcaggaagggattgctgtagggagaacctttgcatctctaaagaactatcaagttaatggaaacaaagaaatgatggctataggttttatgaacatggctggttcttgcacctcttgctatgttacaacaggttaaaaattctacttgaaacaaatctccttctccttgtggcttacggaacaatgttttgactccaatctattgttttcttcagggtctttctctcgatctgcggtaaactataatgctggagcgaaaacagcggtttctaacattgtgatggcctctgcagttctagtgacccttctgtttttgatgccactcttctattacactcctaatgtgatcctagctgctatcatcttaaccgcggtgataggcctcattgattatcaagcggcttacaagctttggaaagttgacaaattcgatttcttcacttgcttgtgttccttctttggcgttctctttgtttctgtacctcttggcctagcaatagcagtgagtatacaactatacctaaatgttctggtttccaaatattcaggatgttttcttagtttgataacttgttgcaggtggcagtttcagttatcaagatcttgttgcacgtaaccaggccaaacacttcagaatttgggaatatcccagggactcagatttatcagagtcttggaagatacagagaagcttcaagaatcccaggcttcctaatccttgctattgaatctcctatatatttcgccaatagcacttatcttcaagacaggtcagtcttcttacttcacttatctcttcttgatatggtctcttttctttttcagttttacttatgggaatgagtttatggttctgtaggattttgagatgggccagggaagaggaaaatcggataaaggagaacaatggtactaccttgaaatgcataattcttgacatgacaggtgactttgtctctctgaggtctgagctattttcaagagttttcaattcgtccctttgctcatactttctttctgtggaatcagctgtgtctgcgatagacacaagcgggcttgaagcggtgtttgaacttaggaggagactcgagaagcaatctcttcaggttataatttttactgaaaacaaagatcaatatacctatcaaaaagaaaaacaaactaacttttgtcaaactctcttgtcaaatagcttgtgctggtgaatcctgtggggactgtgatggaaaagctacacaagtccaagatcattgaggcattgggtctgagtggactttatctaacagttggtgaagctgtggctgatctctcatcaacatggaaagctaatggccagccttgaaacaaagcagtctctaatctaatagagagactgtttctgaagatggagcagcctcttgtgaaacatttttggtgctagctgaaaactccttgagggagtttctgttttaattgtagaataaatgtaatttcatcttttaacaattcggtatgtatacataatttggatataaatagcctatgcaaagcatttatcttctcattttatactttctataatcactgttgggattatctcaatgatgaaactctagaaccattttgcctcttgtcaaaatttacacaaaggtttaatattggctacaaataatctgcgttatatgattagagaagcaagctctggtcattatcaccttctctcttcaagaactggtactgctctttctcctcctgacaactttcttcacagtaaccgtgttgtcgctcttctctttgttgtctgtactattcacagcttttacagaatccggttggctcctcatgcgcagtatctcgccctttgcagagcccaagtcctcctcgagcttcttcactttcttctctagcacttccctttcttttcctagactcatcacgaggatatgtgcatcttccacattttccttagcttcttttgatgcattctttgcctctcctagtgatcgttgaagtacttctttctcgtcctccaagtttgaagcatgggtattcaccttctcaagctctcgtgacagtattgatgtgttcttgttcatctcatctaaagactttacagcttcttcgagatctgtttcaagggattttctcgcctccctttccatcaagatctgcttttccattcctttcacctctttgttcaacgacaaaacagtctttttctcctcttccaattccttgttactggtttcaactttcttgtaaatctccacaagttccttctggaggctctggttcttgacagaagactctttgagttcatgagttactccctcaagctcgtctttaactctcctccgaagatctttctccagtgcaagttcgctagcagaaatctcattcttttgtttttcagcatcgaggttcctttcatatctttccttagcttccttccattcttcgtgaactatagcaagctctgattctaactttgaacacaaagctcttgactcatcaagcatcgtttccaggtcagagacccgatctctagatgcctgcagtgttttctttgttccttcaagttcatgtctcaaattttttactgtagtcagttctatatccagcattctcttcgagtcttcgtacttctcagttaagtcagcaactttgtctttacttttattaacatcatctagcgcacgatccagattttcatttagctgctgaatctcctgctctttcctgctgatgagctctgcatctgcagctgcttgcgtctcagaagtcaatttcaaagcactataatcttttgaaatactatcaagcttctggatataactctctttctcagccactaaagttgttattcttgtgtttaactcctcaatcgcagagttcttcgagtccaattcactctgagttcttatgagttcttccttctgctgtttgatctctaacttcgcttcagcaagatctcggctagtttgagtgtaaatagagttgagttccttcaattctgcttccttttttgccaacgatgcattaaaacgttgagctttttcttcactatctttcagctccaaactaagcaagttgatccgatcttgtagtccttcaaccaaatcaagcttttctctgagctttgtttctagtgcctctttgtcttcgccagcctttgacagactattttccagactttcgatttgatctttaagcttctcacataatttcttctcgctacttagctcccggcctaattctgtcaccaagtcctttgcagaattcaactggttgatcaatgacaactgttcctcttttgccttttctacttcctttttccgctcttcctgctcatgctgcagttttgcctcgaaatctttctccttcaaaaccaatgctctttctctgtctttcaactggttctttagctgtatgccacggttatcggtagcttaagtcaaaaaggatcaaatccagcactagcaatatattcacaacctcagaaagttaaagaaacaaaagaagagaagctcgaactaaatgatataagctgctaagacaagaacattcacccacaaattgtaaagcaaaatctttaagtgctagtagcttacagattcgatggtttcctcagcagcttttgtatcttgccgagccagtgcataaagtgcaccaagaacgccagcactaaaaattccaagaccattcaggagagccagaaatggatttggggatgttccttcactaactactgcaacctaatccaccaaaccaatcctgattcagtaaaatctcaagcactactttaaacacattgattctcaattaaaaaaaaatcaaattgagaaggtctaagagagtcttacaacctcagtttctagatcaaccttcgatgtctttatctcattgcctcctggaattaaaaagcagaactggtcacaacaatgaaagaaagataaccaaaagcaacatttgaacaaatctcatctaagcaataaaaaaactcactttcatcagccaaagcgggtgatcgaagctgcaaaaagggaagaacagagatacccacaagaaggaaagccctccttttggcggaagcaacgtcatactcgtacccatcttcctggtttaaagaagccaatgttggtcgtcggcgcttgaacttggcgacattactcgaacacagaagcccaaactgagacgaagaaggagaagaagaagaagaagaagaaggagatgaaaggaatcgagagtgtagaggaacagaagggacgaagcaagagccccctatcaggaaacccatcttcgccgccaactacttaagagattggaaatgtgtggcaaatgaagcaatcctaaaatcactgacacaaagcagaccccaaaacccaaaaaaggaacttcctttgtgtactgacttgtgacctcggaaaatctcaaagaagaatgcttacacaaatctcagagttatatccttcgattactgaagaaaatatctacaaatcctacgaaattgggtatcaaagactgaaacttttttttgtttaggagggcaatggcatatctgcaattttggaatagttcggtgctttgtgtacataacttaccaatcaaaactcgccagcttagacttcccctgcttcgttatcctcaatctctgggttcgcctggtttaagaaaacacgtgaacctcacgtgcgtctgtctgaccctaaaatttctctctgtttttctcagccgttctgtctaaaaccaccgacggcgacttcaaatagacgtcggaatttgtcgccaccggagaattgttacatgtgaatcccgttttataaagatgatgtatgtatctgctcgatccggttctgcgaagcgaagcatctcaagtctacctcatctctctcagagatttaaacaaacaggtaatctgcactatttgtttcctctccctcttcgtcgataagcgaaatgtcttgattgtttagggttttaggagtaatgggatttgcaaaaaaggtttaaagtcgattcctttgaagtaagaaaacgagaaaaggttttgatttgaacattttgttttatccatgaatttgcagagaatgagattgttcaaatgtttagtgttccgaatcatgaggaatctgagaagcctcaagagaagtggaaattatctagaaaggatccgtcagtgcggatgttggatgagagattcattaggatagtgaaaatcttcaaatggggacctgatgctgagaaagctcttgaggtgcttaaactgaaagttgatcatcgattagttcgttcgattcttgagatagacgttgagataaatgtcaagattcagtttttcaaatgggctggtaaaagaagaaactttcagcatgattgctccacttacatgaccttaatacgctgccttgaagaagctaggctttatggtgaaatgtatagaacgatacaagaagtggtccgtaacacatatgttagcgttagtccagcagtactctctgagcttgtgaaagcattggggcgagctaagatggttagtaaagctttatcggttttttatcaggcaaaaggacgcaagtgtaaacccacttcgagcacttacaactcggtgattctaatgttgatgcaagaaggacagcacgagaaagtccatgaggtttatactgagatgtgtaacgaaggtgactgttttccagacacgattacttactctgcgcttatatcctcgtatgaaaaactaggtcgtaatgattctgcgataaggttgtttgatgaaatgaaggataactgtatgcagcctacagagaaaatatacaccacgttgttgggaatttactttaaggtgggtaaagttgagaaagctttagatcttttcgaggagatgaaacgagcaggttgttcaccaacagtttatacgtacacggaactgataaagggacttggcaaagctgggagggtagatgaagcatatggcttctataaagacatgcttagagatggattgactcctgatgttgtgttcttaaacaatctgatgaacattttaggcaaagtgggtcgagtggaggagttgacaaatgtcttcagtgagatgggaatgtggagatgtacacccactgttgtctcatacaataccgtgattaaagctctgtttgagtcaaaagcacatgtttcggaagtaagctcttggtttgataagatgaaagcagacagtgtttcccctagtgaattcacttactcaatccttatagatggttattgtaaaacgaatagagtagagaaagctctgttgctgcttgaggagatggatgagaaaggttttccaccttgtcctgcagcgtattgcagcctcataaacgctcttggaaaggcgaaaagatatgaagcagcgaatgagctatttaaggaactaaaagaaaacttcggcaatgtaagttctcgagtatacgctgtgatgatcaaacattttgggaaatgcgggaagctcagcgaagctgtagatctcttcaatgagatgaagaaccaaggaagtggtcccgatgtttatgcctacaacgccctcatgtcaggaatggtaaaggctggtatgatcaacgaagctaattccttgcttagaaagatggaagaaaacggttgcagggccgatataaactcgcataatatcatcctcaatggatttgctagaacaggtgtgccgagacgggctatagaaatgtttgaaactataaagcattctggtattaagcctgatggtgtcacttataatactcttcttggatgctttgcacatgctggaatgtttgaggaggctgcaagaatgatgagagagatgaaagataaaggctttgagtatgatgccatcacttactcatctatacttgacgctgttggcaatgtggatcatgaaaaagatgatgtttcatctttctaagatttgatttatctaatatgaataacaaaaagaaaaaaaagtagaagctgaaaaattactacactgttccatttcttacacacatagtatagtgctagttgaaatgtataaacacttgaatctaaaattgagtacaagaaagaagctcaactataattaagtttgaaaactttagaagacacaacaaatctagcagaaaaagacttagaagacacatcaggatcttcatgatatgcgatagttccatcattctcgaagtttagggaataagtgaaaggatcataacgaacacgatgatcaaaaatcttatttatcttcttttgattcatcatcaatatcttcctccatatcaatctccattttgagatcttcttcaatctcaaaacatcttcagatagatctttgatccgatcgtaactacaagacttggaacaacacattaggtgtttcttgtcgatacctgaactgcatagcaccattagagcagatgaaaatacactttggacaacagaattataaatttaaggatactgattttttgggtgatatgttgtggcttgtattgaatagtggttacgatctttatgataggatgtgaagaatgatttgtttaattgcatataaaagtttaagtatcattcttgttacaacttgcttatcctgcaatgtgatgcatatattttaattacccgtatatcatattattagtagatattttctcttataaagcaatttaaaactagaaatcatttgagatatacaattaatggctatccattgaatttaggggcaatgtgtatgttggcatataaaaaatattgccgttttgtttatacgttacacaaattgttttaattggccagtgagtagattgtctatatcatatgacatataatctactgtaacacagcaatatattaaatgggatgattaaacactgaacaggtaagatcaatacataaagaaaaatttagcagattggatctacaaaccaaattcgcatctgatttgttaagaaacaaatgataatctactgtaattgtttatagtaatcttaatatatgtgattcaataagtgagttttaataatattttttaaaacatcttgcaacatggagaatatttgaacattgaaattttcgtgatttcatgctgtttttttttgaccttttagatataaacatacaaaaataatcaaatctcatatatactcatatagttttggaatgccagtacgggttgacatttggaccctgaatggatgctgatttttgattcagtttttgagtttagattttagtttatagattttagattttagttttaaatttttgttattatatatttttgtttaaaaaatcccaaaaatttgttttttggtttttgagaaaaataacgctgattaataagtaaaaagtagattttctaaattttaacaaaagtaaaaaactaaaatcatgaatgaaaaactacaataaaatagttttactaaattgtaggaaaaccaaaatttttactaaattgtagaaaaaccaaaattttaaaatcttaattattatgaaaataaatttttaaaaaacaaaaaccaaaaactcaaacaaaatctacaaaacattcgaggccttggtttctaaaaaacattttgtaatgaaaatcaccaaacaagtcatcatagcccatatttagagcctggctaggttttgactgtgatgctcattattggcccatcatcacattggttttcactaattccatcgccgatgaagttgtgatctttcccgatcaccggatatctgtaaaagttgctgaggtaaaaggaaagtttttttgaaggtcgcatagtatccatttagaggatcggcgatagtaaaagacagtaaccaaaacccttaatatctattacatcgattcgcgttgaaaagcaatgacgaagctatctgatcttcccggagatttgctggaggagattctttctagggttccggtgacatcatcgagagcattgcgatctacttgcagaaagtggaacactttatctaaaaatgagagctttactaagaatcgcattactcaagtatattcatcagcagttagaagagaagggtgatcttcaggcgattgtcttgttaaagtatagtctttattcgatgagcgtcaatatccatggacttcataacgactttgctccatctataacgtctagaggtaatcgattttacggcagagagaattggaccgcgtctgcctctgccttttgagtcttaattgtgaagatactgtgactctatctagtgttagagaagagcagcttgaggtgttgtttcagaactgtcatactcttgagatggagatttgggttacgaccaacattgagcccaatgcaatgtcctggagcaagttcttatagttgtttttgatgaagacaaaaatgtatcaaaaaccaatcgcaacacagcttacttcattggtgtgaatggtaacttcagagaagtggatctcggagaaattacaacagtcagagtgatttttccgcatgccttctgttatgttccaagttctatgcttacttgttttcctaatcggttccaggactcatctcctttggcaccagctatgcttgaagagtttccggtgagatatacagttttctcgattcttttctattcagttatgttacaaactaaagtctgattcttgtattctttcctaccattaaaccaataaaattgtctccttaccaataattggttattattttgtgctcccacagtgttttcctattcgatcaatacaagagcgtttggattattggtttggcttttatttctttctacaaaatgattctgatttaattatattaatatctggggatttatgaatctggtggaagactttttgtctacatgaaaaagaaaaaaaacaaatctgtttctcctcctttgttgggagcaatttgctttctgtttcttaggtaagtcccttttaaatcctacttgggtgttatattctcccaacagaaataagttgttcgataaaaataaaaaccaagttgctgcagtgcaatggttttgctcgagaacatggcgtctggttctgttatgtgtcttgttttgggtaattttggcatgaaagagtcaactttcagtttgtggtcattgtcagcatcactttcttggtaaatttttgtgtaacagctgtagctcggaaacttcaacggacaagacttcaaatttgtcccccagcgttgttgacttggacttctgagttagacttgaccataacgagatatgtcttcttgaaaaacacttttgagaggtatataattccaaattatcatcttccaagtttcagaaaatctgaaattatgtggtcaaattgcatctttctcactctttttactttttatctcttcttaggacaatcatgctgtcaaacagataccctactgcagggtcagtacttgaaagatgggcaagagctcgtttcagctttcaatatcttcaaactcaagtttttcaacttcgagaattcaagcaactggtatcttggaatttggtacaacaatttttatcttagtggtggtaataagaagtatggtgatatcaaggacaaagctgtttggattgctaaccgtaacaatccagttttgggacgctctggaagcctcacagtggactctcttggccgattgaggattttaagaggagcatcaagcctgcttgagctaagctctacggaaaccacaggaaacacaacccttaagctgttggattctggaaatcttcagctccaagagatggattctgatggatcgatgaagcggacgttgtggcaaagttttgattatccaacagatactcttcttccggggatgaaactgggtttcaatgtcaagaccggaaagagatgggaactgacatcatggctaggtgatactttacccgcttctggatcttttgtctttgggatggatgataatattacaaaccggttgaccatcttgtggcttggtaacgtgtattgggcaagtgggctctggtttaagggtggcttttcgttggagaaattaaacacgaacggtttcatcttctccttcgtttcaaccgaaagtgaacattattttatgtattcaggtgatgagaactatggtggaccattatttcctaggataaggatagaccaacaaggcagtttgcagaaaattaaccttgatggagtgaaaaagcatgtccattgttctccttctgtgtttggtgaagagcttgaatatggttgttaccaacaaaatttcaggaattgtgtgcccgcacgttacaaagaggtaaccgggagttgggattgttcgccgtttgggtttggttacacttacaccaggaagacatacgatttgagttattgctcgcgctttggttatactttcagagagactgtatccccttccgcagaaaatggatttgtattcaatgagattggtagaagattaagctcatatgattgctatgttaagtgtctccaaaattgttcttgtgttgcctatgcttcaaccaatggggatggtacgggctgcgagatctggaatacagatcctaccaacgaaaattcagcttctcatcatcccagaactatatatattcgtattaaaggttcaaaactcgtgaaaatatattatctgcctttttattattaagtgttcccatactgcagcatttctatttgaatactaagttttctgaaatacaggagttgtggtagaccaagggaacgaaaaggcggcaacttggttagttgttgtggcatcactatttctaataatacctgtgacttggttgatcatctatcttgttttgaggaaatttaaaataaagggtacaaattttgtatcagaatcactcaaaatgatttcttctcaatcatgttctcttactaacaagttcaccaccttctttttgcgtatttgatccagtaactgttatatttcgcggaattttctactttttatggggaaaagtcattccacagagtaaggctcagctgaataacttttgtttagttatgtatggaaaatgtccatgttggatcaggaactgtgtttgtgatgtttggtattttatttagtgattggttacatacggaggaggctttcaacactgagagttggttcaacaatagaccaagaaatgctactacttgagttggggattgaaaggagacgccgaggcaagagaagtgcaaggaataataataatgagcttcagatctttagctttgaaagtgtcgcttttgcaacagattacttctctgatgcaaacaagctcggtgaaggaggttttggtcctgtatataaggtagttcagattcttcagattttgatattaacttaagcagactttgatgtatccgctactctcttgaaggggaggctaatagatggggaggaagtggctatcaaaaggctatcattagcatccgggcaaggattagtggagttcaagaacgaagctatgcttattgcaaaacttcaacacacaaatcttgtcaagttgctaggatgctgcgtcgagaaggatgagaaaatgttgatttacgaatacatgcccaacaagagccttgactacttcctctttggtgagccttcattaaaaggctaagaatctatataacccatctgaaaaatgtctcaactctgtgtagatcccttgaggaaaattgttctggattggaagctgcggtttaggatcatggaagggataattcaagggcttttgtaccttcataagtactcgagattgaaagtaatacacagagacatcaaagccggcaacattttgctggacgaggatatgaaccccaaaatatctgattttggaatggctcggatatttggagcccaagaatccaaagccaacacgaaaagagttgctggcacattgtaagtgaagagtgactagaaacaaggagaagattctctgatcattttatagactttcttgtgttgatattatttgtagtggctatatgtctccagagtacttcagagagggattattctcggcgaaatcagatgtgttcagcttcggggttctaatgctcgaaatcatttgtggaaggaaaaacaatagcttccaccatgactcagaaggacctctgaatctcatagtccatgtaatgctctcatatgttaatattctcagcttgccttcttttgtccatgcatctctgaaactctgtttttttcaggtgtggaatctgtttaaagagaaccgagttcgcgaggtgattgatccatctttgggagattctgcagttgagaaccctcaagtgttgagatgcgttcaagttgctctgttgtgtgtacaacaaaacgcagacgatagaccaagtatgttagacgttgtgtccatgatatacggtgatggaaacaacgctctttctttgcctaaagagccagctttctatgatggtcccccgagaagctcgccggagatggaagttgagccaccggagatggaaaatgtatcggcaaatagagttacaatcacagtgatggaagcaagatgagctactgaatttgaagaaaactgattgataatggaataatgatgactgatcgtatgtgaatctcattgtttactataaacgttttacttctagttggataatggcattatgatgactgatcgtataagattcaaagtatcgttttctcgttctgtcactcgcttatgaatttgaatacaaaattagacatttcacgtggacatgattctgtggcgcggagtgatcgcgcgaattcacgcctactactatatatatatatatatatgatcacgcagaacagaatcaaatatctgaaactcgaagaaacagaggttcctcttgtgtttttgttttgggattaaggaagctatttctgttctcttcgagtttcaggtctagccctaaccctaaaattcagccatgtcttccaagcaaggttattattttccttctcctctcatctctgttatcttggttcgaatcaatcgttttgatctgtctatatcttgctttcacatttttgtgtttacatgtgcttgctattttatatgatctcatgaattcatcgatcgatcagctgatttattaatcttgtgtgctcttaacgcatcgaaaattcatcaaccttgtcatttgaatttatatggttccttatggaatccaacattttctgcaaaatgaaatatgatttcaggagggaaattgaagcctttgaagcagcccaagtctggtaagaaggagtacgatgaggtatgatagcaattgtacccttgcctttttctttagctcaacgttttaatggttttactctgtttcaaatgtagcacgatatggagttaatgcagaaaaagaaggatgaagagaaggttagttttctcaatcttagttttgattcattgaaggagaaggtgattgctgttgatgatcttgtttatgtgatgaaaacaggcacttaaagaactcagggccaaggcttcacaaaaaggatcattcggaggctcaggacttaagaaaagtgggaagaaataagactaaatctgcctcaatgtaatcctatatcaccttatatatgtttgtcaatgtaccatgactagtttataagttataaccattaaaatcatgttgcgatgttgtagaagtaaatataaatctaagacttgtacctccttcaaaaattctgcaacttttcattgaggttttagttgttgcaagtttcgattaaaccaaacggatcatatgcaccagcattaacaaaaaacaaccgatattttgagactcaaaaccaaaaaagattacgactttagaagtcccaaaaagtttgcagcttcgaaccttttcatcaaacactgccttggccaaagtcttgaatcctgtcaccacgaacatttaagctctccattgcattctccaatccagaactcatctcagccaacacatgaggatcattgtaatgttgaacagcttgaacaatgctcctaagtttcttaaacggatcaggaccatcaaaaacctcagaacccacaaaaaccccatcacaacctagctgcatcatcaaagctgcatcagcaggagtcgtgatcccacctgatgcaaactgaacaaccggaaccctacccatctgcttagtctgagccacaagatcatacggtgctgaaatcttcttagcaaacgtgaacacctcatcatcatccatgttgttcaagactctaacttcacccatcaatgacctaacgttcttcacagtctctgcaatgttacctgttgcggttaaatctccttggatcctaatcatagcagcaccttctctgattctcctcaaagcttctcctgtatcacggcaaccacaaatgaacggagatcggaaattatgtttgttgatgaaatgatcatcatccgcaacagagataatctcgctctcgtcaatgtaatcaaccgcaagagattccaagatctgagcctcaacaaaatgaccaacgcgagctcgtgccatcacaggtacagacacagctcgttttacctctttgatgagaaccggatccggcatacgacgaacaccgccgcgagatcgaaccggatctgagacgattacagaacatgcgccggcggattcagcgagcttagcttggttaaccgaggaaacttcaacaatggcgccgccacgaagtacctgagctaatccgaccttaacagagaacggatggtttttcttcgcgtcggtaatggctgtgccgctgtagagagtaacagctccttgatcttgatccgtcatagcttgatccgccatttttaggttctgtgagtttttagtaacagagagcttttcgccggagaaacggtgtttgttagtaacacgatctgagacgagaacgagaaagctgcgttgaaggtgaggagaaatatagagagaacggagaagacgaagaagagtgtggtttggtctagaaacttctgagactgttcgtcactgagaaatggttagggtggaatcgcaaaacggcgtcgtatgcagaaaaaggaaactaagtgggcttccatgatgatgattgatgacccaagtagacggactttttctttatttttgtaagagccgttggatgtgaatagaacacgtggcgtaatcgtgtgtaattctcgtccaaagtattttgaaatgattgttttgatggacacgagtcaaagaagaaaacaaagcatgaaatatttacgaaataaagggagtggtacatctaacaactgtcttacttagtggcccaccatgttataaattgtcacgacactagacgacgtcgtttgtagtgctcctcacgtgtttcaggttgttggttctatacatttttacagttttgaagcaattaaataattgagtacgtaaatcttactcttcccaactgtcactaccactgaggatgtttaatcatataaagttctgaatcttgtatgatttgatattatattagatgagacaaaatcagtcggcaaaataaaaagatggaagaaaaaagttcttttttaaaccgtcatcaccgattcaccatatatggatgatggtaaaaatgactacaacggttttggattgtttggcagcttgggaaacaaaaagattgtaggaggatgtagtttactttcatctcttacgtaatgtgagtacgcgggcatgatccagagatttatacggtgcagttggttttatgacatatggtaaagaaaatttgtttaacatcaaaaaatgtggtgatcgtttactgatttgtcttctatcaaatcaggaagcaaggtctatgaagaagggctacgaaagtggtgaatacacacaacgtcaagcaactacggcaaaggatcgaagcattgtctaagagatttaattacgaaacttcaaactcaaagtaacacgtagttgtaaaaacgttttttttggattggtaaaattttacattcattttttttaaaatgtggtgatgttttgcatgtgggtgtagatttgaaaataccaacgatttgttgttgagttttagacacgagtaaataaatggtgggaaatcgattaaacacacatatgaagcgatgtatgaaaacgacatgcgaattttatataaacaaatatcagctcatattgacccatgcgatcccaaaatgaatggagaatgacgacgtctgatctgaccatatcatatgtatggaaaagaccatttatgttcaagcttcgaaataaacttgatgatatgatcttctctatgttttgatttggagttgttcgattgctcattgagagagataattaataaatatggtgacactttctctcttattcgtcttagtcatatcatatattcatatctcatgttgatttgttattttgctatccagggagaccacaacgaataacactcacaaacgacaaagggcgcgacacatttgcttttgcaaaattcaaacttgaaagctagaaaattaataatatatagtcctgctctataatagaatactataaaatagtaaaacaaagccactgaattcagacaatccaaattttaatgctatcatgatcactctaaaaaacaacttttacttatacaagcgtgagaataatttggtcaaaaaagttaccattacttttgaattcaaaaacgttaattatcgaggtttagctaatataacttaatttttagtgatattatcagatatagttgacgtatgtaaatttaacattgtagaagttcatattagtaaatgtaatccgtatgattttctaatgaatttaattgaattttagaaaaaaggtccaaactatttggataaatcgactacatggtattgatatgacaaaaaatctcatactaacaaaaatacataaattagtagtaaaataactctgtatagtaattagtaactataactatcatgtaatccaaaaaatcccataaaataaaataaaataaaataaaagcattaagtagaaaaggtccacaaatctgtgattaataattagaggaattaaaacgacatatagaaatcgagtttaagggagcgtcagagaacgaacagcgaccaattactctctctactctctgcgctttaatttgaacttgtggagagagaaaagggttagatacagagagatagcgaaagagaagaagaagaagaggtctatcgacagagcaaacttcgtcaagagatccgttaaaaggatccatttggagctccgattcgagctagagtcaataatgagcggaagacagagatctgttgcagcggcggtgcatcaccagaggcagctctccgataaccctctcgatatgtcttcatccaatggcagatggcttcaatccactggtcttcagcattttcagtcatccgccaatgtaatctcagaatctgatccttttcatcgattcaaaattttgaatttctctgtgaagatctgttagttcaggggatagataaagttctccggtgggacttatttatctccgatctgaagttgtgggcaaatttgtttttgagtatatatgcattttctcgatgagacttgtgaacccaagttttttgaaatttaatgaacaggattatggatactatgctggtgggcaaggaggtggtggtcaagcagcaagaggataccagaatgctcagagaggaaacgagttctttggggaaccaactactcctcaatacggtgctcgtcctaccaaccaaaggaagaacaatgatgaatctgagtttagtcctgggctcttagatctgcattcttttgatactgagcttcttcctgaggtaattggtgttctcgttcatttctactaattagtgtgccttattaaacttatttagtgccttttctaattgccatttacatatgtgagtatgcgattcaaagttttaccttttgtttaaatgtcgctgcacttaggtaggcattcattaaattgattgcttcttggaagagtggacttgttacacagcactttttaggtcattggactatttttagtaaaagaaccttttttcttcttttttcctgtgaccatattatgagtatttttcctctaaccaatttggcaaacataagatacaacttagaacagagctgttttttttattctctgttgaacataagataaattcgtgaagttcattgtgtaggcctttaacttgttatcttttcagcagattccagtctctaaccaattggatggtccctcacttttcaatcctagtcaaggtcaaagctttgatgactttgaagcttacaacaagcagcctaaccgtagtcgcgtgttggctgaaaacttggctgctgagaaggagaggatgaatgctgttgcaaagattaaagtcgttgtatgtttttctttcctttagtccctataactaaccacttgagtttttctacttgaattaagtggttttccagccttgtatattgtgaatactaatccttaccgtatggtttgagaacaggtgcgtaagcgaccacttaacaaaaaggagtcgacaaaaaacgaggaagatattgttgacacccatgccaattgcttaacagttcatgaaactaaacttaaggtcagtctctgatggcttggattcatgcattcccaatcgtctgagttatcaacgtggaaagacactaagactgatctattattacattattacaggtcgacttaacagcttatgttgaaaagcatgaatttgtgtttgatgccgtgctagatgaggaagtatcaaatgatgaggtaagttttgtttgcaagttactggactgactataactttggaggaagccttcttttcaaaataatcagtaaccattgtgccgcttatgtcccaaatttctgtaggtatatcgtgagactgtggagcctgtagtccccctaatttttcagcgcatcaaagccacttgctttgcatatgggcaaacaggtaaattatttcgaaggtatcatagatacacaagatcactttcctggaaaatctaacaagctaatagcaacaccttaaatccatctaaagtatttggcatgaggttaaggcctactctactttcccaaactgtgcatgtaatagcctcttcaaataaagtgtaaagattatttgaatcgataattaacatccacttttcagaagcaaatactagtctggtttaactatatttttccccattttctctaagtgaaccgttttcgcttttatatttgactttcaggtagtggtaaaacctatactatgaagcctttgcctcttaaggcttcaagggacatcctgcggttgatgcaccacacatacagaaatcaagggtttcagttgtttgtcagcttctttgagatttatggaggaaagctatatgatctcctcagtgagaggaagtaagttgaaagacatcttatatggttatatatcttgactgcaatacttagtatgtagttgtattcaaacgttttttaccttgataggaagctgtgcatgagagaggatggtaagcagcaagtgtgcatcgttggtttacaagagtacagagtatctgatacagatgctattatggagcttattgagagaggaagtgcaacaagaagtactggaaccactggtgcaaatgaagaatcctctcgttcacatgctatactacagctcgcgataaaaaaatcagtagagggaaatcagtcaaagccccctcgccttgttggcaagctttctttcattgatcttgctggaagtgaacgtggtgcagatacaacagacaatgacaagcagacaaggtaacactttatttcttatcgcaacaattgttcattgtgaatgatgtttccgactatttgcttagatgagttatctatatcatatgacacagattggaaggagcagagatcaataagagcttactcgccttaaaggaatgcattagagctctggataatgaccaaggtcatatcccttttagaggcagtaagttaactgaagttctcagggactccttcatgggaaattctcgtactgtaatgatatcgtgcatatctccaagctctggatcatgtgagcacaccctgaacaccctaagatatgcggacaggttggttttactatgttcccttttactttctttattcgttatgtgtgcgtctcgtataattttgcattcactatgcaaattgtagggttaagagtctctcaaagggaaacgcctctaagaaagatgtatcttcttcgaccatgaacttaagggagtccacgaaaattcctttgtcttctgcacttccaactccatctaactttgatgatgacgtgaatgagatgtggactgaagagaacgatgaatttgatgcatcggattatgagcaagataaacaaatgtggaagaaaaacgggaagctagagccatcctataacggtatggcacaggagagaatcccgaaacctactattcagatgaagtcacgagacatgccaaggcccgatatgaagaagtcaaactctgatgacaatctaaatgcgcttctgcaggtattattcagcaatttcattcttcttcagaaaaaagcctcctctgttttatatcatccttgacacaagaatcttttttcatgtgatttttcaggaagaagaagaccttgtgaatgcacaccgtaaacaagttgaggataccatgaacatagtgaaagaggtatgaatctggtcagttggtttcggttctgtagcttaagcgaagattctctaaaatccctttttaaatcacctgtgcaggagatgaacttgctggttgaggcagaccaacccggaaaccagctagatggttacatttcaagactgaacacaattctatctcagaaggctgcaggtatactccaactacagaaccgtcttgctcatttccagaaacgccttagagagcacaatgtattagtctctaccactgggtactgacctataaccactctctcgagtaaataccggtcctccttttatcgacctcgtttcgggttttgcacttgtgccccctactggcttggactggagatcagaagtgtatctgtttacagcctacagagaactttacagcaaagggttatggatgattacagagtttctcatacgtaaaaggatatgatatgcgttctgttcttgccgctgcacttgaattctatcagattcttgtaatggatttgttgcagaagatgaaatacctatgtaatattgcatttgtgctattaatgagcttgccttctattcaataccatactaagttttgcgtaccatgccctatgatccaattgaaagtttgcatatcggtttcagggaacgtaaatctcaaagtatgagttatgattctccaactgatgatcgaaagcttcaaacagtatcgccatgaatagtatgttcatcgttacacagcataaaagttcttggaactgaggaacgagtcactatcaagtgatgttggtaagacatgaaacaaataaacaacaacaaggaagactaaaaacaaaacagatcaacaatacgaaaagacagattgtaatggcttcagagttttgcataggtcaagagtagagatcaatgaagaacttgtcaacaatgttgagaggataggtcaagagtagagatccgtgaagaacttgtcaacaatgttgagatacacgggactgctaatacgagaatagtagtgaagtgcctcttcaacgtcaagggcttgctctatatctactgtctcagtcatatacatctcgttaatcttcttctccattgtatcgcagtctcttgatgaatacgaagagcaagcttctgttttcttcacttgatgatattgttcttgctcttgaaccttgtgctccaactttaatggaccttcaatgctgttttctagatcagactcccagatgttgaggaaacttgcgtagatattgtcgccatcgagagaatttgatctgcaaaatgtgcaggagaagtgagtttttggtctaggaagtttcttacctgctcggataataatggacttgagactgtgaagtgttctatgaaagaaactgtttgttttctgaaacatctctcttcacggcaactgatatgtttgttcttgtgggcagatcaatgttctcttcacatatataaatcattttccagtcatagaaatcaaattatatgttttattaatgtgttgatgttactttagtttcatagtatttgcgaatgtatcttttgtgtctattactcagcatcaaaaagactaaagtgaaaatttgtcttgtcttcgaataaaacgtctcgcttttgttttgttgttccttttccatgttataatatctcttttgggatgcagtaccgagataaccgttgtgcaagaatcaaggaaccgtactctttgtcaaaaatcatgtttcatgagtttgaccattggacctacttcatgtattcatctaaaatagctaaatattctatctctcttttctttccaacaacacccaaagatgaatttagaattttataatgattttttgccaatttagagggatcgtattcacttatagatttgtatatttttataaataaactaaattttataagaaattagatttgaactcgtccgatgtaccgactttaaaacttttaaataaaataaatttaacaagaaaatatattaaaattttattgtaaagaaaaactatatttcggaaataaataaaaacatttggagtaaaaaaagagttatttaatggacttggctagtttttaactagcaactcaaaagtgatttagttgaacgaattttgtttaaaccgactttgacaaaaggctatcaaagatgaatgatttgtgttgattatgtgactacaatgccaagcaatggaggtacttattgcttttgagactattgaatagatttataagtttttgtaatgaggttgaaaaatatttgcaagtacaaaatcctcctcaaataataatgcaagccttagattctcttcatgccttaatttcaatcaatcagcatggaattttaacagaaactggagccatgctttctaaattgccagtggagcaaaaattgggtaagatggtaattttctcaaaacgatatggatgttttgaggaagtaataatcgtggcgatacgaatgttctgaggaagtaataatcgtggcaatggtttgaggtacaattatagagaaagggcttgtgattcagatcgtctttcaatgttatttgcctatgagtcatggacagaatctaattattctgaaaattggtgcaagagaaacaatatgaagtattatcaaatgaaacttgtgagggatatgaagagaagattgaaggaaaccctcgagaaacttcaaataaaaatatatttcaagaggaatgatatggatgttgttaagaaatcgattatatcatggttttttctcaactctacaacacttgaaagagatggtttttataaaacacgaaagcatgtgaggatagaagttgatccaacttctgtgcttaacgaggtaagttcttaaatactaacaaagtttgtgaactaaatcaacagtttagttgattaaatttttttcttttgttttacctggttcaaaagcctaagagcatttcaatggagagagttctcattttgttataaattaaaagaatatttatgactctagacatttatggagagaggtttagtttttggtcataatggtcataatgtgttctcgtccctccactttttcctcataccttatggttcaaggccatatttgttttgataataaatgtttagtatgttaaaacgtttttatgactaacattttattaaacactattttctcttaattgaatttattagtagtttcctcacactttatgaatttattattagttttaattttaaattgtcttttaaaattcaatatcgtatatttacgttttttggtggagtagatcaaattagcatggatatacaagcaactctatgagatcacatttacaagcaactctctcaagatgtaattgaagtttgaaggacaatttaatgtatcaaaaactattaaataaaattagtttttactttaaaatagaccaaaaaattgtttggtgataagatttatattaagaaacttttattaataccatcattataaacaaaaattgatatgataataataataataataatcaaaactgctgaaaataggttgcaaaacgtggcttatatataaaacagttcccaaattgaatcgaatttaatagtttattattttttaaaagtgtgtataccctacaagatttggtatcaataaacattgttattatatgtttcaaaaaaattcttaatgtttcaaaaatttgtttaaccttctctaaggccgaagtaagttaacgatttgcaaccaggcccatttatgtcacatataatggcccataaattcacttcaatcctaaaaataaaaatctaaccttcataatgggcaaaataaattacgatcgtattcaggcccacaaatacaaacaaaggcccatgcttttaagtacaaccctagaattagaaaacgttgatataaataagctgtcataaaattgagcttcttcttctctgaagccgtatcctagggttttctttgcacactactcgctccaatggtgatctctcctcttcctctttcgtcgattgaccatgaaaaccatctctgatattattattgtggaactttttgagtattgcagggaaagggaacagggagtttcggtaagaggaggaacaagagtcacacactctgtgtgagatgtggtcgtcgtagtttccacatccagaagagtcgttgctcggcttgtgcttacccagctgctcgcaagaggacttgtaagaactctcttcattgttttaaaaaaacattctctgaagatgcgtttcattttctcgatctagatttgcttttgtgtgttaatattcattctccatgatcgtgcttgagtctgatatgcatttggaccaatttgtatattcgttctctaacagaagaagcttatctatgtagctcgattgacatgtctattagttttgtttattatagcttgaaatgtttaaactttatcagttctttaatgtctttgcttcaattgattggttggaatttgagggattatctatgttcatttctgtctctgagctcaattcttgtctctttggttaacagacaactggagtgtgaaggccatcaggaggaagactactggtaccggaaggatgaggtatctccgtaatgttcctcgtcggttcaagactggattcagagaaggtaatgtatcttagtcttaagtttgttttctcttccagtcgaaatgtggttttgatggcacatttcttgtctttacataggtactgaagccaagccaaggagcaaggcatcagcttcatcagcttaaagagccagttcgagtagtctctcaggaaggactaaagcttagcattttttgcattcaactagttgaagattacttttcatgtggatctcatacattatgttatgtgggttttgtttcttttgttattcacttataaagttttgaacttggtttaaatatcatcttacatttgcaaccttaacaagccttcttcataggtttcattagagtcctagttttgattgaatgatatctttgaagttcgcgtaaaccaacctcaaacaagcctttcaaattacattctttgaagtcctggttttgattgaaccaaatcgtagtctattgaacaacctaaaaaacattgatttcaattgaccactgaagctctttaacacaataaatagcatccctgggactgcgactataataaaagttaaaaaaatgttgtcaagggtataattggaactttcaaaatagtcggagaactaaaagtttggtcttaatcggaaaaacatagaaacaccgtttcctcctccgcttcttcgtctttccgtcgtccactgtctctctctctctctcgcgacgcagatttcgattcgtcgaatattttagctaatcctctctcttaatctctttgaacatttttccccaaattcgccgcagtgaatactttctcttcccgtaaatctccaaaaatcgagttttttttattacttctcaattgaatttgcttcttccgattgatctcttaattgattcgcttgtgggttggatttgaatcctctcttactttccaaaggtcataccttttcacagatctatctttgaaattgtgaagaagaagaagaagaagacgatgattcgactaagaacatacgcaggccttagttttatggcaactttggctgtaatttatcatgcattcagcagcagaggccaattttaccctgcgactgtttatctatcaacctcaaagatcagtttggtgttgcttctcaatatgtgtttggttcttatgcttagtctctggcatttggtcaaatttgtcttcttggggtctcttagggaagcagaagtcgagaggctaaatgaacaagcttggagagaacttatggagattctctttgccattactatctttagacaagacttttctagtgggtttcttcctttggttgttactcttctgttgatcaaggctttacattggcttgctcagaaaagagttgaatacattgagactactccttctgtctctaagctttctcattttcgtattgtctcttttatgggtttccttcttcttgtggatagtttatttatgtacagttctatacgccacttgattcagtcgcgtcaggcttcggtttctctcttcttctcattcgagtaagttgattttcatctctcattcttagcaggactgaagacagtcatactggtgatattatgtagctgatgataggtttctgttgtaggtatatgatactggcgacaacgactgttgctatttttgtgaagtatgttttctatgtcactgatatgttaatggatggtcaatgggagaagaagccagtttatactttctatcttgagcttatccgtgacctgcttcacttgtccatgtatatctgcttcttctttgtcatattcatgtaagttttttcatccatttttttttgttctcaaattagattatttcaggaatatataatgcagaatgaaacatctgggaaagcaaagatgcttagactttgtagaacaagttcttgtttctttgttagactcattaatattcttatttgctgtttaggaactatggcgtgcctttgcatttgttacgggagctctacgaaaccttcagaaacttccagattcgtgtttccgattaccttcgttatcgtaagatcacgtccaatatgaacgacaggtttcctgatgcaactcctgaagaacttactgcgtaagtttcagatatcccatttatttttttatgactccactgaaaagtagacatattatgagtttggtcttatggatcttggatagttcttggggaatcttgtgttattgaatgcgttttctttcttttatgcagaagtgatgccacatgtatcatatgccgtgaagagatgacaaatgcgaagaaactaatatgcgggcatctctttcatgtgcattgtctacgatcatggttggagagacagcagacatgtcctacttgcagagcacttgttgtacctcctgagaatgccacctctgcagctccaggccaacgtgaattacaccaaggttcccaacagggtaaatcatgttgcctcacatgcaaatttgcaataaaattgaaatctgttatttatgcattatgtgttgaaataattttttcctttttagactcttaatattggaacaggaaagactaattattagttttgtgcaaattgaatcaggtacatcaagctcaggtaaccagggctctgaaataagttcttcagctggcgtttccaataatagtttgagcaggcaccacgccaggcttcaagcagctgcttctgcagcctccgtgtatgggaaatcaatggtttacccatctgcaaacacagtagcatggtatgtatttatctgttgactccatgcttggtctcgagttgtagaacagagcaagcgtcaactgacaaatatgtttgtcccttatgttaaggtcgtcgggagttcctggaacagagcaagtgtcaactgaaccagatcaaactcttcctcaacacaaccttcctgttgaaaactctcatgcctatgcaaatatgtcggagactaagctagaagaaatgagaaaatctctggaaacccacctcgaggtatggtacctgactaatgtaatatcttatatgaaactccagaacaggttgttatatcttgtcactgtaaacgttgtggtgtagattttgcgaaaccgacttcactttctggagacgaggaaaccagaatccgcaggggaaccagagaacaaaggaaagtcggttgctgatgcagcagagtgaatacagtggagaaaaagaaaaacagaacaaaaggtaagtaagtgaagcagagcagatagagaaaggagaaagaagatttgtggttcttctcagaaagacaaaaaaaacatgaatatcccaaaagtgtacatgttttattattattgtttattcagtgtcatagaaattagaagcttgagactgaaacacaaacagttttttttcttactttaaagtaattgttggtttgcattttaacgtgagattctctatattaatataactcttgaatgttccaattttttaatataataaatcttaattacataagccagagaatattcttgttgtattaatgaagatgatgcttgcaactgtataagattactgataacaataatataataataaaaataaaattaagttggtggggaggggtagtttaggaaaactgtaattgcagtattgttaattggttgtctccgtaactttttaaccaatcgtttagtatttttgtaaatcgcctctccaccttgcccctggagaaccatcaccaaaaaacagagccaaacaaaaaaaaaaatctaaaagcatcaatggcttctcggcggcgagtgcttctgaaggttataattctcggagacagtgggtaattattttcttctttcgaatatctcctgaatgttcattcattctctctggattttggtttttgaaatgaacattttgatcgttgattttgctcagggttgggaagacgtccttgatgaatcagtatgtattctctatactatagtcctcaggatctgaaaattttcttgttatgattcgttttttgttttttaatttatctcctttgttaggtttgtgaatcgaaaattcagtaatcagtataaagctaccattggagctgatttcttgaccaaagaggtccaaattgatgacagaatcttcactttgcaggtaatcaccatgtgtgttatctaattatatatataatgtgactgatgagttttagaaacacacactttagtttacatacatactctagtttttatggattgtcttttaagtgtgttaggttatataactctttggttctttgatctccaaatacagatagaaataaagtaatttgttttcccattgtagatttgggatactgcagggcaagagaggttccaaagtttgggtgttgctttctaccgaggagcggactgttgtgttcttgtgaatgatgtcaatgttatgaaatcctttgaaaatcttaacaactggagggaagagttcctgatccaggttcgaacacatatcactgatttttctcgattattttctgtcatatcatatcagtgattgattaatatctttattgatttgtttaggctagtccttcagatcctgaaaacttccccttcgttgtcttggggaacaagacagatgttgacggtggaaagagtcgagtggtaataacgtctttcttttcgttttctctcaagttagtaagaatgtcagagttttacttattaatgcttaaggcacttcatcttcaggttactgagaagaaagcaaaatcttggtgtgcatccaagggaaacattccttacttcgagacttcggccaaagatggagtcaatgttgatgcagctttcgaatgcattgccaaaaatgctctcaagaatgaacctgaagaagaagtgtaagtccaacactttagctaacaagaacctaaatcatctcaactctgaccttgcattgccatcacattgagtttatctttgaacttttctcgtttgtttgtttaaatgcctcgcaggtaccttccggacaccattgatgtagctggggctcggcaacaaagatcaactgggtgcgaatgctaaccaactttgttgcatggtttattagaaagaacatgtgttttaaggagagacctttttagtttctttggcattattgtgatgtgtatcaattagcatacgcacctttgttttggattacagaatcaaaaacgaattttggtcacctgttcattcttaatctcttcagcttgtcgtaatcttcatttcaatgtagtagtgagaagaaaaaataatcaaaccttaagataaaaacaaaatttctcaactttgctatatttcttctggtaatataagtaaagtaacaatgtgatttctatctttcctcttctaagtctttatgtgtccttacatcaaaagctccattacattttcgacaaacaactattaatttgatccctaactcagatttcagatggcttctataactcatctttaccagactgatccttccatttcaactctttgttgattaaaacagccatatccttcgcactggatttcgtcgaaagctttaactgcgcaacacaacagtgtaagaaaaaagctacgtggaggaaagaagaactgaagatataaaagaagagccctctcaaaatagtattaccggattctccttttcaccagtcttgtaaagcaagattgtcgggtaatcatcaacctggatcaaccatcacatacatacaccatcatgatcatggaaatatccaattataatcacatgatagggatcatctcttaccgttagcttaggatgctcgtttgcagaagcgtctatccttgcaaagacaagattttcaaaccctttaaagtgttgcgacaacttctcaacctgtttactcagagcctcacagttaatacaccatggtgtgtgcacctgtttcaatgatcgtactcaatgttacattcacttttatcagttcctttgataagagttttggttcagaagaagagttccattcacagacctcaagaagaacattctcgctgctcctcaagaccacttcatcaaaagtcctgccgaccacagccactacgcttgcattttgctgcagatttgacgaaccataagcaagattagtactaccccaagatgacttttagaagagaatatattatcatactcacattatctggaataggctgtgacttatagtaagctgaaacagttccatgagcaagtccgaaacaaaattcctacattcaaaaattcaatatagatgacatcaatgagtattctaaatgtctacgaaggaaataaaagttctgagaaagttagtacttctatattgctaggagatggatccgactcaagcaaatacttggagttcaggttgttgtcgaatgcagcaacctgttaaagaacttaatattaatccctcttgtagctttatcagtaaatcaagaaatacatagcctgcaagtatttcagaaaacttacaacagttttctttgcatcttctatcccgaataatgtcaagaatggcattgcgaggttttcgtttgatatgtcaatatatatcaacataagctgcacggtattagcataaacataaatacaagagagagtgggtttactaaatccatttggcttttactaagagatttgatattggaaaatacctttgatttgaactttcttgcaatatcttctagaggctgagctagactttcaaagtcatcagtcttcgaaaagaccataacctaaccaagaatattatgccacaactgtgtaagccaatataacataacaattaacaaccaacagagatagaatggaaacacatcagatacaaggtgaaaatgataaaccatctcacctgaagcttgactggactggagtaaacacgaacggtgttggattcagtcaattttgtaaccaaagggaatttattactgttcagaaattccactatcttctcggcttggcaaggtccatctgcatggccagtacataagattcataatttggacaatagtataccacacaataggtttctattactgttcacaataggtttttgcatactccaaaacaaaattgacaaaataaccactttttcatacttataaccaattctcaggatgtaaataagaggggaaagtttatgataataacagaaacctattaacattaaggagcttaccatatgaagtatacttttcagcctcagttttaaccaatccaacaaacacattgttggttttaaggttagggaagagaagcttagcaacatcaatgctgcttgtttctacaaactggatttcattgtctaacgacgcagcttttacaaattcatcatgtccagaagaatcctgagcaaacaaggtatcgaaaaacacattacataaaaccagtcttactctaaacaaacaaatctatccaaggatcacaatctgaagaatacctcagacttttcgaatagaccgagaatgaaagtatgatgcttcttcagaaatcctgaagcttcatcaactgtatcaagtttaatagtagacgcaccagtcttcttttgcacccaaatcactatctcctctctaaacacaacacaagaccaacatttcaataaaaatctgaacttcaaacacaacaatccattaaaagctcaagactttgcaacttacgaggaaaatccaccagtgtaagactgagatgtgccattaacaaacagaagaagcgttgggaaacctttaatctcaagctgagacgccactttcgaatacctctcgccgtcaatcttcgccatcaaaaccgaactaccaatttccttcaaatccgtcgccgcctccgcaaatctcggcattagctcagcactcctcgcacaccacggcgcgtaacctaaaaccatcacatactcattcccatcaatcaatcgcttcgtattgtctccgttgagttccacaacgatccgctgcgccttgctcaccgtctccgcttcagattgttgctctggtctctcttcctgcaattgttcgtcaaccgcaaggagctgctctagatcgtctaattcttcctcggatccggcttcgacggcgacatcagaggaacgagcaacgaagattaagaaactgaggagcaaaaggaaagtgaacaagattgaaaatttggaattgggttttggtttcgtcaacatgattgttactgggttttggtcggattttgaaaagcggaggaagaagtgatcgttcagaaatgaagagaaagatcggaggagtgtttctgattctaaatctcaccatgttttacggcgggagcttaagtaatcattaatggaaacttttgattaaacaaatctttttgttttgaatattgaccagtaaataataaatatgatgaaatcatttggtttccaaaaacagaacaaataaattattttctaaaatttttgtaaaaaaaaaatctaattactgcaaaaattattcaatagtcaaccattattgaattcaggttggttcttgcacacgaactttttaaccactaaaccatcataacttagagttatgatttaattaacacatctttaataatttcttttaaagtcatgctactatagtttgactaaatatttgtttcaaaatcgtgttattacatgcaatgcaatacgaacatatcaacaaaaatctatattaaagtactacatggtgtttgagcttgtttgttcaagacaaatcaccctcgtcttatgtgcgcattgagttgcaaagtgcaataatcaataatccattagatatgggaatcacgaatagcggcaagaagtcttattgaagggtatgggcttattactagcaacatcaatgacaaatgtgcatgagattcgctttgtgtgccaaattatataaccaaattgtaagaaaacattattaggaatgataatttcatttttgttggtcctagttgctataaagtattcttatttcaaatcaaaaatgtatgacttaaagggttgggccttagtttggtcggcccatttagcaacaaacaagaaacagagacgcattattctgatcacatgcaggtttcagaactcccaaaatcagaatttgatatatatgagcctctccatcgttatcctatcaatcagaggtctgaaaacgacgtggacacacgtcagacacatcattcctactactctgatgactcatcagctcaccctattttcttactgctcttatcgtagttatcaaactcacaacatagccgatccatttatgacttcagacttactatgtactctcttcaaaaattgtgaccaaaacaaaagttaaagataagaagaacgaagaagaataagcaagattttcttatctagatatctgcaaggtaataatacagttccttaaactcaggaagaaaagagaaaacgacagaggcagaacatgtggagattctctccctaaaacctgtccaaaacgtgacgtacaattcatttttatcttctccttacgagttatcttctctatttttgttttaatatagaaattttgagtctttgagtaaaaagatgttggaagggaaagcgaaggtggaagagacagacatgcctgtgaagatgcaaatgcaagcaatgaagattgcttctcaatctctcgatctttttgatgtctttgattctatatccatcgctgctcacatcaagaaggttagtagtcttgtttcttgttcttttctagctaaaaatcatatataaaagttggtgttattttttttaaaaaaatcaggagttcgatgagagatatggaagtggatggcaatgtgtcgtgggaaccaattttgggtgtttcttcacacattctaaaggaactttcatctattttcatttggggactctcaacttcctcatcttcaaaggcgccactctttagtttcttctaaaccacatccatgtttcatttccttttcttttaacctcaaagtagctttgtctgtgtaggaagaagctgttctttttttctttttctgttaacagatcttgtttccaataaaattgtaagatgttgtattattttgggattatatgagtggttaatgaagataaacggcttatgggattaattaagagagatataacgaaactatagacaaaaagattattacatcaaataattgaattagaattataaaaatctaaagtaatttagtactaaattacttataaaaactataatattacatataaagctaaaaagttcaaaatttatctcttaaacagtcaaacattcaaattcgattaagtgtacaaatattccgtgatacaatttaaaaatagtaaagtgaaaaagttcaaattttatgttttttttttttctaaatgtaagcacagcatcttataatcctaaatttgtttacataactgtaaatgataaaaatcgaggaaagtttggacaacaaatcggttagttagttaggaatctaatgaggcaaaaggaggaaaaaaaacaaagcatcaaacagaagtcaatctcaaaaagctattctggatttgcctttgcagtcgagtgttattattataccacacggtttcgttcttgtgttttaacaagtttttttttcttaattcttctttacatacacatcaaacaactctgttttttctcttgttttgtttctttcattatgtctctcccgcctaaaaactcctctttgtttcaagaggagaaaacagagagattcaaaaacagagaacctctccttagatttaagaaaatcatggaaatggtgaaagcgagtgagaaagaacatgaaaagtacaagccgaaattgttcgatttagagaacgtgaagaagaagaactcatcttcaaggcatttcaagagatggaactcagattccgccttgagaattgaagatccagacattgatgatggcactgttttcaagaaaaccgcgacctccagcatccagccaattctaccggttctggctatggatgagcaacctcagccgcgtgaagcaactgatgaagaatcacagaaagattcaggcaagagagaaatcattagtccatgcttaaaaccttattatttgattaatgagtaatattataggtttcttgggatgcaagctacaacagtaaatattataggtttgaggctcgtgggtcgcgagctaacacaaatgagagattcataagagtcgctcatgttattgaattatttgttcaggtttcctaggttataatgagaaattcactagagaccaagttatcttgagattccgtggattgcaagctaagtcgtgttattttgcatatgttacagaattggagcagatgaaagataagtttgcaaaattgcttttaggagaagacatgtcaggagggagcaaaggcgtttcttcagcgttagcattatcaaacgcaatcacaaatcttgcagcttctgcgtttggagaaatacggcgtttagaggcaatatccgaggataaaaaagaacgatggagaagagaaatcggatggcttctctctgttactgatcatatagttgaattctctccaacacaccaaactaacgaggatggatcttccatggaggtttcttaccattcttattatagttttctgatagaaagttttgtttctgtgtgtgtctgaatctgaatcttttcttgtaggtaatgactacaaaacaaagaactgatcttgtctccaacattccttctctaaagaaactcgatgaaatgctcctcgtaagtcaaaacaaatacttataattgtttctctgtgtttgcatcaaaaggatcttaggttgtaaaatgtcacaaattctgtaggattgtcttgataaattcaaagatcaggatgagttttactacgtcacacccggttctccggaatctgaaaacagtaactcgaccaggaacgatgataaatggtggcttccgattgtaaaagttccacctaaaggcttatcagaaactttgaaaaggtttttactaagtcaaagagagtgtgtgtgccaagtgcttaattccgcaatggccataaactctcaagttcttactgaaatggagatccctgagagctacatcgactcacttcctaaggtataaactctctataccctaaaccctttagtccaagacctatcaacacatcaagaattgattcccttatgatttggtatgcttattgatgtgtgtttttctttaacttaacagaaagggagagctagtcttggagacatgatctatagaatgataacattagagatgtttgatgcagagcaatttcttcttgaaatggatttatcatctgagcacaagattcttgatttaaagaacaaattcgaagcttcggttgttatatggcagagaaagatagtgcaaatagacaacaagtcatcgtctccgtggagtacgaatttgagtatggataagagacaacagttagaagaaagagcagcaaccattttgcaacttatcaaacaagaattcccagggatctctcaatccacacttgacatcagcaagattcaattcaacagagtaatcaatcatataactttatattaaagtcacattagacatataattgtttgtcttctgttttacgaaaatcattaatttgtttttttttgcaggatatagggttagctatagtggagagttattcgagaattcttgaaagcttggctcacacggtaatgtcaagaatagaagatgttcttgaagctgatcagctaacacaaaaccctgagctcgcgatgtgtaagatccatatagtgaaggaaacagagagtccagagaaggaagaagagccaaatttttgtcttttagaagatagacctaaaaagcagaagcctaccatttcactatctgaggtaatgcaatggaatatcgaaaccaatgaaccgaggaaagaaaagagcgacaagaaacttttaaccagagtgtcaagcatgatcatgtctaacaacaagaagactacttatcttgaatctcttggaaccacaagaagtccaaccgcggggcgatactcttgaaaaaaaaaatatttcttttgtaaaattaggggaagaaaaaacgtttcaaatgtaacagataaacagaatatacataaaattacttaaaagggtttgcagtattgagaaatgttgatgagttttagaaggaagaagagaaaggtaacatgaatatagatcagagcttgccgcgaggaccgagcttaggcggctcctgaggacctctcttgatgggaagaacttcgccggtagaggtagcgctgacataagtaagcaaagagcctcctccaaggatcaagaacttgaggagcaatcctctctttgtgaatggggcagcgaatgtctcaaagaacttgctctacaagtaacgaaagtagaagagaatctcttctcagaatagtgtttgattgaagtagaaaagtcaagttaggttatgagatgaagaaacctgaagaggattgtaaggagaaggagcatcagagccgtatacgtcccattgacctgttgtgttacccaaatcttctaagtcaaagtagacacttttgtctccatacttagccaccacaccattagccctattacacatgaacacaacaacctcaagctaatttaatcacaaacaagagatgaaattatcagaatttaatcctttttaagctaattaatcatcactatatctatcgtttaaaacacacttcagccagcaaaaatctattaatatattttgaatttatagtgtggttatagtggcattttgatcctaattaatgaataaatgaaaagttttagttaccggatggatttgggtttaaagctcaggcgggaaggcttgatggagagcttagctccggcgagtgagctgccgccgagtccttttatggcggcggatggtttcacagcggcgacggttgcaagagacgccatgagcttcgatcactattcttttgttgtgtgtggtgagtgggaattttgtgtaggaaataatagcctttggtcacaatgagtcgagttttgatcttcttctgacacgtggcaactgatttcctcccggggattttcttacgccacttggaaaatgccacgtggaatctagtaggataaggttatctcaaggttttaactaaaatatttcgtgtcttcttattttgttatagggccccttctttatgattttgttttggaaaaaaccccaatagttttttaggtttactaaaaactccagccagtggcaagttccctgaatcacgttatagatagatttgtgaatcaccaccacttttaatttgagctctgatcttaggagttaggtgtcgacaaaatatataaaaaaatcacaacataaatagttaattttaacccatccaaaaagaaaagttcgattaccgttgtgtctcatttggcttcgactagtgctaatatttacatatgtgaatgtagagaggaaaggcaatagtcatggccaggtgattccatctgtaacatattcacaatttaacataattggcagtgtagtgtgatttttaggataatccaacactaacaattacttgttatatataatcgatccacatattctatactgcgtaattcgttactatcattgacaccttaaatggacaaaatcacactaaaaggttttttgcaaaccatttttgaaagtctaaaaatagtttaaagtatctctagaatttgaaataaaataaaaattcgttttgcagtagttatttagaggttttgaatgatttttctataaaaagtaaattgaagtagtgaattttttttttttttttttttttgagcaacgttttgaagtagtgaatcaagattcattttgtaatgaatctcgtataaaaaagaggagaagtggggtcatcaaaacatgtttgagaggacaagattccacgagagtgtggggatctaattgacgacccctaagaaatgggagaggcaacaaagagagaagaaaatagacgtctttctaattggagtttgtcacgtgacggaatcttattggaatccacaaaccaaagtcactaggctctgtccttttccaacacatgaagagaaaatctcggagattccaaacttgtggagagaaagatgcgactggccaacaataaataaacatatttagacacaaaatcctgcggtaaataattaacaattgctaatgcctaatgcataggatcctgctaactgctagcaaatgcgtgtcgcagctactttacaacttctcttaaaaacatattactatattagaatcgaactatacattgggaatgagtataccactaatccactaacatttgtctaagctatttccaagaaagaggtttctatagactccgatgcatatgaggaaatgtttcggtgcatatgataggaaaaatcataaccgatacatttgagtaaagaaaaatattacgtaagatttactataaaaataggaaaattgtgatatacctgtcgagttggacccaaataatcgacaagatagactttacacataatattgagctatgtgtattgacgtatataatctatcttctaataacgtagattagcacaaaattgacgagataaacataaggaaaacgggaaaagaagagaagttgtttaaacaaaaagggaaattgcaagccaacttgaaacttttaatttatttagttcacaagttgtgagaaacagttatttctcccaaaccacattttatcaatataataagacaaataaaagaatgcataacaattaacaaccaatagttatcgctcccttcatgcatgttatagacctgacgtggaattcaacataaacagctaactgcaagttcccaagactactttgttttgtttcatttgagatagtatgtcatagcaaaaaaaattgcatattacaaaatgtagtgcagatttcttgaaattatgaaaagcattacagtttaataacgtttcatcttggtcgaatcaaatcaaagaaagaaaatggtaaaacaaatcccaaattggttaaatattaacctgaaaagggaaatgttgacaaaataactgaaaagtaaagaaaaatatacggaaagtatattcttccttcatatgaaaaaaaaaactaaacaaaacaaataaaatcagatggggtaattaaaaaatgtttttaaaaattaagaggtaaatcaataaataagaaaatgtgggtctctccttgctcgtaaaaggcctatataatgacctaatgcgactcttctttcttccatcattctcggtttaactgtgaaacacataaataaaacaaagagaaagagagagaatatgggtgggtgggcaatcgcagtacacggtggtgccggtatcgaccctaatcttccggcggagagacaagaagaggctaaacagcttttaactcgttgtctcaacctcggcataatagctttgcgttccaatgtctccgccattgacgtcgttgagctcgtcgtacgttctctttccccacaatgatttcttacggtgttcttgttgaattatatactaaacgattgattaacacagattagagaattggagacggatcctctgtttaattcaggccgtggatctgctttgacggaaaaaggaacggttgagatggaagctagcattatggacggtacgaagagacgatgcggtgccgtttcggggataaccaccgtgaaaaatcctatatctcttgctcgtctcgtcatggacaaatctccccactcttaccttgctttctcaggtgcagaggatttcgcccgcaaacaggtgtttatttactattttacccttccactttttattctaaaccacttggttagataaatcttctgaccgaagccggtttaatgagaagggagttgaaattgtggacaacgagtactttgtcacggacgacaacgtaggaatgctcaagttggccaaggaagctaactccatcttggtacgtttttgacttaaatctccaccgtccatttattcatcgtacgtttttctttattttgtatcctcaactttttctttttttttgctttctcaccagtttgattaccggattccgccgatgggatgtgccggtgcagctgcgaccgacagtccaatccaaatgaacggtcttccgatcagcatttacgcaccggagacagtcgggtgcgttgtggttgacgggaaaggacattgtgccgccgggacatccacgggtggtttaatgaacaagatgatgggaaggattggtgactcgccgctgataggagccgggacgtatgcgtcggagttttgtggtgtgtcgtgtaccggagaaggagaagccattataagagcaaccctagctcgtgatgtgtcagctgttatggagtataaaggacttaacctccaagaagcggttgattacgtcatcaagcatcgacttgacgaagggttcgctggactcattgctgtctcgaataaaggagaggtggtttgtggttttaactctaatgggatgttcaggggatgtgcaactgaggatggattcatggaggttgctatttgggagtgagaaatattttagattaagaaaatgtcttactagtatttaatcagtcatcgctctattaatttggttattcattatcataaagctggaggagtaaatttagttatgtcgttatcaccagtcctatattgatttgtgtttaatgcggtttcaaatggttagttcgtgtttaaaattgttgatctgtctcagctccatgcctaatcaagaaactatggttcagctctctgtttcttgtatgaaccttacctgtcataaatagcaacaaaaaagtgcagtaattggatttatttgaggatggagggattatcaaaatgagatggaattattacctgttatgattccagtctcgatttgatgaacttttggagacagtctctgaaagtttcaagcactgccctttcctgctccatgtatatatctgtttcattgacacttgtcttggtcttacattgggaatcctcttctccattgtattgaacatctatcagttcgatcaatcttccacgtgattgtatttcttcttccacattacgactctcagactcacttgacagctcaatggcttccttatcatcaggctttgtaaatatcctgttctggtcctctaagtgagattttaaaggaagtatgttgatgaagccaaaggaatagtagatccagtaaagtgtagattttgtaagagactacagatatacctgcagttgttgtagcagattctgacgctgcaacgagaagtgagcataaatctcccaagtccggaagaagtgtagaggtgtatcccatgagggaccttttctttctagtagcacaatgaaaattcagttaaaatatttatgattatgaggtgaaggaagatgaactatcattttaggaaatgcaaaatcgaacctgtaaggaagtttaggagagcaagacataggggaacccagagcattttgaatggaattgtcaggtatcgaaaataacggagctggacaagaattccactgctattccggacagaaaaatgagttttatggagataaacccaaaagtgcatatatgttatgaagcaagtagtatatttcacttgcctcagttagctctcggtctcttctcctccggtatacttgtggggaattgtgagcagaaaatgcaggaggctggaacgcttcactaacattcttgcagttgatgcatttacagttgtctgagcacagaagattagcctgaaagcactcacagtacttcttcaaacacctggttcttttacatttgcagcctctcgaaagcagtccaggtttagtatcaggtgcagccttacactacaatacaaaacacagaacatcccagatacttacaaatgaaaaaggatgtgaaatatacctctttgaagcttaacctacaaaagtgataggtgtcaagaacatacctgattatcagttaggctacctaaagccttttcactgaaggcatttgggttgcgacctagtacattcaccatagctgcttctctagcatcacatttctcagagttgttatgacaatcaacacaatcacagtctgtacataccactcctgatgcaaaacagtcacagtacctaataaccaagcgtcaaacaaatatccaataatgcatcaatctacagcagataatagaaatctcactattcaacattatactcaaatctctatcagcttaacactaagtaattcttggatcctgaaatgaacttacaactttaaacatttggactgcttgcatcgacatcctttgtgtttcctcgaagtaatgccttcttcatctgtcttatcctttgcttctgaatgctctctgcttcaaaatcaagaccagtggagatcagagagtagattttggattgaaattactcaaacgagaagcatctctagtgaaaattggcagagaaactggaacaataccgagaaatcggaggaaaaagaggaagttctttaacaggagattctcggaagacgggagatacctccaatttggtgaaaacgagcttcctagggtctttctctgtcgcgattttgccggaatctgcgtttcctgtcatatcggtccttgacacattatagtcgccacacaagttagttcctcaatttggcgaaccgattagagcatgaacggtgaggaatcctcagagaagcgtcgattcatagatcagatcagatcagtgtatcggagagtcgccatggctgacagatatcagaacaaaaatggaatgctggatcctaattcggaacgatgaatgattgtctctctctcgattttttttttggccagctccaaggggttttctaagaaacaaaaaggttctgtgaacaacgcgaaggtattcaaaagcgagagagagtgatcttggagggaatgatgatgtgttgatgacgaagatggagttggattaaagaaatctaatttcatgattaataatttaatataacaaaattagtcttctccaatgctcaaaccggagacctaagatgtacactccctttaaaaggtactgataaaaaaaaagttattaattgcatgttggcattaaatagaatcttcctctagagttcaaaacttcacaataataaaatcaatgcatatcaaagcatatgtataagatgttagctaaccacaattgttattcatcaacggtcaggatcacatcactcaaaatgcaatattcagatggtctttaattttgtgtaaatatacttagaaagaaattcacaacacaaataaatgagaaaaagcaaatcagtaattaaccttaaaaaaatgcctaataaagcgtcattaaagaataacccattatcgcctgtcactcacttttaatcatcaaaacacgccacgtgccaaactctccactgaatcaaagtcgccaaacgcttcagtcgctatttcatgatcgacacgaaggctctcttttggcgattgcaaccaccacctaagaagaacggctacgtaatttgactgtacgacttgcgaaaaaagtcgaaaccttttaacgaaccagacctaaaaatgaccgctacgacaacattaaagagtttcaactacttgtctttaattaaccatcgactcaaccacaactcctacgctattctctcctctcctcttcttcctcgatcccacccagcttctacttcgttttccaattctgggtttcgattcttccaatctaaccatctcttctgtaagttttcttctttacctttgtttggtttttgcatgttacatgttcgacgaaatgtcttaaagattcgtgctttccatatagtaacattgatgatccgtaaaaacctgaacaagttgttgttttgatctgaatttatattgaaaattttgcagcatctccaaggaactcaatctgttctttttttgtacatgtagtttctatatattaatctgaattttatctatgtaatcaaaatgttgcagcttcacagtctggttcactcatggaagtgtttaaagcagctttttcagaagcgtctaattcttgtgataggattgcgattaaagccgatggaaagagttactcttatggccagctaacatcgtctgctttgaggatatctaaattgttcttaaaagatgatacgacaaatgtatggtttttggtttgaaattgtagctactatatctactacttgaagctatcacacagtttgtttacagctttatggttattgactttttttgtcttctataaatttcgtagggaggtcaagaaactaagaagtatgaagggtttggtagtctaaaaggagctagaatcggaattgtggcaaaaccttcagctgagtttgttgcaggagtcctggggacatggtttagcggtggtgtagcggttccacttgcactcagctatcctgaggctgaactcttacatgtcatgaatgattcggtatggaatctacttgccttcctatttccttgtgctttaatttcggctcaattgttaggtattcttgatcttatttttgtgatctcagaattttgatccaagctcttggtttttctagcattaggtctttttccatagactaaaaagggtactctgtagaacaaagtagaaaatattctaaaaggcagaagttttctggtttgctctgttttctaccacattcaagtttcacaaaataagtgtgccttatgctctttttactctcgagaaaaaatgattaacattttcttgggatctaacctcgttgtcttcggtttctaggatatatctctgttattgagcacagaggaccatagtgaaactatgaaaaccatcgcagcaaagagtggtgctcgatttcatcttattcctcctgttgttaactcaacttcggaaactgttgcttgcaatcagtttcaggatgacagttttgaagcagaaggaaagtttctaggtaagtttttgaatatacttgagatggtgaacttataatgaaggctgctcttttaatttttgccaccttacctcaagcaattattggtctggattttctgcatcacttcagcctttatttgtgcagatgatccagcattgatcgtctacactagtggtacaactggtaagccaaaaggagttgttcatactcacaacagcatcaattcccaggtatatatccgacctccttatgtagcgcatgtcatgtttcaaatctacccaacctgcaatagaatggtctgcatgtatctaaattatgatgtaccttataagctagaagcttgtatatgttgcaggttagaatgctcactgaagcttgggagtacacatctgctgatcattttctccactgcctcccactacatcatgttcatgggcttttcaacgctttatttgctcctctttacgcacggtctttggtaacttatactattgagatttgctttggctagctctttcaaaatacattaccttcggaaaacatcaggctagttttaggtttttaattgattttcacattcctttttcaaggtggagtttttgcccaaatttagtgttagtggaatctggcgtagatggcgtgaatcatatccggtgaatgatgaaaaaaccaacgactccataactgtatttactggagtaagtcttattttttgttacttgtattccagacaaataatactagtttatgcttagctgtccctgcctcaagttaattgtttgatttcttgttgcataatccttttcttaagcctgatatagcaagcttattaattgtttctagtgttagttagtatttgaattgagggaagtattcactattcaatgtgagtttactcaattttactatgtaacaaaatgatagtcttggctgagttgatcagtttccagtttgcttcttgcgctctagatatataaacaaacatgctttgctttagagaaatttagcctgagatgagaaatagaaagaaacagcgagagatttagctatttttaattggtaaagttattgttgcgatacacaggttccaaccatgtacactcggttgatacaaggttatgaagcaatggataaagagatgcaggactcgagcgcttttgctgcacggaagcttcgcctaatggtaagcaaccaaatatctcctagaagagccaatccagcttaatgtttatcattatctgcctagatagctatgctattttcatattctgatgaaactagtgcttaaatgttagccaatgaaatacattttcagatgtctggctcctctgctctccctcgacctgtcatgcatcaatgggaaagtatcacaggtcatcgtcttttggaaagatatggcatgactgaggtaagtagattttcctgtctctttgagttaccataatcaataccttagaacaagcttaacacaagcttgttcttagtagttacatctactgaattaaaaaaaaatcttcaatattcccagtttgtaatggcaatgtcaaaccccttacggggtgcacgaaatgcaggtactgtcggcaaaccgcttcctggtgtggaggtcagtgacatcttctttctctttcgtcctcactcaataccttttaactaatgctacacagattaagtactagtaatactgtgacatgaagttatgatactgaaaaagtgtaaacatgataggctaaaataaaagaagatgaaaatgacgcaaatggagtgggtgagatatgtgttaaaagcccatctttgttcaaggagtactggaatcttccagaggtgactaaagaatcatttacggaagatggatacttcaagacgggagatgctggaagagtggatgaggatggatattacgtgattctaggacgtaagcagaacctataagtacattcaaacacaatttaaaagtactttgtgttccttcatttaacatcttatcttatcttctctggtgtcgatcaggtaatagcgctgacattatgaaggttggaggatacaagttatctgccttagaaatcgaatcaacccttctcgaggtaacattaacatccatttgagtttttttttggctctgtgaagctatcagaagcttttatctccttgggaaataggctttagataactgaaccgagagaacttaatcgttgtatgatatctctgggggatgtgttatgcagcaccctactgttgcagaatgttgcgtgttggggttaacagacaacgactatggagaagccgtgactgcgataattatagcagagagtgcagcaaagaagagaagagaggatgagtcaaaacctgtaataaccttagaagaactgtgcggttgggctaaagacaagcttgctccttacaaggtactaaaaatctgccaaagtgttgtcaaaacgcgcaacagtcttgtcaatctttttttctttttttttcttgtccataatattctgtcttttcagctaccaacaagattgctgatatgggagagcttgcctcgcaacgccatgggaaaggtagctatatttctctcaaattttttcttttttcttgaatgatatcagagatagttgttttgttgtaaccaataagaatcattctcagtgtatgagtatttttttcgagttgcaggtgaacaaaaaagagctaaagaaatctctggaaaatcaagaataaagacaaccatggatttcattgctactccttgttcttttgattatatgacacgtatgcataaaatgtaatttccttctttcctgtatcatgtactttgactcaataatgtcaagaatcaataccaaattaactatttgagaagtaaatctttgttatatactatttctttgtttagtgtgaagaacaacaaaattgtatagtgtgaaagaaggaaagttgaccatagtctttgactctttgatgctaaatcagtaatcattccaaaagggtataatggtaattaactatgatgatccgataaccatatattcccacacgcaagtttgttttgtaacgagaacgtaaaaagacgaagaagaagggacagtatggtagatccaacgatccataacacgacgacgtatctcgaagagatagcaaaaggaaacgggcaaaccgagttcgagattttaatcttgaaaggcttagaactcatccatgtcgggaaagggatcttacgttgtaaattacttgtcacagatcatgtcgtggtaataaaatttacttaatccaacgaatctagttttaagcttccttttttgtgtttttgattggtgaacgttattattactaaacaatgcgaaagatgattctcagggagaagatggaagttggaatgcgggagtgattacggcggtgatggactcgatcggagcgtcagctgtgtactcctccggcggcggactccatatctctgttgatctcaactcttcgttttattcaacggccaagattcacgttcgctttccctatcctcatttttctctcgttttttttgttatgaaacatgcaaactactaaattaggtaaattactattattagtaatgattagaagtaataatgataagaaaaaactacaaaattgcaggaaacggtagagatagaagcaagagtgaatggaagcaatggaggattaaaatcagctgtgattgagattagaagagaaacaagtggagaaattatagccacaggaagattgtggatggctccacttagcgtcaaagccatacaaaatgtttctactcttagtaagctttgattttttcttaatttaagtgattcaatttcccaaagtcaaaaacaccacaaatcaccattttgaaaatttgattctcttcaatcaaatatcatacacacaatgttttttttttttttgtaataattaaataaacacacgacccattaattaacatcaacctctacatcctaagaaaatccaaatccatgatataataatctaattacatacaaatatatagaattttataacacacgtacaccatttaattatgatcaaccaattggtcttagtttaatttaataacttcctcttcttcttttctcataccattaaccttatcattcctcacctgatccaccgtaggaccataggaccagctacacacaacgtagtagatgacattaacgaagctcaagatcgctaaaacccaatagtaatagtcatagtgacccttgttgatgttatcttcaatccagctcacattgccctgctttgagctattctttaccgcatttaggatcacactagccaagatattagccactgccattcctagaccgaacaacgaagctgcgatactcgacatgcttttaggaaactcggtatagaaaaactcggtctgtcctatcccggtcaaggcctctgctaaaccgtgtagtacatactgtggtacaagccacattgctgagatgctcactgttgagttggcatcgtttgcgagtccttggcttatcgcggttttccttctgtaatgttcaacagttgcggaaaccgccattgctaagaatgatatgaatagccctaatcccattcgaatcttgacattgactctaactggtctgcctcggatctttgaagctaaagggagaattgcgcggtcgtacagaacaacccatgagattaaggctatgattgtgaacataccaaacgatccagctgggatttggaaggtcgaattgctgcttaaacgtctgtccattgatttagcttgaagcaactgaaaagagttctggctaacgtttatcgacatcattatccccgtggaccataccggtatcaccttgaccaacgccttgagtttctcaacttggtccgttgtgcatagcctccactggtttaaggccaaaccatcagaaccaaggtcttcatcgcggttacttatggcacaagctttgtttaaaaacctaagcaattgcaagaaagtatcaataaataaaaaaactaaccaagaactatatatgtgaaactgatttcactttacctcaatttgtcacttggagctttgagttcagaatctttcaaacggtaataacaatctctggagtcatgatgatccggcaaagttaagtttctcttcacgtaagctgcagcaaccacttgagctaaaccagtgaacagactcttgctcacatcgcgcttaacgtagagaggagacgcgaaaacaaacaagaaacccgcgagcagcatgagaatcgcgggtattccaaacccgattttccatcctagatgatcttgaatgtaaacaatgacggtgaaagcgatcaagacagcaactgatgaagaagcgtagtaccaaccaaagaaactctcaagaactctctcgttcttaggattctctttgttgtccaattgatcagcaccaaaggctaaagaacatggcctgattcctcctgatccaatcgatattaatgcgaatgcggtatacaagagagccaattgagaagatgtcgcggaactgcagttggttccggctgttgctacacacggtgatggttttacttgcggcaacatcgccgttagccatagaaccaccatcccctgtaacatttttgattcagacaaatttattaaaacaatgtagtaggttagattttgacgtttttgtttttcataataaaaatgtagttatcacttcattcgtaaaatctgtagatgtcttccaaaaaaagtacttccaagaacaagaatccaagtattagatcagaatctacacgtacgtcaattgtcacatccatcatacgaaaacattattttcttacggaaaatgattgatactcgagatgaatgattgatgtagagatttcaaaatcaattgatgtcactatgtatatgataagtttttttttccaagtgggtgaaataataagtttgatcaagaatgggacaagtagtacaaaaacatgggtcaccaatcgatattgctttcatgtctaacacttatatgttggccaaaaaactaatgtcaaatccttaaatggtggcaaaatgtaggtccacgtcagcttgacccatatatttggacatataaataatgaaactctaagtctacatacaacaaaaagtaataacaaaatgatattttttatacatagagagatgcaagcagtgtggtcactcacaatcacacaagttgccagagaaagcccacaagaccataaccacaaggaaagcaacaaacaagattttaaggaattaataatgatattaaatactttatgattatttaagacctgttattatataaactcacatggacatttcagaacacctggcttcgaatttaattttaccgacttttatatttttgatggacacaaatattaaaaacaaatcaaagcgggtttagtttctccattcattggacagcaatttcagggaagcacatgcaacatgtgaaaattttgactcttaatggaaaaaggcttctaaaaagcttaatcatatcaactcttaaattagaaatttcactgtagatgattatcattagatattatagtacttaaagcagaaatatacagctatcaatgatttagcaaaaccaacggtaaaaagttataaaattttagtaaaaacccctgaaatttaccataccaatcttttttttactatttcgagaatataaaataattaaataattacatacaaaacctcgtaccatttaattcttggcccttaattctatgacttggttagattttatggaattctctttttgttgtcgacgcaagtaaagtcaagtccaattatcgaaaactatcaaaccggaatttaactccaattatcaatgcatgtaagtaaggtccaattgtctaaagccaagtaataaaacactgaatacaagcacgatatttcacccaaatcaacttaaaccgaaactttcggtttagattcccaattttaataaaactcaacctttactgacagtaaacataaacaaagcatttccaaaccaaaggctaactaggtggtgaaaaatgttgagtcaaagaagtggctaaaaaattgaaccggagtaaaccgggagaaagaagaagcgtaaaccggttaaataggggacggaaattaccaggagactggagagagaagcaatgacaatggtgagaaagcgacccaaatatgaatctgagagaaaagctccaacgagaggcatgaaattagtagcagcaacccacatgaacaagacagtttgtcctttaacaagtcccaatctgtaatcactcatcagataaagaatcatgttctgtaataatccatagctcgccactttctcgaacccctcgtttgcttcaccgagtaacaaacaagatgagataaaattagtaacaagatttgggtttttgtctaaaaaagtgagagagatcgtttgttaccaatgatgaagggcatagtgagaagaccaccctttgttcttcttcttgtaatgggttgttgaagagtctcctttgactctgtttgatccggagggttctccattgttgttacctttcaagcttcgagagaggggaagagagaaaagtgaaaaagagaagagaaggaggagaagatctttgtctttgtgagagttttgagttaatgcgatcttatttttcagttcagacagcgaggaatctctgttttctgcgacgagtgagcaataataaatggctgttatttaaatactacattttctttttccctcaaggcaaattgttttttaattttttaattttattaattaatttatcataatgatttttatagagtgaggttttatcctatatggcacacgacaattttcattcttagttagaacttagaaatgatttgttagtagtatgaaagaaaaaaagttagataaaacgtcattttcctaatcttagctaaatacaagttgaaacataaatgccagaaatattcgtttttttgtgaagaaaatatctaaaatggagaagattaacttacatagatatttcaaaaagaagagaaaagaaaaaaacagtacattgtacatcaaacttccaatgttccatcatccatgttacttacgtcaaacataaaatggtctggtgttattgacttatttttgaaataaatccaatttattattatttatgtacatttcaaattagttaaatatgttaatgttatatacttcgaaaccataactattctatagattttttgatgaaatagttgttggaagtgaatttgcaatgtagaagaatcaatcacaagaatttcaatattgtattatcttctaaagatgtcttctaatcagacttaaactcttaaaaagtttatgagagcttcaactatatcattatactgtaactaaacatgtaaatggctttccacaaatcacatccaattatcgaaaggaacggatcaaaaatcataacaaaagtttactaataattgagaatggaaaacatcccatgaggttaacagcttttgttttggctctctctcttcctcttttcttgacaaattgaaactttttgttattcaattcttttttttcagtttaaagttaaaaaatggattcattaaagtaagtgcaatcatatataaagttttttttaattcgctttctccttatcacactaataagtcaacatctcaaagagtcggcccaaagaatataataaaataatagcatacgaaagtttaccaaacccatgtaacaattgacctcatgaataatagtttatgttttaacaaaaatatgaataatagtatatgtttaactgtataattttctatgtatctaagaagtttcggactttacgatgtatagtaacttcgaccaagagattaaattagtagttttccctgctaatgtcgactttaagacgaaccccatcttataaagttactcgtatctaatcggttaaactatccattccaaattaacaattatattttcttatgtgacttaatccaaataatgaatgcaaagaaaactaacattcattattcacaaaacattatatattgctaaacaatatcatactgttagattctgaggatataaactactgtatcaaaatacttatcactaatttgtgattctatatcctacaggctatatatcattatacgctaagtaattacgtttccaagttaaatgatacaagtatttgaaagtttctgcctaaaccagattataagtaaagtacttatgttcagtacaaaattaaaaatggtgcaaccagatttgaatgaaaaagttcgtacaaaattaagtgcggtgtctgatgatggcagaagactcgctagtaggaaccaaaaatgaaatttcattatccaaaaatttatttgtggtctttcatgcatccacatgaacagtttcaataccaaatacctaatttagtttttaaaaaaaatcgtaattaatcaatacatcaagaattcaacattagattatcctgctattaaaaaaatctcttaaaataatttcttagaacattagaataatttaaaaacaaaaagtgaataaaaagccataatgatgagagtgacatggtcatttgccttgcacgtgggtgtttggatactctgcaatctcctttttgacaaacttgttaatccacactactcattatgtcatttcatttttaatttgtgatcatcataactacttagcctcgtcgtaacaacttaacccaagaaaatcagagttagatc

SEQ ID NO: 425 - DNA, 75289 bp, Arabidopsis thaliana
caaataaaagtgatgggacactttaaagaaacgaaacaaaaaaaaaaacactgtggataaagcaaaaagcaaatggtaacataaattgtttttactatatacatttcggcgtttgtgaaataatacagtcgaaagaaatggtctctaggttaacactatgcatagaatttggtgagaaacattacagaatatatttcatttaaattcggtgttcgataatgttgtgaaagagtgaatgtagattgtggacgaagataattctgggacacttccaaaagaagaagactgtagaaaatgaattgtctctgaaacattattattcaaagattgcttgacttacacgccacctcctcatttttcctccatttcttacttcaagaaggaaaggtctattgaggtatgtgtcaggtttcagacttattttttcttctcaaattcaaaaaaaatatattattttgtcagactcatttttctcacctactctactttcttattcaatgttctctctatttttttttagctctgttccagtcccttctccatttacacacaagctaattaccttgtcttcttcttgttgtaatttattaaaaatttagaaggtgggtattttgttactttgctattgaattggttgttatggaaattgttggatattaaggtccagtctgtaaattggagaattttaatgtcgaaactatttgagttattttcgcatactgtagttacaagtatcacgttttaataactcactgaccatcaatccataatgtcatttaacacaaaaagctgcgaggtataagctatatacgaaaattggttaaattaataacttgataaaagaaaaaaagaagaaaaagtatatcctagtaatcaagtgaatttacgagagactgataataagtactcctaaaaattattactgtaatattattgtattacctctgttttcaaatcattagatgctttagttatatcatcacacgtatataaaataaaaaaagatatctgtatttacaaatctactatttttatataaatttgtattcaataaagtaatacctacacctaaaaagtataaaacatatattttttgttgataaatgaacatctaaaaaagtgttatatttaggaagatagtttagtgaatttccatctagtatattactagataccaaaatttgagacgatgtgctaaaaatatgtttgtttgcgtatgatttttacatagatacgacataaccttgactcctgctttaaccaaaatttgtttaagaaaaaaaaacaatgaagccagcgaggcgtattatttcagttacaaagaggaaaattcatgaacttgccgtttatctatctaaaaattcatgaacttgcctttgatatttcaactctctattgtcccctttcttttcataagtcaaatcaatctattatcataaatctaaaaaattcttgtcacatttttctgcaccttctattttaacctcggaatcaataatcgcaaaatcaaacgttaaatcatcatatagctagaaacaatatatagtttttttataagaaatacgatttaattggtcatatattttgatttatcaaactgttttggtgaaaatacattgccaacacacacactcacaaatattttaaaacctgatcaatataggtatttatatttttaacaacaaatacacaagtcaacttatgaaaaaaaaaaaaaaaaaatggtagtagtagacttccattttatcaacttgagaaagttggaaattgaaagagaggtgcttgtcttgtaaagtccccccattgttgtaagggttacacaaaggaatgtccctcgtaatcatgaaatgagctgtgttacatcactctctagattttctcttcttttcctttaatcatataacgtcacttcaagtattttttatactccatcaatataaacaattccttcgccttattttcttcctagaacaataaacgatgcatcattatttcaggtacatgcacacatctgcaagtaaatgtaaatactccatgtaattacaaaaaagagagaagatatgtcaaatgaaaatcaatgtgaagtttctctcaactaacataatataatgatgactatattaatgttgctcatcattaaagatattacgatggacacaacatttaaagatatttatatggcaaagctatgtgtctaaattttgtaggttttgagtgttagaaattaagaggagttggtgaaatgaattatggagtagtaggatcaagttggaatattacttagattagtgaaaatcttatagaggtggattgtttatttagatgaaaaatgaaccaaaactagagggaacaaagtggagatggtaaagcaataaagggaggtgaggacaatgaagtgaggataaccattaccttccatttctctctttgcccatgttacctttcttatcccctttaatcatgaatactcttttctatatatttcacaattattattgtataataacacaaattaaagagatgttttgataagaaaaggtcacacatttgaatcgaatgataattttcgacattatttttagtattttattaaacgtaatacattttatttttttggacgggattacaagaaaagtatacaacaataggtggagattttgtaacttacaacaacaagattaacattttctttattacatgtacaaacaagaaaacaagataaaagaagggcttaagatggtctttgtcaagcaagttcttcggaccactcgtgtaatgtaggagtcttgactccaatattcttcatgtcaagaatattcgctgatccaaaggaagttacgacaatgttagttcctcttttcggagaatgaccaaagaagaaagaaatattcaagattcttctgacaaattaggttaaaccacaaagacaaacaccaagagtagaaaagatgggtatttaccagtatggatctctggtgttgcagcagctgtggcatctgtaataacagtcacattgggataatccagcgccactgcatcaaacaccgtttgccggatacagttcggcgtttgcacacctgaaaaaaaggttacagaaacagctcccttaatcttagagaaccgtagatatagaaagtttcactgaataagatagtcttaagactcttaacataactcaccagcaatcactaacttggtaacccctgaagtttgcaagaaggaatgaagattggtactaaagaaagcactgaaacgagttttcacaatcttatagtcatcttcttcgttgatcatcaatccatcaaccaattctgctcctacggtgcctttaataactggcccgactttctcagaactgtagttatggcgcctgaataattcaacatctcttccttgacgatcatgttctcgaacaacctaataccatgaaaaacactttgtctaagaagactcccacacactgaatcgaaactagtgttatctcatatgattcatcagtatctaaacaatttgaacatacaatccttaaccttgagtaatcaagccagaaatttgtttctggataagaaaagctctcaagagtagtaacacttgacttggaaactaaagatctcacattaagattctggaaacagaacatgcaagcaaaattaagaacccattttactccattttcgtttcatcaaagatttttgatatcaagttcgaattcattataacacaaccaatcaattccagaatttttctaaatttctcaagcaagttacaactccatgccttgaaaaggataagagaaatggagaaaatacccaaattacgagaataccacgctgcctcgcgagttcgacgactctgataacattaggaactatagattttcctcctttcacttgcgtcacagcaccttcctctatgaaatcgttctgcccacaaaaaatgaattcaatcaaactctccaaaaccccagaaaacacacaaacaaaatcaacagagagagagagagatggagacctgcatgtcgatgacgagtagagccgtgttcctccatctctcggccatagttcgttccccacaaagcgaacaaagagagattttcgagcatagtgatgcttgaattgtaaattattagattggtgtggctcctttggcggaatcacggcccatctgtcttctcattcggcccaacaataaagaaaataatatcctcgccgattttgtttctttttgttgtccaagaatccaagatatatctaaaccgactggtactgaaggaacaaaacaaacgttgcctaatttaaattttaaacctgctcaagcatcacatcaccaagattcacaactgactaagatacttatcagaaagccacagtagaaaagaatctcctgtattaacaaacttttagtttaacttataagagaagagaagaagaaaaactaaacgaaaaaacaaaaactcttcttttgcgggaatcacacaatcttctatgacccgggcttggatatctcaaggtataccatttgagtatacccattgaacactgacttatccagacgacctaaaccgattcgttggaacaaccggtgcttgccatctgctacgattggtggagtcgctcgagcagggtcataccgcgactgatgggttaatgaaggtcctgcgaccggaggtagctcccaatagacgtcaagaattgattcaacgtagcgactgttttgaaaatgctgattgtatgagatcggcgtgttagtgtggttgaaatcatctctcatttctcctttaactccccaccatgtttcccctggtccgcacagttcctctgtatcaactgctttttcccagaacttcttcctctttgatctcatcctagcttcatcgctgtctttgaaacagctgtgtccgcctcctggagaaaacaaaccaatccatatgagaaacaatccaattccaaacccttgtgtatctattgtgtgatcgctttagaactcccacctcttatatgtgactgatcacatatctgtctcagcgaatagtgatccccggttcctgtatcgtagttatcctcgaaaatgagatgtcggaaaccagctttcagtgcctgctttagcctgctcgtttgaaaatatgtaaaataaaatcagtgaatgcttagcacatacaataccgggaaagagatgagaaatgaaaaactaccttttgagttcattctgatggtcatcgaaaaagacaattacacggctgagatctgttataccatgttttctcaacacattcttccaatcaacacttccaaaatcaacaaaatctttgcctgcaaagtatgtgcagtttccatctacataagcaggtccctttctcagatacttctcagggtgcctaggagtaagtgaaatcataggtgtatctggcatcgcctgccgcagaacccaagtagaatgtcccttaaaagcaccactctcaatcatcatatctggctttagccaacgggccatgaaccataacccaaagctatgatcaaaacccattccatacatattgttctttatcggtcgtgtttcatatatcggcacaaactcttctagacccttgagtaaatctttggatgtccactcaacttcttttccatgtttcgatctgccttttgccaaagaaaaaaattaaatacttccatagcacaacaaatcattatcatgttgctttgatggaaaaatagagaacaacaacatagctatctaacagtataaaactcgtaatcgaagtgtactagaggagttaatggttctgctccattgatttgtcaacacacagcacagccactactatagtactatccagagattaaccagtggaagctacaaggcttcaattcaatgatactaaaacctcatctgaatcagatttagagaacaattttcaaattgacctgaatactatcaacagaaatggaaacctagatcaaatctaaccaaagcattttgaataaatctacatggaaacactagagattccactagaaccaattcacaatgtcgaacacaaaacacaccaaggcttaaaaataagcagagatctcaagtgcttacaccaaggaacacctagggcaccaaaatccgattcgaggccatcaagaccgaaaaacccgatccgagcagcgggatcgaagcgggagatgcaaacaaagctgtgagaatggaaagcaacggagatgaggaagagaaggacgaggaagaggagagcgagaatgagacaaggccaccactgatgaccgatccgagaaaggaaattggaagcaaggaggtagatgtgtgggcgtttggttttagattcgtcggttccggattcgccggaagcagagagatcggcgtcggagtgaggacggcgagaggaaagagcccgatctagcatcgtcgttggagttttcggtgactgagagtgccagagtgattgcccattgttcattcctctctccattaatatcctttcttaatctctttttcgagtttaatcaattctttgtaatctataaagtgtttcctcctcacttgaatgacaaaatagaaaaccaaaaccggctagcccaaaccggttagatgaaattggttttacttattgaatcaaagaccaaaccggcttgttccttcgagagcaaaacaaaggcttcgtcttcttactttaaacgctaggatccgtatattcccaaaaccctaatgaactaccggcgattggatggcgcgtggggctctggccctcgataatccgaggaccactagtggggaagagtcctagtgagtgctcttgcagctactgtttaaaacttatgaactagtgcgtgctcttgctgctactgtttgataactgagtcacaaacttgaacctgtgttgtttcgctaatatcattgtttatttggaaggagactcgcatgataattctatggttttgtaacttgtaagataagaagtatttgctttgatttggatttcttaagtttattttatcttccttgattttcggtgttgttttggttctttagtttatgatcactttattttgggcattatataaagagagacactattggaatgaataagaatcatcttaggaatttaaggaaaacgagttctcgaataaccaaagcaggagatccattatttgatgagttacttgaagagaatggtatctttaatcatattgtcccttgtttagagagttcatatagaattccaaagctctgcctcgtcaaatattcactactattgccaccaagttttttgagatatttggatctttaattttaattggaccggttaccattaaagtatataaaatttattgaattgtttgtcacgttatccgtgtagcacccgcaacacaacgttgacgattttaatttttttttgtcaaataaatatgcgattaacaatcttaagagtctccacacattcacagagaaaccgtaacccggctagagggttacagaaccggacttcttcagatctctcgtttccggttttgtacaagaacatcttcttcttcgtacgctcttcaggttccatctcgaaatgatcgttgtatccagtgaatgttacgacgagatcgttctttctagtaaacgacacgaattcgacttgataatcgtagatacgatcttgtacagagatgaaactcgacattgaaaggcttataatcttgctccatgatccggttttctccataaccgaaatccgaatctccttcttgcacatttcatactctgtaatacagagtttttgacttgtaacgcctaaccatgaagacgtcacgccttggttgtaaaccgggagagggagttttcggtattcatgtgttgagagattaaagcataggataaaccggtcagcactagaccggtacgcaatccaatagaggtattggtccaaaaatgtacctctcctgtctctgtaatgccaatcaggataagaaatacgtaggctctctccccatgaaccggttctaaattcgaaaacatgcgccgtggaaacatcaagccggtcgataaacgttacgactttgtaatcgtcgtgaaccgggtcataaccgaaacccagaatgtttgaatcttggtatataccgggatttggtacgatcttgaattgcttcgaaaacggattccaaaccattaaagtgtgattctttaaggtaacacataaagtcccatcacaatgaagcacacatgtagattcatcgatcattgactgatccaaggggaaatcgagcttgtttgtaataaccggatgcttgccttcaacgtcaagcatgtaaaagttcttgtcgtaaaacgacacgaactttgccggagacatgtctcggtacgtttctgtgaatccagggtcgttgataagatctctccatgtcttgcagacgcatctgaatcgagcaagatccttcatcgatagcctcactagaatctcaatggctaattcttccgggagaaatttcgacatttgattttttttgtggttgaagacgtatcggtatggctcaaaaaagggtaggaaacaaataaaaggttttgtcttttgatgaattaaaaatgaaaaaaagttaggtggagttgcaaatttgcattaaaattttataaaaagagaacatttctacacctcattcgcgtgttccggcatcactaacttcatcattcatgattactctaaacaaattgatttatttattgctaacatattttaatgcaatatttgacacgtacttgaagactaatcaaccatttcatctctaaggttattctaaggttataggcaatggcaaatttattcaataaccttttttattattttttaacattgcacataatcttttctttcttccacatcattattcaacatctacgtaatttttaatcacttgtttaataaaattcaacactctatcctacaattcttattttataatttatatttatttatatatttatttgtttgtgattgcatattaattataatttttgatagattaaaatatcaactaaaattattaaattaaagaggataataaaaacaaactctaaaattaaatttaaaataaaaacaagagtttcttagaggataataaaaaaattatgataaaaataatgtttttttgtatttgtcttaatgaaatggaccaagtttctttttatagagtttaaaaagttatgaattttcatataaatatttttttttttaagttttgttatataataattgattgtaaatagataaggtgagataaaaaaaaaaaaactttttacttgttctttaggtgtgaggaacatactttctaataaaatgatgacatgtggtatttgggccgaaaaaaattttattcaacaagttggatagattcaacaccctaaaatccacgtaattttttttcatttttcaacatctccattacattgattaaacagttgaataatttattcaacacctccattgcaaatagtctaatatcgtgtttcaccatctattttgtaaaaataaaaagcaagtctttaacggttattactttcatatattttatatatcaccaatttcatgatttaggtgcgatcctttccgaaaatcaaagtatttctcctaatgcgatgagagctttgaatatccaacccatcttcataagacacatccttgacttatacaaagagtgagagttgtttcagactttcagttgaaggagatgctttaatttgattatatcacacttttcatttctgcaacatacatatccacaagctatgtctatgcaatattttgagataaaaaaaagtgcaaacaaaataaataaaaaagcttgtttcaaataaacactttaggaatgacgcttacatttttaagtggcaactttgtgaatcggcaaaagataaggaggcaaattctgctaacaaatttgaaaaatcaaatttgcccccttatccactaccaatttacaaaattggcaaaggatatgcaacataacttcttggggtaatatctccagaaagtggcaataacattttttaatcgtagagaggagaagtgggaggctaaagagactaaacgagaccatagggtttttataagatggggaaaatttagggttttgatttgttcaaattttattagttataaaaataaactaaaaatcaaaaggatcccgtgtaaaaggggaagcaaatataaaaatatttttaatatttgatttctatattccgatttcagttttccaagtttccttacatgaataccaattaaaaccgagtttctattttcttcgagtgatttgccacaactataaaactttttaaaaaaaaaatactcaaaatactattaacgatttgttaaaaccaaacttgtgcttgctagcttatgcgagagagagaggctttgtgtggtcgtcattgaccacgtctcttgcaatttatttgtatgttcgaagaaaatgtcattaaatgtaaaaaaatagtctcaaacgacggcaaaaagtctctctccattgagtatcctctacggttcttgaattggtttggatacatatttcgtgtatgaaaactgaggcgtatcaaggctatggagaatttaaatcataagtgggatcgttgttcctcttctcatcaaactcctctttctttcaaaggcaatcagaagcaggtttgttgattaattttcgagattctttgttatagcgtagagaaaatgtcaatctttgacattttaatatgttgctatactttggatctttttttacttgctgtgtacacttgaattctcaaattctttgtagattggacaaggtcagagagaagtgttcacacattttgtgtcacttccattagccatataccctgacttgacgaaaaatatcgaggcttttcagaattctgtattgggaaacaatgataaggatccattgaagtttcagagtactttagctggtaagatcacaaaccaaataaagaaatgttttaagtgtagaacatgtttctatgacatgtttttggatattggacagaaatgggaatagaaaaatcgatctttgtaactcccaaaactttccatttgactgtggttatgttaaagttagagaacaatgaatctgtggttaaagctcagaatatccttcaggtataagtgattcctattctaagagacatagtgtacttgttcttcttcttaggattgctttgatgattgaggtgttgtctttttctgaaaagcagagtattttttctaatgtgaggcaagctttgaaaaacagacctgtcttcataagactcagaggattggtaattgctacaatttctagtggcttgaaacataatctttgaatcaatcccaatggttttttgtcttgttaaggaatgtatgagtggatctttagacaaaactcgcgttctctatgctcctgttgaagaagttggtcgtgagggccgcctgctaaatgcttgtcgtatcctaatttctctaagcgcttatttttacttgtgtgaagacatgacttcaaattactatgcaagtgcttctgaactctttaactctctagtttagatgttatcattgatgcatttgagaatgttggatttgctggtaaagatgcaaagtcacgcttgaaggtaatgcttgtcacttttctgttgtttacgtctttgactaggacaaagaaaaagatggatataacaatgtttcagcttctccttcatgcttgttccttatttgcagctacacgccacgttgatgaatgcaagctacagaaaagataaaagcaaaaagatggatacttttgatgctcgagagatacacaaagagtttgagaacaaggattggggaacatatctaatcagagaagctcacatctcacaacgttataagtatgaccccaatggctacttccattgctgcgcttcactaccttttccacataagtgacattgacaacgatcaaatctcctccacatgatttgcattaggaaaattaatgtcaaaacttaggtaagtatggtatgtcactgtgtaactgtttttatatgtgtgtgtcacagcgattggtaactatgtgttgtgtaacttttgtttgtaagttaagttttggacagtaatattcttccttccgatgattggattagaaaattcgtgaaaagtgtttgattttgtattatttctgtttatatcgcatgttacttcttttggtaattttgtagaattgatggtgtattagggtttacgagtagatgttttctagaaacaaaagtatttctcctaatgtgaggcaagctttgaataaccaacccatcttcataagacgcatccttgagttatacatatttagtggcttgaatcatctttgactttgattatctatccaacttttaattcctaaaacatagagattcataataaatctgtaactttaattcgtctctttaccaattgaatgccaaatctagatagatcaaaaagcgaaccagctctttctagacgaataagctctttaaactctgtcgtatgtgttgtttcataggacctttcatctttttcttcttctcataattagttaccagtggcaaaaagggaaaagtctaaaaggaactctagagtgaatttagtatgcaattaaataaatcatttactagataagggtttgattacaaaccttaggataaatatttgattgtatctcaaagtataagaaatgtgtcaagcagattctgtgttttttttgtttcgattaaaaccgctaaaaccttgacaaggttgtctccacaaacaatattcatatcaatctcaaagaatgcaacatgcaaaatgttgtgcatattgtttgtggaggaccaccatcgtaagaggatttatgtaacataacttaaaagaaagtggctatatataactttttttgaaacctttttctacaaacaccttggatgttctttaaataagatgaaaaggctattattctaatgaacaacatgaagccaaaagaaaatccaaggcgtttgcagaaagaggttataaaaggctccgaaatatttcatccgaaccataaacttgttaacacacctaaagaacaatgatgcagtaatgggaatgaatacacacgtccatttgactgctgtgatggaaaggattttataaggtgagaaatttttagggttttgattttgaataacttaattagttttctaaaaattgaactaaaaaatcaaaacaaaatccgaaaggaggggaagtaaatatttctttcgaaatttgtggagatctatatttcccttttcaatactttgatctcgcttttttttttttgaaagtatacggtcaaatatataattttctaaacgtaatggggtttagcagcaaatagtcgtaaatactggcggaagaaaatgatattttacggctgaatcatcaccggagaatgagaggaagatgttcgcttacaggactctgtttaggttcgttttctcttcaaaaaaaaattgattctttcttctgaattctatgatcttttatcaatctaacaaaacccaaaattttattttcttccttgcgatggttggattagaaaaatcgtttgattttgtcttatttcttctgtttatgtctcatgttgtttgttttgtaggattgaccgtgtatttgggtttacgagtagatgttttcaatcgaaaccggtaattcaataatttgttgtctccttggcattttgttactctagtttttggcaagtgttagtctttgtaagtgatttgagattttttttcgtggaatttggatttgatgttttgtggctacaccacttcacatttcaggaatcttttagtatcctgagctttaggggaagtgagaagagtgccatggatggatataagaagcagaagatggtaaatttagtgtggagacccatctccactcaaacctcttcagttattgctggttaggatctttaatttagcagtttaatcgaatattccatcccggttttgaaagtttccacctttatggctttcacatgatgagacagaagctggaaatgaagtccaagaagtagctcagtgtagcaaatcaagtgatgtttctaaggaagttattgaaggagagacagcttcagttgtttcagctggaaagcattcagtttctcttgaggttctttgttccttctgttacttgaagtttctttgtgctcttttgtttcaactacttaacagactttatgtaattggtttcaggttggggcttctttgattaagttcattagagggaaagagtaagagctctagtttgttaatcttatccttcgaggtatacttacgtgctaacgggtttgcattctttgcaaaagaggaacgacgcagatgaaacttgaagaggaaatgggagtgaagatcattcttccatcatcaaggaacaaagatcatatcagtaagagtttttggaaccaactgtaatgtatagtttgatatctgagcccttaatcctagctggctgactagctaccatttttaaactgattttggttcaccaaatcttgttttgttgtgtccttttttctttgcaggcattgaaggcggttcagtggattgtgtgactaaagcttcaaaaagaatagcaaccattatcgatgaggtcccttgtcgtttccttttgaacttttattatcatactcggctttttattttccttcttgttctacttatttcgttctgattgtgcgctttggaattcatattctaggttgtaaggagtccaagtctcgactactcacactttgtatcacttccattagccatacatcctgagttagtggacaagctagtgaattttcagaattctatcctcgggatccatagcatagctagtgataagcaagacgaccaagctaatagagcaaccacaagtgtggcagttgatctaaaagctaatagtgaaacaaaccaggtcaatgtgggtatcaagagcataccaattgtcagttacccgcctaaggccaaatcaaagtcatctactttattgggtaagaaaatactgaagtcgtttgatttgatctaagaaagaagataaagtgttccctctgatatgctcagtaactttttatacattgacagacttaggaattgaaaagtccatatttattaagccaagtacttttcacttgactgtggttatgctgaagttatggaacaaagatcgtgtcaatgcagcgtgtgatgttctgaaggtaatttctttctgaagagatgtcattcatttattaggaatgcttaatgaaactgagttttctctattctacaatccagagtatatttcctagtgtgatggatgctttggataacaaaccagtattcattagacttaaaggattggtaagatgatacatccttagctttagttttacaattcatttatgtacttggtcagcttatttctattcactcatctgtcatgttgcttatttgctatattcttaaggattgtatgagaggaccattagacaagactcgtgttctctatgctcctgttgaagaaattggtgatgaaggccggcttttacgtgcttgtcgtatcctagattttagtacgaatgttatttatagtagtggcatggttagaccgttaaattaagagtttagtgtaaatgctttcgattttcttaataccaagttcagaagttattactgatgcatttgtgaaagctgggcttgttctcgagaaagatgcaaagcaaagcttgaaggtaaaagctttctgagtatgacgagattgttgcagtcacttaacgttagccaaaggctcagaactaatggaattggaagtagtgaatcgtgcttctgtttcatactttttcctttctttgcagctgcatgtgaccgtgatgaatgcgaggcacaggaaaaggaggtgattgattcccaactccagacttatgtttagataaagaaaacaatgttacaaacctctgattatctgaaaacccttttggtctcagaaagaacaataagaagaagatggagacgtttgatgcaagagagatacacaaacagtttggaaacgaagactggggagaatatctgatccaagaagctcatctctcacagcgttttgtgttcgaccagaacggttattaccgttgctgtggttcaataccatttccaggagaacagagagcctgagaagaatcatctaaccagcggccacagtctcaaatctcaagcatcttcacaggttttggtcccgtggtatgagcacttacaactttgagaagagaacctgataaaattgtaaagttgtaccggtcatcttgtgttaaccaaatagttgtcttcggtttggttctttcttggtctttgttcaataaaccgagccaaaacgttcttgtactctttctacaaggtaataaaaaggttcttagtacatttaatagaaaaatgattatttacagctttattagaggctattgattgatttagtaatgaactaataatgcaagtcaacagatctaaaattggaaagattattggcaatggaggcaggacaacgaaaatcaagcatattaaactctttaagattcgtataattccaccggcctaaccaaatctctaagcaattgttgtttatgtattataatatagttcaccatctatttaagcttaaacgagtgtctaatacatagacgtatatgacaattaattaatgatccgatccaaacgacccttggcgtatttggtaaggtagcagtgatgtgcttaattattaaccaacgatgtactgagtttctagaattagtaagaaccataagagttttaaaaagtgtaaaacgtaaaacatcaacacatgtcattccagttaacatacatatatctatatatatgttaacgtgtttgcataatttttttaattagagaaaaacagcacactatgcaaaagatcgttcatatatctaacgtgtgatttaatcgatctaacaactttttattcccttttatattaccaaaatatttatttccattgatcatatatttgaagtagcaaaaattggtaaaattttagttaaaaatgagggagatgaaaactgatatattatgtaaatctcaagtttttgtaatgcataagaaaaatgttatcaccattgcaactatccatggtagcaaccgtatatctcagcatatgatacaaaaaaaaaacaagaagaagctcatattcaaatttcttacgttcaaacgaataacttgattgctaaacaacaaatctagatagcattggattcatcagtaagagttaaaatcgtacagcattgtgaatcataaaatgttgtacaagattgtgaaataacaaataatattgtaaatttatcaaaaaaaaaggggattgtggatcaatgaatatgatggagaatgttcatagaagaggtaaataatagagggacccaaaataacattgttgaaatggaatataatcataaatgagtcacatcttcaaaatctgatcaaatcacttggaaaaaaaaagatcaagtcacatgcaaccagtaaccacaatcatattttggccggtctatcaccatacacattgtttacagctcacacttgtccctccttatatttgttcgtatccatttgttttcttctctctctactctaatctcatctttatgtttatccctttttgaattttgaagctactctgtcctttgggtccaccctccaccacctctaatttcaatcacgttaaaccggccatattactttaaaccgaccgttttctactaataggaaaatccgacccaaatttttgactaattataagacataccgccgctataccatgatattgtcaaagaaaaagtttctaaccaataaccactatagactaaaagatttcaaataatttgattgatactgcattgaacattctacaattctacttatattgtgtagttcaaataatgagaacatatcggaaagactagccgctattagattatgaatgcgtatgaatacattatacattatagtatatatatatatatatacacatatattaaaatgtattactatataataatttgtcttagtatagtactcaaagaaatagagttttcttacgtagatgtcatatattttagtcattttaggcaccttcctaactcaaatcacgaatagaacttatgtagcaaaatgtaaacacatgaaatcatttattaattcgggtccaacgtaacccaccacaccacagaaactcattaaatagtatttttttataaaacttaagttatatgcatggatacatgaacgatactcctatataaagagaacagcattcaaaaggtcttatcatcttcttcactaaacaaaaaaaaacccttcaaaacatttccttattctttcttcttcatctacaacaatggctggagttgcctttggttcctttgatgattcattcagcttggcttctctaagagcttacctcgctgagttcatctccactttactctttgttttcgctggtgttggctctgccattgcctacggttcgtatactcgtagttaaataatgggatctaaataattttcgtaatttgtaaaaattaatgggttcaatacttaatgaatgtgtcacatttgtgtatatagcaaagctgacgtcggacgctgctcttgatacaccgggactagtggccatcgcggtttgtcatggttttgctctcttcgtggccgttgcaatcggagccaacatctccggtggccatgtgaacccagccgtcacttttggtcttgctgtcggtggtcaaatcacagtcatcaccggagttttctactggatcgctcagcttctcggctccaccgccgcttgtttcctccttaaatacgtcaccggtggattggtatgttctcatcacctttacttactttctcgtaaaataaagagaatcatagtataggtctacaaaacaacaaaaataaaataatacagaataaaggtatttaaggacaatcttaacttgattgaaaactaggttacaaatttataacatagtttacaaagtccaacaaccaataatattctccatgttttaatatatagttgacacatgatttgtatgtttttggacaaacgacacatgattttgtttaaaagtgaagttatagaatattgtagggttttttctatttcaagctagcattttatactgtaggtttcatttcgcactagtaggcaaattctggaggcattttaattaataaaaactaatgaacgagcgctaaaactattgaaaacgcaggcggttccaacccacagcgttgcggctggactaggatcgatagaaggagtagtgatggagatcatcatcaccttcgctttggtctacactgtctacgccaccgccgctgatcccaagaagggttctctcggaaccatcgctcctctcgccattggtcttatcgttggtgccaacatcctcgccgccggtccattctccggtggatccatgaacccagcacgttcctttggaccagctgttgctgccggagacttctctggtcactgggtctactgggttggaccactcatcggtggtggacttgccggacttatctacggaaatgtcttcatgggttcttccgaacatgttcctcttgcttctgctgatttctaaggaaacaagtgatgattcttgattcatgtttctgtgtttggttactttgcctcgatctttcttgttttgtttggagtttggtccggtttcgttgtaatttttatccaatttgtatgaatattatttaatggatggctgttttggttataaattaactaatggatgtatgaatatatagtttcacctaaataggtagttgtaatgttgtatagctaattatcgatccatatatataaaaaatagatcgttacaattttatgatatagtaacaactaacaacaatgacaaattaatggatggtttcaagtagaagtttcgagatcatcgtcattaggtatattcttagggatgttccactcatgagctttccactctggcaattgttgtatgacaacctatgcaataatttattaatatcaataaatcacatgcatgtatagaaaaaaatgaagattatatattatagacagagaaaaagagaggttatatattattaccaatccggtagaatctggatttcccacgttggtttgacaagctagtctccaattttttggtttctgtgaaaacattattcgattttactcccataaccaagatgatacaagattactaaatactataggataatttcttaaataaaactatacccttttgagtttctccttctcaatatcagttcgcggatttagaagctcctttccatttacaatctgaaaagaaatatccatcaatatctcataaaccatcatttgactgtttaatttagcttattgactatatataagagagagatatgtatacctcgaccatgcaagtagcgcaagttcctactcctgcgcagtttgacaaaggcttactctgcgaattaatgagacgttgacatatactccaaagtccaaactaactagattagattaagagaaaaaatcaaaccgagggagagaaaatatcatacataaggaccatagagttcgatgttagaatccaacattatgtctcttagtttctgtccaccgttcgctcttctccaatgtacgtccggtgtcccgtccggcaacaacaccgactaataatcaacattattaccaattaataaaatttattattaatccatccaaaattcacctcaacatttttaaacagcacaacgacttatttgattaaaaaccattattaatcaatatacaattttatctaatcactctagattacctacttttccacgattattattcatccttgttaccaatgtagctaatgataagagtgtagataatctgtcaagagtaaagatcccttacatggacgaacgcaaaatcgacagcaggaggttcgtcgggctcatcagcggctggaggctggctcgctggtgcggtgcttatggctcggacggttttggttcttgcggcattgtgttttgagcgaaagaagtacgaatttggcttattaagtttggtcttgtggctaaagctatgatttggaggtagagaagctactaggccggaaccactcaactgtacacttcccatagtcttgttcttcttttttaaacaataagatattaaacagaaccaaaaaaaaaggttgggtccttaattgggataatgttttatatgccatgaggtttctgtggaggcgagtggtgcctctttttatctcttatccaatgtgtgtatgcgccggtttagtctattgactaaccaaattaaattagttaatagaaacgttgaaacgttttcccccgtatataggaaaaatattggggttgaaccttcgtattcactcctttaatttaaatcaataattttgagaaaacaaaatttgtagatttttaattaaataaagttaattatctgtagaatttgaactttataatcaaacgaaattatatatcggttttgagtttatatatatgaattaggttttagattttacaattaaataaaattttatattggtttgggattacaaatgtggattagggttttgattttacaattaaataaaacttatgtcggtttaataagtgttatggcattagttacttggtctatgaccagaccaccctaatgttgtgtcctggcgacgatgaaactggaccggcttgcatctatattgtcacgggagattttttcaagaagattcaaattggttttggtttctggtgttttcattgtgtttattctcccagttttgtcctagttcctttaggttaagattgcaagtctaataattttatcacattttcttgaactttgttcatgtctctgttttcttagtcttaagtcagtttgtctaaaattttcttgatgataaaaatatagacttacgatctccaacattgttgatcaacacactttcactttgaacttaaccaaaaaggtttgtcaccattgagtaaaaatgttacaaaatatatacgtaagtaatgtaagagttgtgaataataaggtgtagttgacatttgatgggccggaaatgtaatacaaaggcccatgggctaaattgacaatttcattaaaaaaatcgatcctcgaaggagaagactctgagaaaaaaaaaacgggaagaagcttgagcttgtcactcactagcttgaggaaaaatgttaacttcatcaatgcctcaaaacctaagccttttcggattttctcctctcaagtcttcttcgttcgctcttattctcagacccttttctctctacccaccaatcttcgcttcttcttctccggctccgagtcgtcgtcctcctcgcaccgccggttaccgtcgcagtggcccttctcctccgagacgcaaatggagtagtttcgaggagcagaagagaaaaggtaggtctccgatggagaaagataaagctattagctttaatcactcttctgattctttcgagtttaataagagaagagctgagggattggataaggtcgataagcctaagaagaatctcaagaggaatactcgcacccttaaccctaccaataccatcgcctatgttcaggtttcaatttcatatctactccaatcttaaactgtgaaagatgatgcataattttgaactattcatctgttttgttagatccttgggactggaatggatacacaggatacgtcaccttctgtattactcttctttgacaaacaaagattcatctttaatgctggagaggtaagtttttctgcaattttattataaagtgtgtagctttttgttagtgttttattggttaaagaattgaattgcaggggttgcaacgtttttgtactgaacataaaattaagttatcaaaggtgtgaccaaacttcttcttttggacttactactacttgtgtctgtgatgagacgagtttaatatgtgatgattcgcttaactcttttcaggtagatcatatatttttgtctcgtgtgtgctcagagacagcaggcgggcttccaggtttgttttcttttgatttaggcatcagctgcattgtgtttgctgctagatcattagacagtgataagtgttgttcctattttaaatgctttaggtcttctactgaccctagctggtatcggggaacaaggactatccgtgagtgttcttctcatatgatctctttgtatgtttcctgtctgcttttcctgagcttatgacaattattatatgagtggaattgctcaacttctaaaatctcttttgttacaaaggtcaacgtatggggtccttcagatcttaagtatttggttgatgctatgaggtcatttatccctcgtgctgccatggttcatacaagaagttttggtccatcattgaatatatctgactctgcgcctcagattggcttaagtaaacccaaagatgatgcctatgttcttgtggatgacgaagttgtgaaaatatccgccattctcctagaaccaagtcgcttagaggaatctggcagcaaacctggtgaaacagcagttatatatgtatgtgaattacctgaaatcaaaggaaagtttgatccaaagaaggccatggctcttggattgagagctggtccaaagtacagttatcttcagtctggacagtcagtcaagtcagattttaaagatattacggtatgtctcaaagagcaatcattgggaatcttcacaacccaatatcagtttctatacaagcagactaacactgttcacgcttaatcataggttcatccgagtgatgtgatgggaccttcagttcctggtcctgttgttttgcttgtggattgtccaacagagtcacatgccgaggaactgctatctatcccgtctatgaagacttattattcatgtcttgacaattcaacagatggagctaagcttgttaattgtattattcatctaagtccagcttctgtaacaaatagttctacataccgaagctggatgaagagattccattctgcccagcacattctcgctggacatgaagcgtgagtcttctcaactatggttctttctcataaaagaactgttgaatttatttgtctgatatgtagttttggtgtttgtccaggaagaatatggagtttccaatcctgagagccagttctagaatcacagccagacttaactatttatgtccacagttcttcccagctcctggattttggtctcatcaacatgataataactcgataaaccccacttctttgagcaaggttacaaacgcttttctgatattttctttttgagttgaatctggctgtgttcatttagtcaagttgtgttcttttcttctcttgtcagtgcttcgattcgaatcttggtgaaagcatttctgctgaaaatctcctcaaggtattgaatgttgcttcagtgcatcattccatatgaaacttcctttctttagctcttaagtctctcgctttctctcattgatatattgtgggcagttcactttgcgtccacatggtaatcttggggtagacagatctagtatccctagtcgattaacagctttacgagtgatggatgagcttctttcagaaattcctgaaatcagcagtaagaccgaagaaatcaagcagttatggaatggacaacacaacaagatgatgatcgaagagccatggctgggtgaaagcactgttccaagctgtcttgaaaacattagaagagacgacatggagatagttcttttgggcactggttcctcccaaccctcaaaataccgaaatgtcacggcaatttacatcgacctattctctagaggcagtattctcttggattgtggggaaggtaccttaggccagcttaaacgaagatatggtttagaaggagctgatgaagcagtcagaaacttgagatgtatatggatctctcacatccatgctgatcaccatacgggtcttgcaagaatccttgctcgcagacgtgagcttttgaaaggattggctcatgagccagcaattgtggttggaccgagatcgcttaagaactttctcgatgcatatcaaagacttgaggatttagatatggagtttctcgactgcaggaacaccacaacaacatcttgggcttctgtagaaaccagccgccctgagaaaaataccagtagcggcaatgcagagggttctttgttcagtaaaggaagtctaatgcagagtatatataaaagaccgagcagcccactgacagacaattcttcagctttaccattcttgaagaaactgaaaaaagtcctcggcgaaatggggttggagcatttgattagctttcctgttgtgcattgccctcaagcctttggggtttcgttaaaagcagcagaaagaaaaaacattgccggagatgagattccggggtggaaaatggtttactcgggagacacaaggccttgtcctgagatggttgaagcttcaaaaggagcaacagttcttatacatgaggtgcttttctatataagcaaaactgtgtaaaacatttacatctcattcttaaaatttaccatcttttcaaacttataacaggcgacgtttgaggatgcgttggtagaagaagctgtggctaaaaaccatagcacaactaaagaagcaatcaaagttggatcttcagcaggtgtataccgaaccgtactgacacattttagccagagatacccaaagatcccggtgattgacgaatcacatatgcacaatacatgcattgcctttgatatgatgagtataaacatggcggatttacatgtgcttccaaagattttaccttacttcaaaactctattcagaaaccaagtggttgaagaagaagaagaagaagaagagactgatgatgatagcttaatacgtgacaaagtcccaagctttttcatcaattagtatatagattagaatgttctgttttgtcccctgtttttgactgtgttgtattgtctttagaaataatatcaatttaattgatttttcctgtgagtgtgacagaggaaataaatcagtttcatgtgcataatgtgaattgtgaaaaagaaattaaaaaaaatcggaactttgggaaataaggaaagacaccgaagaacacacaaccattcctctttattgaccgcttccttctttctctgtcacatacgaatcggtgagtttttttcttctcaatttctccgttctctgctgatttctccgaggttattgattcgattccgcttgacgcatgattgtgttgtctcaagggtctaattttacctccgcgttgattggtttataggggaaatttggatcccgatcgtgatctttagtttggtgaatttgagctggaattggagcttaaaggatcggttttttgactgatctaattgttttgaggatcggtctttcataaagttgttgtctttgaagcttttttgactggtgaggacgaaaaagttgtgattttgggaattagggttgttttgtttcgaattcgccatggatacgagcaggagagctgtggaatcgtattggaggtcgcggatgatagatgcggttacgtctgatgaggacaaagttgcgcctgtgtacaaattggaagagatctgtgacctccttcgttcttctcatgtcagcatcgtcaaggagttttctgaattcattttgaaacgtcttgataacaaaagccccattgttaagcagaaggtattttcaattacgtttgttttctgtttttgattgtgaaatgttgttcctttgtgagacatttgttttccatgaagattttgattgaaatgtttgcatgtcgggattgatttagattgtaggtagatgtttgttttttcttagaatggatcaaagagaaagctttatgtgtttgattatagcgtagagtttgtttatagggagacgtagaatggatcttattgtggctaaaagctctgtaggaactggttatactgattttggttattatatgtatatacaggctcttaggttgataaagtatgctgtgggaaagtctggctcagagtttagacgagaaatgcaaaggaattcggttgcagtgcgcaatctattccattacaaggggcatccagatcctttaaaaggagatgcacttaataaggctgtacgggaaactgctcatgaaacaatttctgctatattctcagaagagaatggtactaaaccagctgctcctgaaagcatcaacagacgcattgaaggattcgggaatactaactttcaggtgccctctaatgataataaatcgttccttagtgaggtggtgggtattggaagtgcatctataaagcaaggaatcagtaattttgctcaaggccatttgccaaagaagaatgagaatggcagcagcagctacagaggtccaaatctccacagatcattaactatggaaaatgagaacttcagtagatatgatccagttaagctggggaaggatggtaactacggaacgtctaagaacacgactggtggatcttggggccacgcttccggagaagcaagtgaaagttctgcttcagttcgtgttgagagcaaaactcgtgaggaaaagctgctggaaaccattgttacatctggtggtgtacgcctgcagccaactcgtgatgctcttcatgttttcattttagaggctgcaaaaatggacgctgttgctttaagcattgctcttgacgggaagctccattctccaatgtggcaggtatgtttatgattatttcctagtcacctccttgtgaaactgtttgatgctactaatgtacttttttcttgattatatcatctgtattttcttttccctggcttgtttcttctgtagcgttaatcttcccacttttgtactttgaaagtaactgtgtttttctgtttggcaggttcggatgaaagctttatgtgtccttgaggccattttgaggaagaaggaagatgagaatttttcaattgtacatacctattttagtgaaaacttggatgccatacagcggtgcgcagagtctccacaatcttcccttcgagaaaaggcgaacaaggtaagcttctgcttgttataaccattcacaaaactcttttttggcattatgctaatttgttggttaactcgagataccgatgttgtgtaggttctgagccttctaaatggtggacagtcaagtgggttgatgagcagctctgataatactgtgaagcgagaggctgctgttgatttacctgacttgattgacaccggtgattcagacgatactttgaacaatctgaatgctatagatactggcagtacagtggcgacagcaggtccattgatggatgatgattggtttggggatagctctgacattggactgagtagcagcgagaagaaaactgatgacgacccctttgcagatgtctcatttcatccgaatgaagaaaaagaaagtgcagatgacctcttctctggaatgactgtcggggaaaagtccgctgctgttggtggtaatcatgtgcctgatctatttgatatgtttgggtcaactgcaaaacttgaagcagagccaaaagatgcaaaaaacattaatgatttgatgggaagtttctccattgacgaaaacaattcaaatcagaaaggctcgtcttcaagcactcttccacaggatttatttgcaatgccgagcaccaccagccaccaagcaccggaaaatcctgttggaggcattcttggctcacaaaatcctgggtttattcaaaacacaatgcttcctggaggtgttatgccattcaattttcctcaagggatgatgatgaatccagcttttgcatcccaacctttgaattacgctgccatggcaagcttgttagctcagcagcagcagtaccttggtaatatgtccaacttccagcagttcggcaatctgaacgctcagggtagcggaaatgttctttctatgggtacaagtggagggaatcagtccgcactccctgatatattccagccaaattttggtaatcaggctccaacctcaacaatgaatggttcgaaaaaagaagataccagagccttcgatttcatttctgtaagttttgccatcttgctcctgatctttgattctaaagtttggtcaatctgccatttgtctttgtacatgtgacatcaaatctcacacacataatgtctagctcgattaaaaccacctaaacatagtcagactagatctacttttgtggcatagttaaaaaaccttcgtttgatgtacatacactcatggagcaactacataaatgtttgtgtgatgcaggatcatcttacatcagcccgcgacacaaagagagtatcttgatggttgcttacaaaattccgccttccagtgttaaatgctatttcatgagatgtggacacaagggtgcaggaagctaaaacattaatttatgagagctgtatagacttgaggagaaaatggagatagctttataattcatatggtaagggtttttgcttcttttatctgtttcctcgttttgtctttggtttttcttcttctttggagtccattgttcttggcatgaacatgtagttgtagagttgctttttgtttgttactagatgtgtttattttgttccgttgctatatattatatctgaagagacttgtgtctgtgtatcgaacgtagacaagaaaggaaatgaaactgagaaaggaaatgcatatgaatagtttaaagacttcaagtcaagtccagttgtttttgcgtttcttaattagaaaattttgttgatggagaaaaacgaaagccagggataattttgtttaatcgtgatgtctgttacaatttggagtagttaataaaataaggtagatctaatctaagtggctgcaatgagctttttttttctcacacgttaaacttggtccatattctcagcattgcctgttatactggtttgctcattttaaattggcgttacttattttaggatacatccattggtcaagtgtttgcattggtgtagatattttcatacgataagaaagaaagaaagctaataatttctcaatctatttaggtgaaactattcagagtttgattaatgagagaaaaaggaaatgatgcccctttattttcttacctgaagtttaataagaatgcatcttttgtgtactttctaccaacggtaaagattgaaaaaaatggtggaagttacttttcttatctttttaaaaagtggtaacgggaaaatgacgagtgacatcctcattacataaatccaattaataagattttgaggttcccatactgtgtaaatataaaaataaagaatgaataaaaatacctcaacgggcagattgatagtgacatatggaagtaactttagactctccaagtctctctcaaataggaaacgaaggagacattgagattattttttagaaagttaataaacgatctcttctgtaaatcttttctttttacattctctgcatcttttatgcttctttgttggcaaatccatcctcagttttatttcgtttaaaaaattatcaatatggtcaaatgtatattacatataataggtgtagatatattttttttttttttggatttttataaaatcttcatgataattgaaagatgggtaggctaaatgtcacttaaaatggagcgtctaatttcattagtcaaattaagtatttattttctttgatagtttgacacatttccaccaaattaattagcctttgaaataagaaatagtatgcttgttgacaaaaattaaaagaaagaaatagtctaattccacccaaaacaaagaacaatcaaaataatctaaaaacaagaacacaataataatagtatgcagttgtaaaatcaaaatcacaatttactcatatgtatatggaaaaaaataaaaaaaatactatacagttttaagagtctaatttggtacgattgacggttgtaataattactattgattctcacatccaaaaaccagaaaaaaaacgtgttatgtttttatactaaaagaaagtttattaaaaaaaaaaacctcagaatcaaagctctctcattagcactttagcagtcagtctataaatacatgtctcacatccacacaaaaagaagaagtaagtatcaaacgagagtacaaaagatgacgtcactcaacagctctgcatcaccaacatcatcgtcatcagaccaatctgatgcaactactacaacaagcacccacttgtctgaagaagaagctccacccagaaacaacaacacaagaaagagaaggagagattcttcttctgcttcttcatcttcttcaatgcaacatcctgtttacagaggtgtgcggatgagaagttggggcaaatgggtctccgagatccgacaacctcgtaagaaaactcgtatttggctcggcacttttgtcaccgctgatatggctgctcgtgctcacgacgtcgctgctctcaccatcaaaggctcctccgccgtcttaaatttccctgagcttgcttctctcttccctcgtccggcgtcatcatcgccgcatgatatccagacagccgccgcagaagccgccgccatggtggtcgaagaaaaactgttagagaaggatgaggctccggaggccccaccttcgtcggaatcttcttacgtggcggcggagtcagaggatgaggagaggttggagaaaattgtggagctgcctaacattgaagaaggaagttatgacgagagtgtgacatcacgtgctgatctggcttattctgagccgttcgattgttgggtgtatcctccggttatggatttttatgaagaaatatcggagtttaatttcgtggaattgtggagctttaatcactaattaagttaggaaagtgcattatattgcaatattgcatcatagataacatttgtatttcttttctttttgtacggatacgtagcatatgctactatactagggctagtgtaccaaatattgtaaaatatacttattaatatttatgtaaatgtgtaatatatataacatacaattattgtaagtttggaaattggaaactatcgttacgcaatgttcttgtacttgtgaatcacaacaaacaaaaatgttatttaactcttcttaaacgtataaattcctaaaagagtcaatggtcattctttgtttcttctcaccagtcaataaccctcttctccaatgctgactataattgattttaaattgttacaattattgtgaagaaaatagttggaatctatgacaagttgacattattctataactacattccaatttacaagattgaagattattaatctaggtatgtcgattagataattccagaagcaagaaatttatattatagttaggtaactgtaggagtttaggttggaacaaaatttgtaatgatcaaatatgagaatgcattatagaacactctaaaaataattcaaatgaggtacaccgtccaatcttttttacttatttaatattttgactaattatatcttcttcttttttttttgtgcaccaacattactaatagaatatagtttatgtttgcaaaaaaataacattgcttctgctgtgaaaaacgtttacagtataaccaacataaaatcactgtggataaaatgaaattcctttatttcgaccaacataagtacagaacattaacggtcacgtacttttgttttgtgttttggtcacgggttcatccttattataattcatattaaattccactaattcgtttgtttttatcaaactagttaaacttttgccaacaaaccgaaaagatcaatattcaaagaagaaaaatgcatttgaatttttaataaaaggtggagttacagttcagattccatagtcacatagctctttattttgaaactgttacgtgatttttagtcttcttaaacacgggttttgtttatttctttaatatttgagtgtgtttaattttagcttaaatatagtatttaactgaatatgagtagagatggtggtgtgggaacgagcaagtcaaatactgccgttgtggacctcttttcttgttgtcaaattcttttgacgaattcaatttttattttttttaccgttgtttaagaagattaataattttggacactttatatgagacaagaacccaaagaaatcgtattgaacctatatccagattataaaatatgagaaaactatttttaacatattaatttctgtagtgctttgataaaattcaaataaacgacttttatcattaataacagtgaagtgaattgtatagaacaattatgtacgtaagagttttaaataataaaattagaaaatcggttgggtatttcgattttttagtaaacagtacatgatgatgagtcgggtgggttcaataatagagattaagccattaaggtggccaattaccaataaggaggttaagtaaatgatttggtaaacgggttaactaaaaataaaataaaaattggtaacacgtaaatatcatttagttgtcaaatcttgcaagtcaaatgttatctgctctgtaataataatcaaatagttgtatgtatatcgaccaacctaagcactcttgatttgattctcatcaatttgcaatttcacctaaatacctaacaaaaagaaaaatcatggattagcatgtgcccattgttcaatgtcttccaatttttatatatagcaaattaaaataatccacatgctccacataagttcatgacataaaaattcataatccttttttcaagatatgtgaaacaatttaaaattgactattgcttcaatatggataaaaagaagtgttatactatattgaagctcaaagaattatctaacatgtactattacaaagattacagaggaaatatagataaaggatcaacctcattgtctctataatgggtttttgatgtttattccctacgattgtcacgaactgtctcttttctccaaattacaatcatcttatgaactgtttcttgcggtagtcatgtccagtttcagcaccatctcttctagctcaagccgtttgatcttcctaagttcaaggatactcggtggcattggtttactggacccatagagctcaacaagagtgaagaattcttgtttcgttagacttttcttttgaaccagtttctctaccacctcgtccatgagcgtcctgtttcttccaagaatctggtgtatgcgtttgtaaatatatatttaacaagaccaatataaaggagatgctatgatatagatgtagttgatttagaagtctactttacctctttagcacgctcgtaacacatgttcaatatccgcaatgcctccacatcaatatcctgcaaatccatgtatcagaagatgatatctgttctctgaaaactgaagtgaaaacaatgtcaagatatggccttacgttaattcgatcagctacccagaagttattcaagccatgatgcttatcagaaagaccaccaagaaccaatgatcgagcagctgatcttgcgttatccgatgtttcagcccatatcgtgcttaactgtaacaaatcattagcaaaggttggtaaactaaaaaaaaatatgaccacagttattagagaagagtaaaatgatatatcatatctctcacctgatcctcaccgtaccatagttcatctgcagcacggggtgctaactgaacagtgatgtgatccaagatggattgtcgactacatatagtagaccaccaaaggacatatagattaacataaagaacccgtgtaatcatgaaagtaaatctgtatgatgaaagccacaaacctaagcatgccttccttaaatttgatatgatccatcttcacccggacataacccaattctctaccagctctagggttgattgtcagctggtcaaggtcatcgaaatgtcacggtgcggtaaaacagaaagttgaagcttcattcaatgtatgaaggggaaaagagatttaagaaacctacaaattctatattcttcatatcaggaaagttcactgctacaacagccattgcagcttcattgatcgcaacttgtcgccatgtctccaagctcctgtcttttctatctaacattcctctttcttctatttgtgcagcttgaagcaaatcatctgttgttaactgcattagagttacagaatatagatgatttctcagtcttttacttgctggaatcaaaaatagacttctaaacttaatattagcctaagcttcctatcgagcacaacatccaatcacttaatttaattcacacacaccatattaccagatgctacacgatcctaacatttgaaaccaaacccatccaaaaaacaagagcagatataactaatttgaactaaaaatattgatcccacctctgttcttccatcacgcatcatattaattgccgcgatctcaacaatattagcaagctctgctccaaccatgccatctgtcatgctagcaactgccatatagtctaaatcttcagccatcggcttcttacgagcatgaacctaaacagcaaaaccaaaacaaaaatataaatttggaccgaggacaaaactctacttttaacctcttttttttttgttgcaaatttacaagtttaagaatacataaacacagataccacgccgttacctgcagaatttccatccgtccaataagaccaggtttagggataaagattttgcggtcgaaccgtccaggcctcacaagcgcaggatcgagaatgtctggtctgtttgtggaagcaatggtgatgacctctccccttccttcaaaaccatctaaagaaacaagtagctgggacacaaaaaaatgaataaaattaccatcccgttatataacgaagaaaactattacacaatctgaaatgtctggaacctgattaagagtggcatccctttcttgtcctccagaaccctttattaacccacgctcccttccaacagcatccaattcatcaatgaagaccacagatggagcctgcagtgagaccaccttaaaattaacatccagtaatagactaaatcctcactataacaatgagaatcaacagaaaagaagccaagaggtactgcttgaatgatctcagaagcatccaaaagtgagaattaagttctacgatcaacacaggtatagaaagttattagacttacattttctctagcttcttggtataatgctcggacacgagatgcaccaacaccaacatatatttccacaaactgagaagcagagatagagaagaaattgactcctgcttcaccagctacagcttttgccagtaaagtttttccgaccccaggaggcccacataaaagaataccacctaaacgaaaacaaaattaaagaaatgatcaaacagcagaatttcatagatcatataacttaacatcaaatactaggtgatataaggaaaaacagaagttttcacaacattcaacctggaatcttgacccctctcctgcggtacatctctccatgagtaaaaaacttaacgatttcctcaagttcaagacgaatcttcccaagtccagcaacatctgtaaatttgacatccacacctctctcaagatactcaggtaacctcttatttgatgctcgtctcacacgtgcacctgacttcatgaactgcatcgccatctgtaagtaaggatttttctcacctgtaccttcctcaacctcctcatcctcttcctcaattccctccatctccctttccaactccctcattttcttcctctcatctgcttccgccttctcaatcttcaacctgtcttcataatccttcttttgcttcctatagttgagaaccaccacacggtaaaatatataaaagaataccaatccaagagcagtagccacattaggatcctgagccaatcttgcccacatatccgccatatctcgataatttttcctcgcctcacgcagagactcctcgtatttcttcttcctaacagccttccttttcttcctctcctgttgtttcttctgcgccttcattgtcttttccatcatcactctttcctctttcatcgtctcaatctcctccttcctctgcctcttgaaatcctccctcattctcttcaactcagcagcacgtttagactccttctttggcttaacccatgttaacatataagcaggaactttccacaaaaatcctaaataaggagacggcacaggaggtctcttaaccggaggagtataagcattaacacattgtacatcaatccctaactcatcccattgttcccaaaacctcttattaccctctaaagaaggcaacacagtccttaatactctagaatcctccaaaactactaacacaggctctgccttttgccgcaaacttaaattaggaggctttatcacatgcttaagcttaccttcagcttttaagctcaaaatgtcagtataaggtatacgattcgaaactacaggtaaatctttggaccaagctttaagctgttcaagtgtcaaagcctcctgaggtttcttctgagttctctttctctccgttaccttcgcagccgcgaacgacggtttggctagagaagcggagattatagtgagtgtgattggtattgcgagaagattgacttggtttgtcttggctttgtcgttatcatcaccatcttcatggacaacgttcgtagctgaattgttttggcatgagattgaagggtaatttctgggtagtctctgacgattttccggtgaaaggaattgagaaggtgacgaagaatgcagagggaaacgacaagccatgatgtgattcaattgaagtagagtgaatttaacttacatgaagaagtgaattgcaataaaccaagctagtcgagatagagtgatcgccattaaaacgtagcaatgagcttcatcatttcccaggctaaagggatagaagaaacagaacacagaacaatcgtaatataaaaaggcttcttaaagcccaataacaaaaacttaggccatttaactctaaaaaaggcattaagaagcccagacgctaaaaacgaatcgagacgcggaaaccggtctgtcagtgtcactcatgtatgtgtttgtcgcgggtgattttgaatattttttttgtcgtgtatatggaacatggtcaacaaaattcaaaacattgaaattcggtaatatcgattgaaacaatcaaattccaaaaagcaaccccataacgtaaatgattattgtaatgatgaaaaacttaattaacgacgagaagtacaagagggtaaaacagtaattaaatttttagcggtggcgtgagagatggagaacgtcgagaagtgaagaagcggcgaggaggagaaacgcgaataaggcgaagacgatggagccagcgagatggtcacagaagaaaccaagagatttgcagaaattaggaagaggcatgtgtctgattcctgttctgttcatattcgtcactcctaaagctgcagatcctccactcaccattgcgtatcctattatctgatctgcaacgaagcaaaaccatgcttgtgttcttgtcggaatcaccggagattttctcattagtcttgttccacttataatcagttgaatcaacgagtaaagaaccgttgccgatgaaaccacaactagatatctgtaaaagaaccgtcagtttcaaaagcaacgtggaatacatatcactggtgatgtcaaatttatgaaatatgcttacataagagaatctgagagagaccaaacggcgtggagctgaaactcgaagccatagagagtggtcatgctagtctcgcgtgctgttaccattaacgtaacagccaccgttgatacggccatgcacatggctcttagcacaaacatggccacgtcattgcgtttcccgccgccgtgacggttatcttcgccgtaagtgatggctgtgttgaccacgtcgcggatatcaagcttcgcttctgcactcgcaacggtcgggttttgtttctgctctgctgctttcgccattgtgagttactgagttttgtaatgtaatttacatgcgagaggggatatataaacacaacaggctagatacgtggctagttcctaatggagtttctaaaacactgcccgtgaggcttccatggaatcagtgtctttctttcaatcattcacgaggcatgactagtctgctcaaatacaaacaacaatgaaacggctaaaagaggagattttaataatcagatttataccaaatttttagccgtcgtcaatacaaaagacaatttgaaacacctcttacaatttttaattttgaccacgctctaagatttacttagccactctgctctcaaaaacttcaaactatgtgtaaagaagaatcattcgggaaatgccattgaagtagcttttaaacaccgaacatcaagtcaaagaactttgagaccattgactttgacggagaggccatagcgccaccacttggttgaggagagaaagcgctgccgttttgcaagtactgaggacgagacaggggtcgagcagtgtttctagtggatgatggtggaggtaaaggcatgaatccttggttgttgagtctctcgtttaacgcttgcttctgtattgggtctactggcttcactcctactattacaactccgtttatcatcatccctgctttgttcagcgccttatgtgcatcagaccggttctgtatcaaatacacagaccattgtcagttcgttgtttcctttatataaaagatttgattagactatcatgtatgatgactcgtctagaagaactatgaatgcttatcaacatgcatcaaacaggtttgaagggaagaacagtaacctggtagaggatgtgcatccagttggcatttcttggaccaggaacatgtttcaagaccataccacatttttcaaactcccgtagtactaaatttgtatcacctggagaaaatctgaaggcagttattatgatcagttcttaagattgaaaagatgggagataaacacaagataaggcacttaataacactaccagttattatccatgtaaagagtcagaattcacaatgatcaaaacataaaatcacaatcaaaggctgatatttgagcatcatgatggtaaagaacagcatttattatgaacagttctctaagattgaaacatgggagacagacacaagttaaggcacttaataacactacccagtaccaatataactgttatcatccatgtacctagaatttcagagacacgagaatgttgacaaatcaagaacatttgcaacagtaaagtgagaaaaacgagagcaataaagcttaaatggccttacccatagacagtgacccactcttcctcatcaaggtttcctgtaggtataatctgcctctgaacctctggcctagcaacttctcttggcggcggaagagtgaccaatgcacctggctgaaccaccccttctacaggagatcccttccctttatcatcctgctcggtactactacctgcctttgactgcgaccaccaactcggactccctgaaacttgctgactctgttgtgcattcagtagagaaaaagaagggcttgcttccaactttcctttaccaggagttacaatattctttccagaactctggaatggtgttcttctgtcagacttagcatctggagacgcagagtagtctgcaataccagactcaggagagaaatcggaccggtcatccaaagtatacattggaggtggtggaagatcagatcctccgaaattctcacgccatagtgcagataccgcagctgcctgtcccggactcgagaatttccctctacgtgctgaaacaggagaagctaaatcttgaaatagcagagattgcctccctgatttaggagtcctgtgtgctgcagcactcattttctactcaatagagttttatttatctccctgcaaagacaaaaaatcatatagctttgagcaaaattacataagaaagctaaaaaaacaaaaacaaatcaattttgcgactttaattcacttgggcaagatcaatattgaatcttgcgattgaaatcactaatctaagcttagctacgggtttctagaggattaatcgaaagaaaattgaggaaaaagttcaacaaaatcgcaagttactgggttttaaacgagaaggtagtaagattgacgccaatcatcgaagacagtacacaaataggagtaatcacactatctaatggatcgatggagagggagagagagagagcaaaccttgaggatgaaaatggaggtgtttgaatttcagctttaggaatcccggagaagctcaggtagagagctcaagggcgcggagggaaggtaagtgaaaccctagaaaccaagattctgaaaacgcaaaattcaagcgccttacgaaaaatgacgaaagtagccttgcatttgtacaatgggtttgaattgggcctatttggaaagttgttggcccagaaggtttcttcaacatataaaggaataaccatcaaaattctcaatccaacatggtgtaaaattaaatggttgtaacttgtaagctaatttgtgttattatttttttggtcaacaatacataaatatctagcatatacttaccaattagtatccttaaaatgtgagaattctattagcattaatgcaatatctctcatcttatccttaacttaatttaaagagattttgagtatgttttcacaaatacttttctaaaataagaagaaatactcaagttagaatacgtcatcgttttaatacaaaagatcgttttgaaaggtttaagagaaaattgccgcgtttttttatctaacggttatacaaaaagtcgtttagggtgtgaaaaaattatcgcgtttgttatttaacggtcacataaaagatcgttatgggaatattgaaaaaattgtcgcgtttgttacccaacgattttacaacaagcaattgcgtttaagatacattatagatgaatttccatagttataaattcaatgtttaagctatataatttcagttgcatatctaaatttggggcactctaatcttacttcatttgtgttctttgtctgaaacttgatttctattccagaacgcgattttttcttaaaacgccaaacgcggtccttgtcttgttgtctcgtccaccaaaaaaatctggggcactagtgtcacaaaaatcacacgctcgtcgcgtgagaaagttaggcttttgaaatactttagcggcgcgcgattacttaggcgacattacacacacagcctccgaggaacaacaacaacatcgattgtctcgtcaatttggtcatcatcatcatcagatgatggagaatctactggcgaattgtgtccagaaaaaccttaaccattttatgttcaccaatgctatcttcctttgcgaacttcttctcgcccaatttccatctgaggtatctcgatttcgattcttctatattcaactccatttcgattttcaaatcttagcttcgtctctttcgatcacatcatttttaagatgtggagtgacttttttcgttttctcagtttttgttgctcttgtggtctgatccgatcttctagtcgtagctgtcttttgttgtgtgactttttgagttgtttgcgaatagacaattctcgatttatgcggagttcaattctgggctttgtttttaaggatcaaactctatttcgattttgtcggaatctagaggatgcaattcaatttgactgaaatgtttatgattttgagttgattttgtgattttattccaaacctggaatttctaggttgagatttctgtttgatgtatgccaatgtcaattcagattgataccgttactcgaatttcacatcccttgatatatttttttggttatgtgaatctggtggtgatcaactacttcattatgcaggtgaacctgcaattgttagccaggtgttacttgagtaacagtcaagcttatagtgcatattatatccttaaaggtactctacattcttcggtactggtgctatatgtgaacatttcatatattgttttatttgtgtttggaaaaactaaacttgttttacattgtgaaatgaaggttcaaaaacgcctcagtctcggtatttatttgcattctcatgctttaagttggatcttcttggagaggctgaagctgcattgttgccctgtgaagattatgctgaagaagtatatggcattgcttttttacttcttttataaaaattctccatatccatgggcattgtacacatcttttgcaagctagtcttttgggagtgaaaattggcaagtgctgactagtgactactgtatttttgacatgcaggttcctggtggtgcagctgggcattatcttcttggtcttatatataggtgactgctaatttacttttcaagttctgtatgagatattggtgtctctcgcatgctttaatgtttagtacttctctgtgttggtatactgatgctgtaacaagcttagtagtttgctgcatatgttccattatctaagtttgatgtgtgttactctctgttacatgattgcagatattctgggaggaagaactgttcaatacaacagtttaggatggcattgtcatttgatccattgtgttgggaagcatatggagaactttgtagtttaggtaagtgaaacctctgtatgaattatgtatttatcagtttatgtttccgttattccagctggatatctagagcaacaaattcaattctctgcaatggcgttctgtgattaccttttcaggtgccgctgaagaagcctcaacagttttcgggaatgttgcttcccagcgtcttcagaaaacttgtgtagaacaaagaataagcttctcagaaggagcaaccatagaccagattacagattctgataaggccttaaaagatacaggtttatcgcaaacagaacacattccaggagagaaccaacaagatctgaaaattatgcagcagcctggagatattccaccaaatactgacaggcaacttagtacaaacggatgggacttgaacacaccttctccagtgcttttacaggtgatataattaagtcgagctagtatgagaacatattagttactagcttgaaatcctcagttattcaatgtctactatcttcttcaagagctatatttctttcataaggtaatgagaagtttgtaagctgttttccctatctttaagtatctttatcgttcaggtaatggatgctctaccgcctctgcttcttaagaatatgcgtcgtccagcagtggaaggatctttgatgtctgtacatggagtgcgtgtgcgtcgaagaaacttttttagtgaagaattgtcagcagaggttatatatctacaatgggctttgagtgatttcttccttgttttctttgcataagagttttcttattaatgcataggcgaagaatgatcatctatctagcactgcagatattttaagtttttaacatagagcttcccccaccttgtttctatcttctagctctatggctggaccatctaaagctacttgatttattggtcttcttttactttccttatcttgaaggctcaagaagaatctgggcgccgccgtagtgctagaatagcagcaaggaaaaagaatcctatgtcgcagtcatttggaaaagattcccattggttacatctttcaccttccgagtcaaactatgcaccttctctttcctcgatgattggaaaatgcagaatccaaagcagcaaagaaggtgatgttttactatcatatttttcttttctgtctcccaaaccggactatagagcctcaattggttgtaatttttgaaatggaaaaagttagatctctagttaaaattcatgatgtaataatataggtggcttaagtaatttacatgacaataagacttgaacatatatgtgcagtgattcctgataccgttactctaaatgatccagcaacgacgtcaggccagtctgtaagtgacattggaagctctgttgatgatgaggaaaagtcaaatcctagtgaatcttccccggatcgtttcagccttatttctggaatttcagaagtgctaagccttctgaaaattcttggagatggccacaggcatttacatatgtacaagtgtcaggtactttactaagacaatgtgtgtattgggttcatattcttcaacttgaattctctgcttaaaagttaaagtatcgatgtcgaagcctaaaatgacaaaaatggatactactgcaggaagctttgttggcatatcaaaagctatctcagaaacaatacaatacacactgggttctcatgcaggtgataatatgaatggctttttctttgctcctttttcattggaatgatcttatttggtcattgacgtcattttctaattccattttgttggtttttgacactgaaactaaaaaccatggatacattttgaaataggttggaaaagcatattttgagctacaagactacttcaacgctgactcttcctttactcttgctcatcaaaagtatccttatgctttggaaggaatggatacatactccactgttctttatgtgagctgttgtcactatttgcaaattttcctattattcattatgaacagtcccgaactaatcttgaacatgatgttgactctgaacattatcctgttgtgatatcagcatagagaacttgatttttgattgacctgcaaggatttctatgtaattgttttttacttttagtaatttcgtatttttgtttttgaagcacctgaaagaagagatgaggttgggctatctggctcaggaactgatttcagttgatcgcctgtctccagaatcctggtatcattcttagaatcttcattaccaatatgctcttccgctttcgtttcgcaaaacttacatgatcaacccacatatgtctacgtcgagactctaacaccacaagctttaaccacataccgtcaatggaaaccagctttttgcactagcatatcaaaatctgaaactgcagacttttctctttgcttgtatttttttctgtaatgactgtggtcgcaatatgaattgcaggtgtgcagttgggaactgttacagtttgcgtaaggatcatgatactgctctcaaaatgtttcagagagctatccaactgaatgaaagattcacatatgcacataccctttgtggccacgagtacaattcttttcgatgcatcttttgcgcataatcggcatatgcatgtacgttaataacataccggtctcaccttggctgcacaggtttgccgcattggaagaattcgaggatgcagagagatgctaccggaaggctctgggcatagatacgagacactataatgcatggtacggtcttggaatgacctatcttcgtcaggagaaattcgagtttgcgcagcatcaatttcaactggctctccaaataaatccaagatcttcagtcatcatgtgttactatggaattgctttgcatgagtcaaaggtatctgaaatacgctcttcacatcaacaatctgttaagtttagaatatcgatacctttattccttaaccaaaccagtacacactaacacatccctaatatcatatattactctttatgactttgtgatgttcttatttggctgtgaaatttagctttccagaaagttatagtccagagataatttttaaggttgagataatattttgcagagaaacgatgaggcgttgatgatgatggagaaggctgtactcactgatgcaaagaatccgctccccaagtactacaaggctcacatattaaccagcctaggtgattatcacaaagcacagaaagttttagaagagctcaaagaatgtgctcctcaagaaagcagtgtccatgcatcgcttggcaaaatatacaatcagctaaagcaatacgacaaagccgtgttacatttcggcattgctttggatttaagcccttctccatctgatgctgtcaagataaaggttaattactcctttcctgtttttgcttcacaagcatcaatcatggtcacattttgcatttaggagttgaaattagttaatatgagatcgaataatggataattaatcaaaacgttatatttctcataatctcatgataaatccttaaaaacttacttaatagaattttattcactgtctgtgcctacaggcttacatggagaggttgatactaccagacgagctggtgacggaggaaaatttgtagatttattgtgcaggtaatacaccagattatgtttctcatataacccaaagtcatctgtaatttttctcatctttagatcagtcttgtggactaaccctaaaacaaaactgattatataaacttagagggtaatattacagaaaattgtatagagttgggttgaattttcatttcttttccaagttggaacttttgttcctttctctttgcataaaatttgtggcactcattgcaccaatggtaactatctggtgaaagatttaaacttttaaggcaaactaaaaagcaaagtttaaagaaaaaaggtttagccacagtggcaataatatagtgttttgattcattccttttcgaaaaaagaaaaacttttgaaataaaaagatatagttgtaaagcgtatataccaataccatcatactagaaggccaagtcatcttacaaaacctccactagttaaatttttgtatgtatgtcatctagaaaagcaagacctaatatccatatatagatggctataatacatagtgcaatctaaagtacaactaaagttgataatacaattcaaattttctttttcttttccattttttgggttattgaaatcctaaagctatttcacaacatattaatatgtttgtgtaatgttccacgtttaagtacttcttttcgtagaaaagtttttctctttctctcctctttataaatcccacacacattgatccttagtccataagcaaatatcaaagccaagaaaaacaaaacaaaacaagagtctcattatctctctaattctaaagatggagaagaatatatcaataagcaagaagctagggaacattgtacgttttgtcttgtacatgttacacaaaggcatttctaagcaaaagctcctagccgactttaatgccactctcaaacgcggcaagaatctcatgttccacaaccgccgccgtgtcccaggctcggctgttgcgtcccatccacagaacgagtacgagtttagctgcagcgacactcctaactacacgttccccttcaacatggctgccttcaagaagaagagccaccacaacagcctcttctcctgtggtcaagcgccaccgacccttgatgacgacacttccgtctccagagccgttctagagctgctcaacagcggtggagatcatgatcagggaagtaacacgccggctttttccattgaggccttgacggcgttatctccctacctgccgggatttggacggagtacttcgtccgtgaggcctttacgggtaacggactcaccattcccgttaagagaagagggtgacgtggctaacggacatgtggacaaggcagcggatgagtttataaagaagttttacaagaacttgtatcagcaaaagaagatgattgagtcctcacctaattaaatctccttttttggcctttccccttagtttctctcaatctctcttcctaaatatttcctctatttttggctgatttagttccgaagttgtaataatattcttggttggaggaggccggtggggattatttcctcatttcttgataaaattatattatcatgaataaaatattattcaggtggctattttctacactaatttggaaaatgtaatgtatttttgaaacactatagttgatgagttggaaagtattgtacttcatcgtgaacaaaattagttgacatgatttagtcgaaatacattttagacttaaacgcatcatcatcgagttatcgtaacgtgatttatgaaacaaaaaggagcatgtatgcaactttcttgatgacacctctacctacaaaaccgtattacttacctacaaaaccgtgatgtaacacgacaatgttgttttctagctttctgaggttgaactaaacactcccttagtgcctttacgggttacggactcaccgtttccgttatgggaagatggtgacatggctaatggagacgtggacaaaaatatcattttcgtaatcgaacgctcctttgttgaaacatgattttggacaaagtagattttcccgcaaaataatggaatcatgagattttctcaaaataattaaatgttaaaatcgtcattttgtgttaaaatttagtggaaatgtgattttaatcaaagttttgaaaagcaagattacactcatagattttagtcattttacaattgcataataatgatttctacttctaacccacacaaaccgaatttgatgcacaaaaatgttgagcatgaggacgtggattggaaacccaacacacataaagaggaacatgcatgtacatgtcaaagacctccaaatgattgtgtcccatcttaaaaatttcgggtatgaagtattatattttgtgcttgtaagccctgatttggctggtttattctacgaccaaatatgtatttacctaactttataatctctagtgattgttaaaaatcgttatttacttacttatttaaatgtcacatagagagaaaagagatttgcatacttgtaataatataatcgtgcttgtataagaaaaaaaaaactttatgagacaagaaaaaaaaactcgggtgtacgtacgtcgtaagtaaaagggccaatgcaagcaagctgtttggctctttccttaaagcaaaataaaagaaaaagttatctttttctccttttatttcaacttttttctttaattttcttttccattttttatgcttaatttttcaactccgagatatgaaactctctactttgtgtttagtttgaactcttttagtcataaaacaacaaactctgccgcaatcaacaaaaagcgaaggagtcaaataaaaacttctttttacgagtgaaagtgactattttacttcaatctcttttgattttcaaaactaagaaaaaaaagaatggaaatcaaagttgtgcatgttcttcccttagtcgatatgtaaaagtgatttgatagacattattgtatgtaaaagtaatacaactctgaaaaattttaagaaaaattgctagtatcagctaatccaacaattagttatatgttttggagaatgtgtaacatgaccgattataaagctaacatcactttatttattgaatttataagtaatgcaattatttaaataggtcttctcgaagaacatctagatggtatacgcttttgtgaggtgagctcccttttatgtttgatttaatagaagaaatgtaatgtgtaatgacttgcttcaaatgatttgtatgttcctattggataagggcatcttgattttatttttattttttgtatctataatgtgcagtaaactttttacttttcattttagtatgatagctggagtttggttgtttcaaagataggcaagtattgtgtttaacaactaaaaataaaacaacacatatttttcaatagaattatttacaaattataaatctaaacacagggaaaatgttagatacaaaaacaaaaaaagtatcaaagacaagcagtgtatcagacatatataatatcatattttcaattcattagaaatacaacttgccatatcgcaaattagtccataatcaccaaggtagggaacgattgtctatcgataagttatgattgaaagaaaaggatttcatgaagaaaaaaaaacttaatttttcttccagaatcgtgacttagaatttttgttaacaccgacgaatttagataacaaaagctactccctcattgactaagccaagaaagttgagtagttgactaacaatgggactaatattttagcaaaatcaatacaattttggtaattattttggttcatgaaaatgttcaatttttttggtctgaattgtggaattcacgatttatttagcctttttgcggtatatataaaattaagatatttttatgtaacactttgttttataaaggataagcttgtatagtttatatataacggctagtcatgctcaaagcctttatcatctgtgggcttcacaatcttatttcttcgacccatttgcttcaagcctcaaaccaaaacttggctgagttcttcgaaagctcattatttcttatatagtaattcttttacatagtgttggaaaatgaagtaaaagaatatcgaaacttgaacgcttagatgacgaatctgtgacattatgatttcaagtatcgacgtgttttatcaaagtgaaaagttgttaatgttggtgttgggtccgtgaaagctcgaagccatggagattaatttcaaacacttttgacctttgagccttgcaagtttggtttatttgttcaacgccagacacgtttgcacagatatgagttggtgagtgcaaatcccatcataccaactaatataaagttataccatcaatgatattctatcgtgaaaaaatatgtaaagtctaatatcattaagtatcatttattaaaagaatgaattgaagggaaaaaaaaaaaaaaagataggcaatccactagtgttcataatgaaagatgatggtcgatgtaatatgtatactaatattatatctctagctttgatcctcaatagtcaatatctatagtgtttatagtgttttaacagcttttgtataatgttaactgtgcaaaatacatgacataaaataaatgattttttttggcttttatgttataagtactattagttggttatctgttttaaaggtttttccttgaattagaggatcagatttacatgcccataacagaaccaagctggtcaccaaatccatcttatgtagtggcataacagaaccaatcttggtcaccgaatacagtagtttcacctttctctttctccaaatataataaaaaacttttttattttgtgcaaaataaactttagtgagatatattgagcaaatatgtatatatatataaagatttcttgagacgatatctctttgcctctttgggtcattgttaattccatgtatcgatttttagggttgaagagacttgtttgtaactttgaccaattgtctactctttttagaccacaatgttagtaagtatgtaggtaggacttgtttcgaatgtgatgatttatttaggcccagacaaattatttactagacccattgttgttctattatttactgtttgaaagaagttgtttttgtcgttgattgtttactagtatttcaaagaaaagggtatgcatagtttaaacttcaaggaaatcccttatatatagtaaaattaaaagaaattccacaattagatttcgtaatacaattttctataacaaaacctagttaattagtccacatgtcctagctcttacccactcagcccgcatattcctcacgctttctttttattttccgaaattttttaaacggctaccaaatcaaaatgcataaataaacaaacccttctcttctttaccaattcccaaatccaccaaaaaaaaaaaaatggagacgttatcgagaagcctaagtaagagcttaggagagttgttagcgagtaatagtaataaccatttctcaaggagaagcggttcaacgatagatgatcacgatgaggaagctcttaaatgggctgctctcgagaaacttccaacctttgctcgtcttcgtaccactatcattcatcctcacgaagatctcgtcgacgttaccaagctcggtgttgatgatcgccagaagttcatcgattctatcttcaaagtcaccgaggaagataacgagaagttcttgaaaaagtttaggaatcgaatcgacaggttttttatcctagttttctagtactacttttttttttcttcttgggacagaatatattctgatataaatttcttgtttttggaattttctttttttttttttttatgtgatgtttgtaacatttatggcagggtgcggataaagctaccgacagtggaagtgagattcgagaaagtaacgatagaggcgaattgtcacataggaaaaagagctcttcccacattacccaacgctgctttaaacattgcagagagaggtcttcgtttgcttggttttaactttacaaaaaccactaaagtcactattcttagagacgtctccgggattatcaaaccttcaaggttattacttagaaacttaaaatgtgttttttttttacatcatttcgatgttgattataatgtatggttttggtggcagaatgacacttttattaggtccaccatcatcagggaaaacaactcttttattagcgttagctggaaaactagaccaaagcttaaaggttaaataatacacattatgattattgattacacattctagaaaaaaagagacttaaattattaatgaaaatggacaggtgacagggagagtaacatacaatgggcatggattggaagagtttgtgccacagaaaacatcagcatacataagccaaaacgatgttcatgttggagtcatgactgtccaagaaactcttgatttttctgctagatgtcaaggagttggcactagatatggtcattattattaatttttcttctgtgagttataattgaatttttcagattaagacaagtttagttgtgtgttatagatttgttaagtgagttggtgagaagagagaaggacgcagggatcttgccggaaccggaagtggatctcttcatgaagtccattgcagctggaaatgtcaagagcagtctcatcacagactatactctcagagtaatgatttcactttaacctatagtgcgattttgtcgaaaacataagatagatgcatacattgataaccaaaaataaaattattcagagataattagtcttttcatctacaaaatctactcacgcaattggtggaccctacatttacctactcccaacttttcacctaatagtcatattctttccaattctcactgaacaaccccaatagttccgaaattaaacactttagtcaatttagtttggcaatttggggtgattattggattattttttcttcagatattagggcttgacatatgcaaagatacggtggtcggagatgagatgattcgaggaatctcgggaggtcaaaagaaaagagtcacaacaggtttaactttctctgttcatcaaccactcctaatcatgctaactccgtgagccgcaagtcacacgatgacaactttttttttcttaaaacaaaaataggagagatgatagtaggaccaacaaagacattgttcatggatgagatatcgacaggtctagacagttcaacaacgtaccaaatagtgaaatgccttcaagagattgttcggttcacggacgcaacggttctcatgtccttattacaaccagctcctgaaacgttcgaacttttcgatgacatcattctattgtctgaaggacagatcgtgtaccaaggtccacgtgatcatgttcttaccttctttgaaacttgcggtttcaagtgtcccgaccgcaaaggcaccgcagatttcttgcaagaggtctatatctaatcttgttttgttcaaacttacagaatttttatcacttaaccaagaattgatagtttagtatgcatcaaataatatggacccaaataacatggtgatcaattattcgtaaaagttactaataacaagataagttggtttgctatatgtttgtttggcatgtgtttcttacaaataacattattttacattttgactggatatgttattttacaatttcaaattttcagctttgcagattattaattctatatgggttttccaaaatgatccacattccaataattattatgatagaagaaaattaatctgatccacttgccttggtaaacaggtaacttcaaggaaagaccaagaacagtattgggcagactcaaaaaaaccatacagttacatttctgtctctgaattctccaaacgattcagaaccttccatgtcggagccaatcttgaaaaagatctatcagtcccttacgacagattcaaatcacacccagcttctctcgtcttcaagaaacactctgttccgaaatctcaactcttcaaggtctgttgggacagagaattgcttctcatgaaacgtaacgctttcttctacattaccaaaacagttcaaattatcattatggctttgattgcgtcgaccgtgtacctgagaacggagatgggaacaaagaacgagagtgatggagccgtctacatcggtgcgttgatgttctccatgatcgttaacatgtttaatggatttgcagagcttgctttgatgattcagagacttcccgtgttctacaagcaacgagaccttttgtttcatcctccttggaccttcagtcttccaacatttctcttgggtattcctatctccatcttcgaatctgttgtttgggtcaccattacttattacatgatcggatttgctccagaactcagcaggtgaagatgattcttgaacccgcaacgtgttaacattgtccatatagataatattaaccacctagtaaaagtaatgttagctcaattggttatttttgtttggcaggttcttgaagcatttgttggtgatatttctgacacagcaaatggctggtggtatatttaggttcatcgcggcaacttgcagatcgatgattcttgctaatacgggaggagctctagttatcctcctcctcttcttgcttggagggttcattgttcctagaggtaatagtacatcaataacactatcaaactaatttttataatatgaaaactaattttgtgttttgatgatgttatggttaacaggtgagatacctaaatggtggaaatgggcttactgggtttcaccaatggcttacacttacgatgctttaactgtcaatgaaatgcttgctcctagatggattaatcaaccggtaaaatttctgctacagttattaacatgtctcttatatgacttccttttttttttttttttatcaagcaatgctcttttactttccttgcagtcttctgataactccacgagcttagggttggctgttcttgagattttcgatattttcacggatccaaactggtattggatcggggtaggaggcattctcgggtttacggttctctttaacatcctcgttaccctcgctcttacattcctaaaccgtaagtacacttatattgattgattgtttttatcatgttttctaatagaatcatatatctacaataacttgagacctaaatgttatgatatagaagaacatgaacgttgacatttatttttgttccttctcaaacaaacaatatcactttttgttgatatgccagcacttgagaaacagcaagccgttgtttcaaaagaaaatacagaggaaaacagagcagagaacggctcaaagagtaagagcattgacgtgaaaagaggaatggttctaccttttactcctctcacaatgtccttcgacaacgtaaactactacgtcgacatgcctaaggtaacaccaaatcccaaatccttgttgacattaaaaccataaagatgttaaccaaaaaagaaaacaggaaatgaaggaacaaggagtttccaaggataagcttcagctactaaaggaagtgacaggggtctttaggccaggggtattaacagctttgatgggagttagtggagctggtaagaccactttaatggatgttttagctggtagaaaaaccggtggttacatcgaaggagacatcagaatctctggtttccctaaaagacaagaaacctttgcaagaatctctggttattgtgaacagaacgatatccactcaccgcaagttactgtcaaagagtctctcatctactctgctttccttcgtctcccaaaagaagtcactaaatatgagaaaatggtaacacttcttcttgtaacttaacaccatttataataggatctcaatccatacaccaacttttgcagagatttgtggatgaagtgatggagctagtagagctagagagtctaaaagacgcggtggtggggcttccaggtatcacagggttatcaacagagcagaggaagagacttacaattgcagtggaattagtggcgaatccatctataatcttcatggatgagccaacctctggtcttgacgctagggctgcagcgattgtgatgaggacagtgaggaatacagttgacacaggaagaactgtggtctgcacaatccaccaacctagcattgatatctttgaagcttttgatgaacttcttcttttgaagagaggaggacaagtgatttatgctggtcctttaggtcaaaactctcacaagattatcgaatatttccaggtcagattctacatttaatttgtcaaggtctctatattaaaatgtaagaactttcatgatcagtcctcttttgagaaactgcaggcgattcatggagttccgaagattaaagagaagtataatccggcgacatggatgctagaagtgagctcaatggctgcagaagctaagcttgagatagattttgctgagcattataaaacatcatccttatatcagtaagttcaacctaatattcaaagctaagatcattccagatattttaactcaattagaattgttcgtggtgtagacaaaacaagaatcttgtaaaggaactaagcacaccaccacaaggagcaagcgatctctacttctcaacgcggttctcacaatcattgttaggacaattcaaatcttgtttgtggaagcagtggataacttactggagaactcctgactacaatctagcaagatttttctttacattggctgcagctgtcatgctcggatcaattttctggaaagttggcacaaaaaggtttgtttaattacttgaatcgaatacagaggcctcaaatctagtatcagagtccttacttatatctaaactctatacaactgttttcaaaaacagggaaaacgctaatgatcttacaaaggttattggagcaatgtatgctgctgttttattcgtgggcgtaaacaactcttcatctgtccaaccgctaatagccgtggaaagatctgtattctatagagaaagagctgctgaaatgtactctgctttaccttatgccctagcacaggtgagattaaactagaaacgttttagttacttgacaaacaagaaaccttaatgggtcgtaaagcagtctttaactaaaactttcccatggtttcaggtggtatgcgaaataccgtatgtgctgatccaaactacatattatacactaattatatacgccatgatgtgtttcgaatggacattggccaaattcttttggttttacttcgtatcatttatgtccttcctctacttcacatactatgggatgatgacagttgccctcaccccaaatcagcaagttgcagctgtttttgccggagctttctacggacttttcaacctcttttctggttttgtcattcctagaccggttagtgttggttacttttctggcaagaaagctgaaaccctaaatgattctctattgattctatcataagctggttttactttcctcttgcagagaattccgaaatggtggatatggtattactggatctgtccagtggcttggactgtgtatggattgattgtttcgcagtacggtgacgtggaggatacgattaaagttccgggtatggcaaatgatccgacgataaagtggtacattgaaaaccactatggatacgacgcagattttatgataccgattgctactgtgttagtgggctttactctcttttttgcgtttatgtttgcttttggcataagaacgctcaacttccaacaacgatagggtgtagttgcctgccggatatgtttggcgtgaagtagaaaaaaatgaaaaatgagggtttatgccatatagtttgtgattgatgctttattgattgtaagtaaagtgtacaatatatacaacacaatagattgtggggagaatttacaaggacaaatctaattataattaacttaagatctaaatttatgtatatcctaacagttatatccgttttgtacactattttaaaactttttacagatctaagataaacatagatttattttaagaatcaaattgtgaaaactctgcgtggaaaaaattaatcatgagtcatgacaatgatgagctagttaaggttccaagtgattgcaatcacattttgtgagcactaaagaacacatacacacactatatatatattcttgatcacctaacgagtgaatcaaaagagatgagtagtttattgtattttgggacaaacttcgattaaataatatttacactatttcatgaaaacatttgatcactcatcaaatacatcttatgaaggcgcatatatatctactgtttatgaaatctaatctactttactatatgaaaaaaacatacaaatttgccggagctttctaaagacttctcagcttcttctccggtattatcatccctagaccggtcaattttggttacttaagttgcaagaaatctccgtgtaacccaaatttcataaatgcgtagtgggatttactcttcttcttttttggtttcatatttggtgtttgcctttcgcgtaaaataccaacatatagcaaagagcgtttagacgtcaaatgtgtttgttttatttgtgtagagtatacatacttttttaagaaaagaaaaaagaagttatgaaagcttgttcttttttgttaaagattatgaaagcttgtttaaatcctaatcacatctcgtactaaataaagaactatatgtgtgtgggtaatattatccaatctctttaaatttaaaccacttgtctcatctcatatgcaaaacgtgtatcttgtaagaacacacgctcttctaatatagaaatagatcgcgtaacaagtggacttggaaaagctatagtttatggcgttttcggacagatttacacttaaataatattatcctcacatcttttaaattcaattatttcattatcttggttatcagaactgagttttgtcggtaacattgtatctttaaaaaaaattatcctaaacaaagaacgaaacgatacaatagtataaatttgttcttgtcataaacgataatttccaggtaagattaaggataaaacaaaaaagcttataatagcaatttaaaacacgaattcaacgtacgatccaccacaatcctcgtcgtctttcaaacttaaaataccgaaactacccttaccttcttctttccataagaaatcaaaaccaagtcctatggtcgcaattgtatctctatctaaaaatcttctttgaatttgtgtatacacaaatcttattcaacgaatcatttatcaccaaaaggttctctcttttttgtttgtttctgtcttgtgtgaatgactcgtcggtgttcgcattgtagcaacaatgggcacaattcacgcacgtgtccaacgcgtggtggtggcacgtgcggtggaagtggcggaggaggaggaggtggtggtggaggagggtctggttcctcctccgccgtgaagttatttggtgtgaggttaacggatggctcgattattaaaaagagtgcgagtatgggtaatctctcggcattggctgttgcggcggcggcggcaacgcaccaccgtttatctccgtcgtctcctctggcgacgtcaaatcttaatgattcgccgttatcggatcatgcccgatactctaatttgcatcataatgaagggtatttatctgatgatcctgctcatggttctgggtctagtcaccgtcgtggtgagaggaagagaggtaaaggaaacgacttaataatcgattgttgcatattcatagtaaagtttggaactttgaatttgaaattgctctaaaggttttactttgacattagtaaaggttattgctagaaattgaatggatttagatcttactggtgagtggaattgttgggaacaacttagtgttggatgcttagatacttgtgttggacttaagtgcttatcaaaacatatctcattgtgaatcatattgttgaattttagtttaagaagatgaaaggttttgtattcttaaatgtgatatggtttttacatgtatatttggtgtaacaggtgttccttggactgaagaggaacatagactattcttagtcggtcttcagaaactcgggaaaggagattggcgcggtatttcgagaaactatgtaacgtcaagaactcctacacaagtggctagtcatgctcaaaagtattttattcgacatactagttcaagccgcaggaaaagacggtctagcctcttcgacatggttacagatgagatggttagtatcttttcttcatgatttttcttattctatggaaatgtttggaaacttgtattgaatgtctcctctgtttttgccgcatttaggtaaccgattcatcgccaacacaggaagagcagaccttaaacggttcctctccaagcaaggaacctgaaaagaaaagctaccttccttcacttgagctctcactcaataataccacagaagctgaagaggtcgtagccacggcgccacgacaggaaaaatctcaagaagctatagaaccatcaaatggtgtttcaccaatgctagtcccgggtggcttctttcctccttgttttccagtgacttacacgatttggctccctgcgtcacttcacggaacagaacatgccttaaacgctgagacttcttctcagcagcatcaggtcctaaaaccaaaacctggatttgctaaagaacgtgtgaacatggacgagttggtcggtatgtctcagcttagcataggaatggcgacaagacacgaaaccgaaacttccccttccccgctatctttgagactagagccctcaaggccatcagcgtttcactcgaatggctcggttaatggtgcagatttgagtaaaggcaacagcgcgattcaggctatctaaaaaatctttgttattgtgttaaagaatgaagaaggaagaccctgaccggattaaaccagaggatgttcctggtttaggacgaaacaaaccaagccataagccattagagagaacaattacttacaaaggaaaaaaaaacagagcaaactgtaacaaagacttaccaaacagtcaaaaacacatttctcagcatcacgtcatacttacataagataagcgtaacttacaattttacccttcatttttcatgtttaaggcaaattatttattatctagagactaaacaataaagaatgttacaaaacataaacttgttgctaccgttcgaccatttttactgttaaatgttcgacaagaacattaaaatggatataagcagaaaagaaagagaaaaagagagagtatttgttctttgttgtgaagctgctttcagcaatggcagcacaaatcaaatcaggagacgagagagaatcaatgctgcgttgggaatcatttccaagaaaatgaatagggaccctaaagtcgaattttgtaaatgattgcaatttctggcaccataagttcctaaagtattccaaatgagccactctctaatgctaaaatagtaaaaatgtgtcaacatttctccaaatgtgtattcacactatctttcatctcttttatttatgttcctttcttgtgcttcaatctaccgtctctttcgtttctcgaatgactagtacggcttttatatcaggattattcttgtaatgatcttacgttttggatggatccaacatatcaatcgcagttgtgtctctatttatgtcgttagaagcgtttgcggtggtgaattatatccctaacgctatcgaattacaatcttttatgcatggccgcacatggactagtgcggttgatacatttaaaagaaatactttttgatacatagaaatatgttcaaagcaaattttgcccggaaaaaatgtgtttagttctttaacaattgagaaaactagttgaagttagttagatgacatatattttaatattctaccattttttattttggttttgaacggtgatataaataggataatgagtttggattacatttcctaatgagagagaagttctattctagtttcctaaattgaaaaattttatgtgaccacaaatgcatggttaaattaaagacgatggctaattaaagaacggtctcacaagaaagagatatctaattcactagaaaacctatgtttacaatgaattgagagcctttataaatgctggtatgcatggtactagtctaaattgtgttcaactaagctaattcctaagaattgtgtgaaagaatggaggataagatgttattggagactaaacgatgattataatcgggagtatatggagttctatggacattttatctctatctgtaaaggtaaaggcatggacgtacgtagtctttagggatgataagggtctaatctatcttgaatactcactaacgtaatctaagtaagccagctatgatagcttagagttctaaccacactcaaatgatataaagtttcccaatgagttataagaacaatgccaaaatggtattcctaaaaggattcatcacttaatcttttaatatgtttcaaaccctttaataaaatggtcaaacgtctttatgatggtctcttgtcaccagttttgtttgtcaaatagtagtggaatttgttttccatggttgtgcagcctcatctgtaacaactaacaaacacgaattcaaaattcttcacaatgaccattatgtttgtaccaatcacatttatactcaaaagaattattgctattgttctgtttcaactctcaaccacgacaactactcaaaacttgatagtattttctagttgggatgagtaaatgaaattgtatattaacatgatatgtcggaagacggttccctatgatttaatgtaaaactcgggtctatatttttattttacttttatgattatgattagtcgttatcggccgatttatttgttatttaacaatttgtttaggattatagctttttcggattgggaggaatcatgttcataatatcgcggaggtgtaattattcacgaaagtgatagaggataaaaataaatttgtttagcatatactttatttaacgggtgatagatgattgaagttacatctttcaaataattggatattattgaatttatattaatagttgagaagaatgtttttaattgagtaatcaacacaattaaaagaattaaaaatctgtttgtgtgtcgacatttgaacttttaaggagtcatcttcaatcacgaaccagtcaacattgtgccctttatacgaaatacttagttcaattaggtgctaatagctacttctaataactttagtagcacaaattctggcatcatgtatatccaacaaaaaatctcaagataactttccgaagaatatctatcatttaaaaataaactttctctaaacatgtattaatcttccaatcataggaattaatagtggaacaagctagccttctaaagtattacaagactgattttgtcttgaatatgaatataagttatattacaaactagcctatagtctagcaatttcctaataatatatgaaaactaaatctctacatattttctcccttcgaattaattagtcatttgtaccagaggcagagatgatagttacgagttcataataattaagagttaagactatatatagccttaaagcttagaaatatacaaaagatcataagaacaaaaaataattttcttttataaaattaagatcacatatatatataaaggaataattggattgtgtaacacatatacaacaaaatttagataaatgtcatgaattttgtcctcttttattagaattttatcttgtataatactaaaaggtaaacataataacatttgatttaaatacaaaattggggtttatcatgtaaaaccaacctcacaagttttggaatgaattgttttgtttcttctaattttgtggtattacatatttgttattagaggggaggtcggaattaaggagaataatcgagatgagacagcaagcaataataaaacttagattctaaacccacttccaccgaaaatatgtagtagacaagtcctttatgtgagattggtttggtgggcggaggaataaataaagctgatttttttttgtatatgatcaatctctctctcttctgtaattcgatctcacgatgcttgtctgagagagaaagagatatagaaaggaacaaattatgctgtaatgataaaaagatcttttatgtctttgtgtcaatcatttagatcacacttgttatgtgctcttcagtttttcctttttagatacttgttccttgtttccaataacagaaatttatggtttattttttactcgttggatatatgtataccttattctctctctctctctttttggtttcctacttctttctttttttgttacaatatagaagtaggaaacacacgcatccgcacaagtactagcctttccttggcacacaacaccctctcacctccacacattaatggaagaaacttggaaaagatttgcatctaatttttcaatgtttgttgcagcggtcaaagagaaagaaaacacatcaaacagaaaaccccaatagaaatctatttatttctggtcttgatcatgatactaaccttgactatgtttttaatataaaaatgtcgtttaatgtttatcacaagatataatccttacttagtaattgaattccggaccccaaactaaaatacttcgaattagtattgctttctgttgttgaaacaaaagataagcaataatagtgtttgctagtgtgctagattccaacaattttttcttccaaaagtacaacttttttttgcccatttcgtaaattcatatgtacatatatagttgaatgttgtgggtgtacgtaattggtaccattaaaatcaggaaatcacaaccttaaaaataacaaaaaaaaaaagaaaaaagaaaagacaatgatattatagaaaactttgtgaaaacatgaattaaattcagtaattaatcaagacggaaatggtctgttcagaatatttttcttgaactgtatactttttcaatctataactttctttttcactttcaggaaaattcgtgtccacatacattttactagtatatatttgcctcatttccaaaggtgtgtttcgtatagtatcaacgtttagcttttaggttctatattcgaaattttacatgtttctatgatgtacgtatatatataatattagtcgtattcccattcgtgagatcctttgattacttattaattaagatgcatttcagttatatttttgggcaatagatcaatcatccacagtagtttaagtttcataatggaccatactattaattaaacaatcaacattgaggaattctctaattgaaatctcttattcaaaactttaacataaacactatcttatatatataaaagattactatacattcaaacttatatatcaacacacatatatgatcatttgataacacctaccatttgtgttatacatatattttatagagaagttatagaaaattatactgagtatacatctatgtgtcatcgaaataagctgataataacgaatacacgttttctttttatgtctggagtagaatacagcattcatgcccttacgttgcaggttcccatcattttacaaatattctcttctcttttctactttctcttttttgatgtaatacgatctatttatttattctatatttcactatatatatctcagatgtccaacgtttcagtattgcattgccactcgaattacctaagataaaaacgaattatcactttgatttttcgcacttatagttaaatctattctcaaaatttaaacaaacatgcagaggcaagtggcactcatcaagcagtccctctttgatcaggttttggtcgtttgtttcttcgtattttcgtaatataacttcgtacgtcgtaccacttatatatgaatttcttcatataatttagaaaatgactaatataggaaaatgcatgcagggatatctcgacgaacaattcatggagttagaagagctccaagatgatgcaaaccctaattttgttgaagaagtttccgcattatacttcaaagattcagctcggttaatcaataacattgaccaagctttgtgagtattattttgttttctattatatatatattttttttttttcagttttctaatcatttttacaatgcagggaaagaggatcatttgatttcaatcggctggatagttacatgcatcagtttaagggaagcagcacgaggtaatttccccccttagtttttgactattctaattacgccttcaagaaataattttacttaaagaaatgcgaatacttaaatgtttataagataaaagaatgtaacgcaaaagtacattaaaattacttccattctcattcaggattcaatgacagaatctactttaaccagaaataattagattttatgatcgttagttatactgacaaatgttgcatttcttttttttgtagcattggggcaagtaaagtgaaagctgaatgcactacgtttagggaatactgcagagctggaaatgcggaagggtactttcgtctttatacttatataccttcatgcttctcgtttttaacagaaaactaagtaacggggtcaaaatgaaaataagtatagtttagatggctaaaattgctgcaattaatccgctgaaccttgaacttttactttacttcattttcgaccccctaattagttttcttcgctttttcttacttgcagatgcttgaggactttccagcaactgaagaaagaacactcaacgttgagaaagaagcttgaacattatttccaggcgagccaataatcaattatgcttaataatttacataattagaatgtgattagaagttatcatcaatcacttttgatatagtatttgctgaagtgaaattttttgtaatgaacagttggcaaggcaggcggggcctaaggagacagcacgtaggcccaagtaagagagaaagagagagagacagagataaatgaggaatcgtcgtcgaattttgtagcaaaactatataataaatagttcctctttatttttatatatttcgatgtacgttataaagaaggttttggacttttatattatgtccgttaataaacggtccaaatgtctctatgtttttccccttatatcgccaaattttcccttgggagttttatagctacgattacctcgtaacatatggcttcctctaataacggaatacagaaaagagtggaccaaaaaaatgcattttttcgattctatgatgaatgcattaccttgtttacaaaaggaaaaaaaaaagaaactaagctttacattattcggtttgtttccaggaaccgtgtccaaatcctaaatattcttacctatttttatatcattatgttaatatttgtctctactagtactgattaataaatatttaaaaaagaaaaaaaaaaccaaaatattcttaggtaaaagtctaaaataacattatcattatgttactatttgtctctactaaaactaattattaaaaaaaaaagaatgccatggcttagatgcaaactattcttagctaaaagtctaaaataataacattatcataaacaattaatattacacttttccatctaatttctcttacatgccctatttttcaaacgatgtcgtttaagaatatcacatagaccttctatttcatgaaaaaactaactcaccaatgcaaataaataaatcaaatgtttgtttgtggataaagtaaaacgttttctttcaatggcccagcatttactaaaatttatttcaagttcttccacgtaaagtctacactacatacactcatacaggcagtgtaacgctgattcgtagagctggagagtatcacaacaataaatttctcttccgaaagaaaacagcctaatattagggagatatttacatactctataagatgttctttaatctcttatatatattacatatgaaagaattaattgtttaattattatccaaagcgacgtgaaaccactctcatttattagccctagctatatctcacaacctccatcttccttactttaaaaacacagaccagatcctatttatagcatccatgtgcgccattgaaaggtaaatttatttaataaagtttacctataatatcaaattatgcaaaacacaggctggttcagttttttccacgaatcaaaaatggttggagaaatattgaataagagagagagagagagagagagagatagagtttcagagttgacacaacattgaagtaaactaaactcctaacctctttatctatgtgtatatataaaactcaaaagtacatataatcttcaccattcacacatagtcacataccaaagcaaaaacatggatcgttgcacgtcgtcgtttttgcttctcacattggtctctaccttgtccattctccaaatctcctttgctcaacttgttccagcaatcatgacattcggtgactctgtagttgatgtcggcaacaacaactatcttccgacccttttcagagctgattatcctccttatggccgtgatttcgctaaccacaaagccaccggtcgtttctgcaacggcaaattagccactgatataactggtaaaaggttttacttgttactcaagttatatttttaagtttgtttgacactgaagtctttgtgtttgtttttgttacagctgagactttaggcttcactaagtacccaccagcttatctaagtcctgaagcttctggtaagaatcttctcattggtgctaatttcgcttctgcagcttcaggttatgatgacaaagctgctcttctcaatgtaagtagtgacggttctttgttctgatacatttcttctttgatctgtttcttttttttgttttggttctgatcttagttctttttttggcagcacgcgatcccgttgtatcagcaagtagagtatttcaaggaatacaagagcaagctaataaaaattgcaggaagcaaaaaagctgattcgatcataaagggagcaatctgtctcttaagtgcaggaagcagtgattttgttcaaaactactatgtgaatcctctgctttacaaagtttacactgttgatgcatacggatctttccttatcgataacttctctacatttatcaaggtaaagaattttccttggttatcctctgttctgaatagagaaaaagaaagatgagacattttgagtttttgattgactgttgcagcaagtgtatgcggttggagcaaggaagatcggtgtgacatctctgcctccaacaggatgtcttcccgctgcaagaacccttttcggtttccatgaaaaaggctgtgtttcaagactcaacacagatgctcaaaactttaacaagaagcttaacgctgctgcttcaaagcttcagaagcaatattccgatcttaagattgttgtcttcgacatctactctccactttatgatcttgttcagaacccttccaaatccggtaagtcctcaaaatggactgatatatatagtttgttataacatttattggtgctgatctgctttagataatccatgacacattcatctttttgtctataacaggattcacggaagcaaccaaaggatgttgtggaacaggaacagtcgagacaacttcactcttgtgcaacccgaaatcgtttgggacatgctccaatgctactcagtatgtgttctgggacagtgtgcatccttctgaagctgccaatgagattcttgccactgccctaattggacagggcttttctctcctcggttgatctcacgtatttttcttatattctcttttcaaatcgctgtttctatcacacattgagtcatacatttgtttttctttgaattatgtatcaaagcatcactgttttactaaaaatgtattgaaacttattacaagtactaaaccaagagttgagaacacttagtaccagaaactatatacaaccatctccctgtgtgatcaaaagatctacatataccattgctatgaggaaaacctaatgaagtgttaaaatgaacagcgtagaattctaagcagtgagaaatctccagccagagcagcagggccaaagtttaagaagcttcaatcattgcaattgttttcctgattcctctaccttcacttctggtgacaactttcctgacaaagtcaatcttcgttcttctttacggttctcctcagatgttgttgctttggagcatgttgcagcctctaaatttctgttaacctcacccttaaaaaccagtgtctgtttagcacccctcttggcaacgggataagcctgcaaaaatatatcaacttagagatgaaaactctcaactgatgaaacatttcgaactaattcaacataaaaaccatggagataatgaaagattcaacattatgtaattgtcaatgaaggcatataccggatgtttgtagaccagatgcattgatcttctctccttgagaggcactttcccagctggaacctgagttataataataggaagtatgagtgacatttaatgcaaaagacaggttttggatatttttgaagatacagagaaatgcttacgtaggtggtgatgttttggtgaccggacatttgtggcacctgattgcccatatagtaataagatgtcccgacctggaatggctgaaagcaaccatatgagctggacacatatgagaggactggctgagctggtgaaggggcagaaggagcttgcgtgtactggcgtggctgtgcctgaaaatattgctgcaacctcttgattcgatcctctttgcgctctgcaactcgaacaactattggctttccatcaactaagaaccctgtaagcaacaataagtaatagtagtcaagatttaatcagtatatatcagactggtctggagaacagataattaagggtaagctactatagctatagtatataccattgagatatcttttagcctgtttggactcttcacagttagagaagcacacaaagccgaatcctttacttctgccattctcatgacacatcactttagctgaaactatttgcccatagcatccaaagatttctcgcagtcttgtttcattcattgattcactcaagttcttcacgtacagattggaccatctcatgttaggctttgcaataaagttgtcactgaatttctgtttcagcatctccctcctttcatctttcttgagtgccttaccaacaaacaatttcttcgatcctgcagattgtcaaaggaatgtttttaaatcaggaactatggtctaatgacaagatactaaataataggttcagacaaagaagttgaattaccaagttgtagtccacagagagattccatagctttcttagcattttctggattgcagaagttaacaaatccgaaacctctagatcttcccataccatccctcataaccacaacactagagacagttccatattgagaaaacagtgtatgtagacaatcatctgtaacagtttcgatcagattcttcacataaacgtttgtagagtcttgatttcctgccatagctgctctttcatccttgttgatgaacttggcaacaaacctaaagtcaaaaatagaccaagtaaataaacaaccatttcatcatcattaccttcggttactaagaatcatacaagcttacagtttcttgccataaaccatagagccgtggagagcagaacgagcagatacagcagattgctctgtatcaaactgaacaaagccaaaacctttactttggccattctcttcaacgactttgcaagaaagtatggaaccaaaggggcaaaacattcgctctaagcaactgctagtaatcgagctatccagattctttacgtatagatttgcaaaaccagtacgagtacgacgacggtacgcaagatccctctgagaccacattattcgcatagcctttcccttcaaatcactatggtttaagcgagtcatagcattcgatgctaatccacagaatcaacaataaagaaacaaagatctgtcagaattagtgacctaaatcggttaatcgcaagacaatcttagagaaaaacaacgaaatttccagggttttaacaagaattgaaagagtccaaaatcaaaaaccgtaaacgttgaaaccaaaatcggagactggaaacgaagaaacgagtaaaaaagtcgaaagtcttgtttaccgctgaaaggtgaatcgaagttgatgtaagcgtaacacatggattttccggtgacagagttacggcaaagatgaacggacactaccggaacattcaaagagaacttatcaatgagatctttctccgtcacgtctgggctaagatcaccgacgtaaagcgaaccaaaccttgaagaatgctggtggtttcctaacgcctgcgtttccgttttcacgagcgccattgttgttctctcacaaatccttatctctctctcgttctgtagaaatgtagaatcaatgagaaagaacaatttctttttccgaaaaactctgcagagaaaaaagagtaaatggagaagacgagagaaagcagagaggtcttattttgtcttggagtgtgtatatatagatgtatgtatcgttctgttataaccgtaatcatagcgcgcacagagacggcggtacgatatttcgtacggaactccacgcgccgcgagtatggcttagtggttaaactcgcgttaatttgctcatacccgaaattttaaatttatccaaatatggaagtgagcccattccaaataattttgggcttatttgagttttagattaataaggctagtattctatttttgggtttgtttagtatgtagtttttataaggcccatcatgtaattgcataggttatgctgtattttgattttgcatttaccatgtcaatgccaactcacacactattgatttgtttaatatattttcccattgtgtattctagaaattatattttaatctaatttgttcatatgatgtatgagaatcttaaagtagcatattcttttgacaaataacaaagtagtatattttaaatgaatttctcttgtttacttgccattatagtcatttatttaaattatgttcaaaatcagattaccttacctactaattcaccctaacgaaattttcatgtctttaatttgaaacaatcgaagatttgacaacttattttacaatttttctataataataatcttttcgacgagttaaaaaagaaaagttatattttattttcctgctcaaaattattgtattcttgtccggaaaacttaactgtcaaccaaatatttataaattgtattctgtaaaaaaaattctaaagggtaagaattccccttgtttacgtttcctttgtttacgtcccactatattcatttatttaatttgtttttggtcgacagcttatgttactggataggttcaaatgaattaaaccgaataaacgttgtttctatatgaaatagaatgtgcgtgaacacgttccatcagctttagaattagttagtatagttaaatatacatgatcttacttcaatcaattaatcaaccacacatgatacaactattaattcttaaagtggtttcccttttgagaattgagggcaacactaccaatccattaagccaaaaatgcaaggggagattatacttatttgaagaacgtggccaagatacagatctttattacgtatagtgagaatctttcttctcataaaagaaataagaaagagaagaaaaaaacgagttgccatatcatgtaaactaaaagtcttccctatcgaccatcatccatatcttccccaggtcaataaataccatgaaatttccctaacatagatc

SEQ ID NO: 426 - DNA, 91714 bp, Arabidopsis thaliana
aagctttggtaagaggatacttagtccgcaaacgcgccgccgaaacgctgcatagcatgcaagctctcattagagctcaaaccagcgtccgatcgcaacgcatcaaccgcaacaacatgtttcatcctcgacactcacttgtaataaccattctttttcttttgtcttatttctaacataatctctatagtcaaaacttatgttttgatggattgatttgattataggagaggttggatgattcaagaagtgaaatccatagcaagagaatatcaatctctgtagagaaacagagtaatcacaacaacaatgcgtacgatgagaccagtcccaagattgtggagattgatacttacaagacgaaatcaagatcaaagagaatgaatgtggctgtatccgaatgtggagatgatttcatctatcaagccaaagatttcgaatggagttttccgggagagaaatgcaagtttcctacggctcaaaacacgccgagattctcttcatcaatggctaataataactattactacacgcccccatcgccggcgaaaagtgtttgcagagacgcttgttttaggccaagttatcctggtttgatgacacctagctatatggctaatacgcagtcgtttaaagccaaggtacgttcgcatagtgcaccgagacaacgtcctgatagaaaaagattgtcacttgatgagattatggcggctagaagtagcgttagtggtgtgaggatggtgcaaccacaaccacaaccgcaaacgcaaacgcagcaacagaaacgctctccttgttcgtatgatcatcagtttcgtcagaacgagactgattttagattctataattagtaaaaaacgttattttcgtccttaaagaaaatatcgtcatagcctttgacttttcatttatgactttccttttttttttttttttgtaaattattgctttgctttggaaaaaatgtgaaatttgcttcttttcctcttcatgtggaatgctttttgtcgattacgcataagagaagtaagaaacttatccatatttcaaaattataatgttcttcaatagtaagagattacttgaatttagatattggttatgaagaatttgaaattcaaagatgcgagtaatcgagggaagatattattaataagtaactatgatgacgaaatgaggttgaaatttgcaataaatttggaatccatgtagcgtcagacaagtacgacatgacgttatcattatcgtgatttttcaaaatctttttgtaatgtttctatatctaatcatttttaaaaaccaccagggaatatgattggttcatgccgatacgtgtttacgtcatcatattcgttcttctgaaagtagaaataattaaaatacacatcaactgcttttgataagctctaatttacctcgtaatccgccaaaaagattccctaatagcctttttaattaaggttttctgtgattaaacaccttcatcataggctgtcaaaaaaaaaataacaccttcattttagactttaggagtgtgtatgtaaattatgctttcacatttcgaaataactatggtaaattgatctaattctagtagtaatttattgtggatctatcttatatctggttgagagtttaagatacttttaaggcaattatttgtctgatggagtcgtttctattatttagatccatttattcaataatccttttattaacaaaatattaaagcatttaagagttcataaaattaataatttggaaaatattttatgtagtagtagacttctatctatctttaatgcctatgtttgccagcattctttaacaagaaagaaatttaaaaattgaagctgaaaaaagttggtaaacgtatcaatcattattcactaaccgaagagaagaaatacgcaacaacgaaattggagacatgggcgtaatttgtcaccattttcatggacttatcttaggtcagaaacttgagagatagatgaaacaaaaaatttggttggatctccaaaaaaaaggctatctttattctacaggtcccaactctatcttatgatgtaaaaagatcttttttacttcttcactcttcagcgaaatcttttgcttacggagtcatagcttggaacattcaacactgtcccaaaatcaacacaagattttagaataagtaaaatggatttaagtttgcaatgccgttttataaaagatgtaaaactgtgatgatggttttgtcattaccgtctccgaaagttgccattgtcaaaggctttgtgataaccttgctagtgaaatctgcaatgtcctttaaggtaagttggtctactgtcttcaagaattggtctactggtttcctgcagatatgttgggaaaacaaaaaaaaaaacagttagagaaaagtctggttataatcagtttagaagtggaatgttacaaagtgtatgtacctctctccgtaagtaagaatctgtctaccaatgtcttctgctgcaatcatctgcaaatcacacaaacagttaaattccattataaagtcaccctcatggcttaagaaaaagaggtggaacttttaagtgacctacccgagattccagattcatcagaatcgcagattttgttgctgctttggcgcgatcaagatgtttctgattaactgccaaagcatgtacaccagagtaaataatatgtctgtatgagttgataaatggttctaaaaaagaatggatgaaatatatagaaaaccttttccatcagcaacagcgttcatttcactagctactaattcaattccctgtgaagcaaattcaggactctgcaacgccaaaagaatgtaagcaaacccacattgcaaagtgctaaaaaccgttaataagcaacaactagaaatcggtgcaaactcaccgtgcaaccatagattccaaacaatccggtattgttaaagacgctagtgaatgcagtgcatgattgaaactgctgatgttggttcaaaaggcgaagatctgcatccagacaataaagaaaccaatctcatcatcatcatgaccaacaaataactaacttacattaaaacatgagtgttgaaaaaccgcaagtagaaagagaacacattcagagacttacagagccaagagtgcattccttttccagggcctcccgcagaaaatgagccacctcctcccataagcatctgataagaattggattttacacaattaagtctttgcgtttgaaagatcaagtaatgtatttgagtcaggcacctgaagaacagttgcaatgatagcttccttctcgttattccatcctggcacttcaaaagcaagcgcaaaatgtgtagcctgagaatggtgaaacaaaaaaagaaagatattaggaataataaaccttcttttactcaaagaagcccattgaaacgtcatatttgtacctctccacccgtatgttgacggaaatctccaccgacatattgagactttggctccgcaggtcggggtacattagggaggtcagatagtaatggctcaaccacttttagaagttcttcatgatcaactccactagctgctaggaccattcgtgaagcagtgtaattctcctgaaatttcagaacaaaatgagaaaaaagacacatctacgaaataacaaaccaaaagccagtgatactagttccagcgaatgcaataatctcttgtgttaacggtcttacaaaaacaaaattctccaagacctccccagtcaatccagtaattgcagattcaggtgcatacaatggatttgccaatgcgccagagtaaccagcagaatgaactgcctccaaaagaaaacccattggattcgttgcgaattctcctatctctactttcacctttcggagctgccaggagaaaaatgatgaaaacagtgtaaaaaaattgcttagctttaatgtttgtgagatacatgcaacatgacatgaagtacctcttcattcacttcccaatccaaaaaagcagggttcctcacactatcaataagcacttcaaccatttcgggaacataggttttgagagcatcaattgtgtaacccatctgctctcgggatgcagaagctgaagtattacctccaatagcctctatttcccttacaaggcgaaaatggcttctgttcaatgtactcttgaatgccatcctttcaagcaagtgcgtcgctccacggaattgaggagtctcataaatagaaccacagtcaacgtataaaccaatggaagctgctggattctgaacaaaatttcactcaaaatcactttccagtagtttttaacaggaagttgatgttgggattactaaaagaagctctcaccggagacatctcagtggctatagtcagaccatttggaagagtagtggtcttaagtttgctaggctcaacatggtcagagagtggtggtggaagagagacaccagccaagggaatgttcatagaaggaagtgaactagagtagcctccacttagccagctggaggaagaagagctcgttgcaacagcactagaacttgcataacgagaagctcgaaaattgtggtttagaatgccctataaacacacacacacacacacacatcctaagcatcattaatctcttgattcaattaacattgtaaaaataagaactttcgaaacagagacatttcataaacctgcaaaaagcatgaataatggcaccagctactataaagcgataaaattgaatcaagatctataagaatctaagagaccctttaatccaaatccaaaaacaatgaatcatacaaattgttcaatactaagcattctcctaaaaaaaccagaatctcaatggaaacaagtgaagtaggacattgaccttaagggccttggctcgagaagctgccgtacggtacatgatgatgactgcgaaaccctagcttggtcagatgagtaccggtgaatgtggctgacgacgggagagagatagaggccgagtcagagctgaaaagaaacgagagaagggaacgattttttttcctaattaaggttattggatcgggcaattgcttctaattacattgataggcccatatgatataatagtcttggcccaaattataacatatagaaaagatgaatttaaagcccatgtattgtagtggtgtgatcctattatattttctctcaattatattttttttcttttctttttcacgtaccattgtgtaaaaattcaagtaaggtaacgacatttacatgcagtcacaaatgaaacaagaatttttttgaggtgtgtgtaaagtgaaacgaaaaaagtactaagaaagtttatcttctctaagttaatagaattattttgaaacgtagtatccacatatatagaagactcgtgtgtggtgcatatatatactgcataacttcaattgaactgtattatataactatgactatccatccatgggaagataagaatgagagccgaatgctaaaaagcaagggacccgaattaaacaaaaatgaataaaggagaaaggtttgtgtgattttgtcaattgtcgtcgtttagtggatgtgtaaaaatactaaatactataacaggtggtgtgggtctatctttttttttttttggtctaatgttaaatgtgggtctatcttaataatgcagaaatagtgcaatacgattcatgagtggaaaaaatcatatttgggtactctcatatatagtctcattaatcattatcaccgagtggggcgtacgatacactttttcttctttatctgttttcatctaatcatcatactgtatgtctatattatcgtagcattcatcatcgagttatgaaacttatgccaaaagaaaagaaaaaaaaatcatttgagattggttaaatttctattttaagatttaaaccaaaatgtttaaagttctataagctctaattaaagtctctgcagtccattaaaatggataattaggatttgccgaacttgaaaggagtaatgcacattttgatgctcacgtgaacaacgagttgtaacggtttcgctataattggaggcagatgagaaatggtcgtgtgtgagttttaataccacgtgattaacggagccacaatcatattcatgggccattctcatgagctataatttgaggtgtagctgagagatggtcaaatgccacgaactttgagtatttctttcttaactttgcatttttttagacgtaagttttttttttcatagcctacatttctttgacaactcataacctacattttgagaatttataaatgtcaatttatcatttaaccttctcacgataatgcaattcctatggtaaatgtcaactcataacagactctacgaagaatctacgacactgtgaaaatctctaatccaatattcaaaagagagttaaaaaaaaaaaaaaaaaacagaagagaacatctttacgatgctgctttcacgattttaaaattttaggtgattttttttggaattttggaattctctttacaaattttatgttgtaaggtagattcaattttaaaaaaaaaaagatatttagattaatacaagttcctaagtcctaactaatcaaagcttccatccctcgtgaagcacgagttggttgaatataaagtctctcaaaaagaaaagaaaaagtggttagtattggcagaaaaaaaaagtggttagtattggatgaaaagagaatttaatgttcgtattcaaaaatgttttatatatactatatagtatatatacaaaatcccaagattaactcattcatattccatcttcatctccatttctcacactcaaaggtgtttcttccttccctttaatgtactccttttttctttctttcacaaaatcgttatattgatttttactagttttatttgaattattgaatttctttatatgataatgaatctatgagaatatgataccattgtttaaagtaatgtcctagtggaagtattatagtcctcagattagattagtttcatcatcatgaaagtgcttgagtagtgtctgttcatggctcttgtgcgtttacagtttctaagaaatgggtactataactttaggttaagaagaaaagatggcgaaaaagttggaagctcaaggtggtcgtggaggagaagaatgggacgatggtggtgcttacgaaaacgtcaagaaagtgtatgttggtcaaggtgattctggtgttgtttacgtcaagtttgattacgagaaagatggaaaaatcgtatcacacgaacatgggaagcagacactacttggaacagaggaggtaaatattttgttttcaatgagagttctcttgtcatcaacattaactgatcatttttggttgtctttttttttttttgctagtttgtggttgatccagaagattacataacatcagtgaaaatttactacgagaagctctttggatcaccgatagagatcgtaacggctctaatctttaagacattcaaggggaaaacttctcagccttttggactaacctctggagaagaagctgagctaggaggtggcaaaatcgttggatttcatggaagttcaagtgatttgatccattctgttggagtttatataattccgtcgactacaccgctgactccgccggtatcaggtggtctgaccaaattggaagctcaaggtggtcgtggtggagatgtttgggacgacggtggtgcttatgacaatgtaaagaaagtttatgttggacaaggtgactctggtgttgtttatgtcaagtttgattacgagaaagatggtaagattgtatcacttgaacatgggaagcaaacactacttggaacagaggaggtacacaaatctttgtatttcttgaaattgcccaaaagttttttttttctttctttctagtattgatgtgtttttgtttttgcagtttgagattgatcctgaagactacatcacctatgtgaaagtttactacgagaaacttttcgggtcaccgatagagatcgtcacagctcttatattcaagacattcaaaggaaaaacttctcagccgtttggactaacctctggagaagaagctgagctaggaggcggcaaaatcgttggattccatggaacttcaagtgatctgatccattctctaggagcttatattattccttcgtccacaccattgactccttcttccaatactattccagcacaaggtggagatggtggagttgcttgggatgatggtgttcacgacagtgtcaagaagatatatgttggacaaggtgactcttgtgtgacctatttcaaagctgactatgaaaaggcttcaaagcctgtccttggaagtgatcatgggaagaagacattgcttggagcagaggaggttgtaatcttgatttcattttcaaatcttgttttctatagttattgatctagaaacctaaagtctttaattttgttgcaaaacgtgcagtttgtgcttggaccagatgagtatgtcactgccgtgtcgggctactatgacaagatttttagtgtagatgccccggcaatcgtctcgcttaagtttaaaacaaacaagagaacatctatcccgtatggactcgagggaggaactgaattcgtactggagaagaaagaccacaaaatcgttggtttctatggacaagctggtgaatatctttacaaacttggagtcaatgttgcgcccatagccaaatgatgtgaaaccaatctggatatccctgaaatttgaataaggttatgttgtgagtttatgaagttgtggtctagtgttgtattttgtttttcttaaggataatgcatctgtgtgctttgcttatctaaaatctaaataaagtgggtttctgcattgtgactttgcacaaacttcttttgttaaaatgaataagaaatcacatcaagaaaacagaacaagaccacaacgagaagacttgaaactctctgaaggtatataaacaaacagaacctagtaaattagagtcagcttattcaaaacttttagaccatcatcaagatcattataaacttggagtcaatgttgcggaaaccaatctgctatccccggaatttcaaataaagagactagagaattactttgaacacacttcttttattaaatcggatcacaaaaatccatcaaagacacaacagcaacaaacacaaagagaagacttaaaacactgaagcagtaaacaaacagagagaaataaagtagaatcagcttattcaaagtgtgtaaactatcatcaaaagatacttaaaatctccataattatttggttattggcgcgacatggactccaaatttgtgaagtagatcaccagctcttccatggaaaccaactatcttttgaccgtccttcttgaattcgaaggctgtgccagctcctattccaaaaggaatagatactcgcttattagtcgtgaacctaagcatatttacgattggttcattcccaaagattgcatcgtaggtgccatcaactgccgtgatgtattcacttggatagtcaagctcaaactgcaattcaagaagcacaaaaaagaacaaaattgaggataataaactatacggttaaacgacgaaagagaaagcaagaactaataaagtatacctcttcaaatccaagcaatgtgggttttccatgttcttttccttctacaacctgacctgctttgtcgtacacaaacgagaccgctccaataccatcttgggcttgtcctacagacactttccttacaccgtcgaaagcaccatcatcccataaagttcctgcctcactaccagctccttctagcttttgggattgtgttgcaggagtcaaaggggtggtgcctgatggagctaaataagctccaatagcattaacatactcaccagctcgtccgtggaacccagtgatcttgtaaccttccttcttgaattcaaactttgtgccagatacaatcccaaacggtccagctgttttgttcttgctagtcttgaaaatcagcgttgtcactacagtatcaactccaaagtttttttcgtagtatccttccacggatgttatatattcgtctgattcaagctcgaactacatagataaatgcataatgaatagtgaaattagttgaaaagggaaaccaataaaaatagttggtcttaagcgtgcatacctcttcgaatcctagcaatgttctcgttccacgttcatctccaaaaacaacctgagaaccatttttgtattcaaacttgacagctgcaacaccatcttggccttgtcctacataaactttcttaacatcatcgtgagaaccatcgtcccatacagctcctgtctcaccaccttctgcggtcagcttcaaaggggttgaaggaacaggagtggtggaggattttggaacgaagtaagctccaatggaattaacatggttgcccgcgaaaccgtgaaatccaatgatcttcttgtcttgaacttgaagagtaaatttagtatcagtactaggttcgaaaggatagatgctgacctcataagtgttcaagttcgttttgaactggattcctagcatgacggtttcataccaaccctcaacagaaacaagatactcatccggatggttaatcacaaactacccaaaaaattaaaaagggttcacaatgtcagtaatataatctttgtataaaatatagttagaaaccttgaaagaaagttgtacgtaagcttacctctcttggattttgtctactttgttgtttaccgtgtagaactccttgttttgttactccacctttcacatagtcgaacttgacgtattgaataccttccccaccgtagcttgcgtatatcttggtcacgccatcgtaatcggatccatcgtcccatgatgtacctcctgtactgttgccttgtgcttccaatttctgagcacctgaaccggtaccagttccggttccagtgccagttcctccggtgccggtcccagtgccggtcccagtgccggttccagtgccagttcctccggtgccggttccagtgccagttcctccggtgccggttccagtgccagtcccagtgccggttccagtgccagtcccagtgccggttccagtgccagttcctccggtgccagttccagtgccagttcctccagtaccggtgccagttccagtgccagttcctccggtgccagttccagtgccagttccagtgccagttccggtgccagtgccagttccagtgccagttccggtgccagttccggtgccagttcctccggtgccagttcctccagtaggtatgggagaatagtgaacgtcgatggtgttgagaacattgccgctggtaccaaggaaaccggagatctgtttaccggtggcttccggagcagaaatctggaaaccggatttggtaccgtaaggtccataagaagtcttgttggttgtgaaagtcaacgccgtaataacttcttgcgtactcaacgatttgccgtaagcagaaagggccgttatgtactcgtccggagccaaagtgaactgattatgtatgtatatgacattaaagttaattaacttaacaaaaaaattacacattatatctgtaaaaataagtgatcttagtgtgtttttttccacaaacctcagcagatttgggaccaacggagccgcgaagctgggattgaagagcggtggctccgtcgtacgtgacctggattgagtagatgatctcatcgaaggttagctgcactttcttcacctttgcgtgtgatccatcgtcccaagacatcgttgttgacttcttttatctatctgtgataaccataaatggtttatttgttattttcatttttttggatcatttttggttagtactatgaacaggtacaagtaacattaatactaatccggttctagctctaactcatacttatgttgaaagctggtcaacaccaaatgggtttgttggtataaactatctttactacagtgaatgataattctctcgagccttaaacgatcaaaagtcaaactgatggttgtgaaaacaattgagataggaaaagatcaattgattgatctattttcagaatatagatagtttacacatacacacatatatgaaagatagatagagagagggggattacctgatcgtagagactatgaatgcgaagatgaagatgaagattaggtgtgaataagagaggctactggttggatctatatatcgagtcgagcttagttattatttaatttcaagttattataacatttactacgcaccatatggccaatataaaattaatcatgttggtccacacaagtatgtgtaataattgttgtacaaataaataaaagtatgtaataattgctcatatagtcagcaaatcggtaatttgtttttgaacttccctacccaaaaatatatagttctttttctaagtatcgtaattgactttttgtatattttctttgtcagattttagattatggtatcccttttatttttcatcattttgtatttgcaaatatatctgttaagttttttttttaaaataaattaatgtatagtcagaacaaaagatcttttatctaaaagataatttgccatatactaatctttttcagaaaggaaaatatcaaaattgcaaatagataaaagtacattttaaccctattttaggatgttctatgtgactatgtaatagcatgttacatttgaaaaataggattgggcccaaaattatgtgattacaggatggaattaaatttcaatggaatgctctttgatcgatcattttcttttattattttgtaaattgatcgtgcaacgcatggctaattaaaaaatagaaatatcaatatagagtttgctgtcacaatcgtgttatcttatttcattaatacttgtatcgaatcgttggaatccatcgatccttatgaccttatcgtcaattgtattaatatatactagtttggaactttgaattattcagtacgtagctaagctggacgtctatattcccacccgaaaaaaaaagttggacatctatattttttgtttctcttacagaatcaagaaaattaacgaacaatcacgtgttcgaatgtattggatagaacattcgtagacagctactccacgaaaaaatagtgattaaaaaagtatattttgaaatctatatatacatttttgtagctattttagcaaataaatcctgaacttatttacgatctaatgtcattagcattaatttttttttccaaaataattaattttactttaaactttttatttaaattgtcaatcacattatcaatcaaatttaatcctaacaaacttcaaatcaatcccttaaaattagcataaacatatttgttaacaatattttaaaacaaagttttttgttaaataaatattattcttactaaacgttttttgtttaaataaataaattttgtatttgaacttatttacaatgtcatgtcactgacattaattatttattaatgaaaatatttaattaaagatttaaatcttctaaatccttgcttttagagttattatgtcattactttataaacaaacatattaattttttaaatattattatttatatatttaaaatttataaaacattattaatatttaaacttataaaaagtttgatatatcataatttttaacatcattatataatatatagagtttaaaaaaatcttaattttttccatcatattttatgattcaaaattttaaaaatgaacatatattaaccaattggcaaaaaatgtgtgggttcaacgtcccgcatcgacaaaaatatatagacaatgatttataaatatatcataaataagatcaacagtaatataaataaatggtttttttacgggatgggtttggcgggacgggtttggcagtacgttacttaataataattgtaaactataaaataaaaatatattataaatagatataatttgcaaaaaaaaattatactaactttaaaaagataaattgtccccgcggtataccgcagattaaaatctaattcttcttaatttccgaagatatatatggaaacatatttttgacttttggcaaaataaaaaaaatgcgactcgtggatctcgtggcgtttatttctattgagacagataacaataatgatgacttcttttaagcttaaaaaatacgttatcacactttgagtttgagcacgtcgagcctactacactcgtgagacgtgtgtggatcagatcagatcagatctcctccttacgcggctgatccaatataaaaatattgtaaatcaattagaaagatggaaaaatccaagattaatatattgcaaactgaatttcaaaaagggaaaattccaagattagcattacatgggctggatcagttgattggtaaggcctaaatgccaaatcactaaaagttaggacgcaatctatcccaggtttgccaaagccgagccaaattaatacattccaacaatccttttttcatatactttcatttttttatcagtatgatcatgaccacccaattaaccaatttttacttacaaaacctaatactattttcaaaaaacttttatttatacctaaacaataatgaactttaatctatgattatatgatctatagtccccatgtaataattggacttcatttaaacatattaaacatatattcgcgggtctttacctaaaacaaaattaattcagtaaaatgttaatctgaatacgctaaacacacttgcagtaacttaatttagtatggatcgaacgttgttcacgatgggacttaatgtgcaatttatagggatggaatcaaccacctttattcaaatctatcatacgtaacattatataaagaccaacatcacaaaagagaacgcttaaaaacatttaaacatagataggcataaccatcataggtataacaagttattttcaagagatcacattaacaagttcgatggaagcgaaggaggtagctgtaatgtgatcagttggtgagtggcatgacatggactccaaactgatgaagcaactcactggcttttccatggaagccaacgatcttgtgcccttcctctttaagttcgaaggctgtgccagcttcaagtccaaagggagcagacgtttgtttattagtcttgaacctaagcatagttatgattaggccatcactcccaaagattttatcataggtgccttcaactgcggtgatgtattcacttggatagtcaatctcaaactgcaattaaaggattttaaatcatatagatcaatctgcttactgtcaattagttttaagaaaatgaaaagatacaacatattttgaattttgatagcaaaaacaaaaaatacctcctcgaatccgagtaaagtaggctttccatgttcacctcctacgatattctccgcgcctttgttgtactcaaacttaacggctgatatcccatcttggccttgtcctacgtacaccttcttgacaccatcgtacgcaccgtcgtcccatgcagttccttcatcaccaccaattgcagatagttttttggcaggagtcacaggagttgtggttgtagcaaaatatgctccaagagcatataaagcttcaccagcgcgtccatggaagccaacaagtttaccaccgtttttgtccttgagtacaaacttcttttgcgtttccaatccatagggtggagatgtttttcccttgaatgtattgaaggtaatagatgtgatgatgtcagagtcttggccaaacacgttgtcgtaggtcacttgcactgctactatgtagtcgtctgcatcaacctcaaactgcaatgatcgaaaagatacctctcgtgagtagagatgttgtatagattaactcaatctagaccgtattaggtgtgaattggtctagtcttaattggttctcattttacaaagctttaaaactgatccgaacaaggctaataagttaaactcaaagagagtggtagcaaacaccactacataccgtttcaaatccaagtaacgttttctttccgtgttcacctccttcaacatcctgagagtccttcgcatacacgacgttgatagatgacacaccatcttggccttgccctacatgcacctttctaacgccatcgtggacaccatcatcccatgaagctcctccggcgccaccccctgcttccactttttgagccatctttttgaatattaattagttacctgtacgtattagtagcgtacacgattagttttattaaccaaactctacaaaactattatcagacgagagactgagaatttacctgaggagagagggaacgagttattgatatgcattacaatgaccttcatgcgtatttattgattatttttatttctggataaaatgtgtaattattgatatcattgaatgtaggccactaattaatctatagaaatgttaatataatctcgtgatccacgagtcattaaaatattagaatgttgtgaatatgaagcaaataagttgaattggagtagttgatattactgatctgtagttttttttccctttttttcctttgctcacataatacatgtttttctcaacaatagttgttgatcaaaaaaaaaaaaaaatcaacaatagttacaatttttgaaacctggttagattttacccgttatccaattgctcatatggtttatatatatatatatatgtgtgttttaatattatttgatcattacataattaacatattatatttccatatatattcttaagaagaaaaatatgtgtttgaaaaaaaaaaaaaattaaacatactgtataataaattaaatctagatactaagtggagtgtacctccttcgaaacggactgcgcgtagtctggtgttggattttgatcaaaatgaccaattctccaattatggcgaagttttcttgtttctcactttaaataatgctaaagtcttaaagataattgtttccatcatacactagatgccgagatactgagtatgaatataagcttttctcctaatgtgcaactgatatgtataataatcacccacttttattaaagccaatcacatataatattacaggcataacaacttcacaaaacaccatacttaaagacacttaaaacatagataaacagaacaagaaaaattagaaaacttaaaacttaatgaagatatcacacgtgacaaacttggtggtatagaagagacatatatatatatatatatatgtgatgatcagttggtgacaggaaggatatggactccaaactgatgaagcaccgcacttacttttccatgaaacccgacgatcttgcaaccttcttctttgagttcgaaggctgtgccagcttcaattccaaagggaggagacgttttcttattagttttgaacctaagcatatttatgacttcagtctcaaaaccaaatattttgtcatatgtgccttcaactgcagtaatatattcacttggatagtcaagttggaactgcaattgatggaaaccaaataaaacaattgagttagttaaaatattttatatcaaaaatggagatattcaacactagctaatataaaatatgcatgattttatccacgaaagtttatgtggattcccttacccaagcatatttttgtgtaagatattcatatcattttgtaaaaacatttcacattcaaccacaagagaagaaagcaagaagtattatacctcttcaaatccgagtagagtatcatttccatgttcatctcctacaatatcctcggcgcccttatcgtacacaaacttcacggccgatataccatcttgggcttgccctatatacactttcttaacaccatcgaaagcaccatcatcccaggcagttccttcgtcaccaccaacagccggtagtttcttggcaggagtcaaaggagttgtggttgtagtaaaatacgctccaagagcatatagaatttcgccagcgcgtccatggaacccaacaagtttgccaccgttcttttccttgagtacaaacttattttcggtatctaatccgtagggtggcgaggtttttcccttgaatgtagagaaggttatggatgtgatgatgtcggagtcatagccaaatattttgtcataggtcacctgcactgctacgatgtagtcgtctgcatcaacctcaaactgcaaaaatagaaagatatattgagtaatagtttaaggtttaggtttggcttgttagaaccataattatacgtataaggcgtcaattggtctggtaattattggttcttatttttaatatttaggtttggctttagaactataattaatcattagaactgatacgacctaaattctaaacatggctaattggatggtccgcgagctattatcctatcataacgttatatccctagtattgagagtttagtagttttaagaacatataatataaacttaagcaaaataaagacaagattagtggattcgaagcaaaacatttttacgtaccgtttcgattccaattagtgacttctttccatgttcacctcctacaacttcctgtgaaccattctcgtacacgacattgataaacgaaacaccatcaaggccttgccctacatgcacctttctaacgccgtcgtgagcaccatcatcccatacatctcctccaatacctccttgtgcttccaccttttgagccatcttttgcttgcttttgatgtctttcgaattacctgtaattacgaacacaattttttaataaccaatatttacaaaaatactatcagatatgagagaataagatttgacctgataagagatagatagaaagagtcgagtgatccatctacgaagaactgcatgggggtatatattgatttttttgaatacatgccagcagttttttttttttttttacaatcatgccagcaattaattaatagaagatattgtataatctcgcgatatatccacgatacgtgaaactattaaattgttgtgaatatgaagcaaatgagttgaatttgtgtattaatgatatgatagtagcacacgtttcttaaggagtagcataacggttagttatcggacataatgaggtaagttccatttttggcatgtttctgtttgaaatagtaacatgaaaggaaaattgaattctaattgcaaacggatggtagtcaaatttggtttggtatagatttatattacttgtggtcattggaatcttgaagcacgaaaaacttctaatgactgattttgtcggaaataagatgaggtttcattttattttattttgccaatgaagttttagttttcaagatggggaaattgtgtttcaggatattacattgtttcatttcaatattctacaagatttgataattgttaatgttgtcgcaatttaatatatcaaaccaagaaaagaaaagaaaacaaaaacatttttcagtagttgttgacagcaaaaaaatagtctagcgtacatcattgcgtgcctgaatgtggcaagaaagatttgtgcctaagtatctcgttgtttcgcgactcgtgaatcgcgatctttagtcagattggggttataaaaatggatcagcatactaattcaaaatcttctataaaacgttaaagttgacgtgtacgtcgaccctgaaactcgttgacgtggtgtgttgtctacgcgtgttattcaagatccagattgcggaaatttagttttcttataaaaaatccgctaggggtaataaaatacttgaaaaacgattttcttcacaaaacatgaattcgctcgcaaacaactatttcaagtagtaatgttatatcattctactctactgttgtattaaacttctctcaatagactactaataaaaaaaaggatatgaagaaaaaattgctaagaaaaagaagaagaggataagaatataacaagaaaattaatttcatggtgatttcaaggttaccgataattataattctaataactaatcttttttcaagtttggttgcttggttgaaacgagagtaaaggagagtaaggtttcgcagcttgttggtaagcttttcaaggattggtcgcttctcactaattatgagcacaatagacggggtcgtatttgggttctatggcgtaagaatgtgcgacttagtcctatttataagagtggtcaattgctgacttgttcggtgaagctagaagatcgacaggatgaatttttctgttcctttgtctatgcttcaaactacgtggaggagcgaaaagttttatggtcagaactgaaggatcattatgattctcccatcatcatcagatttaatccctttggcataatagtcttgccagcttcaagaccaaagggattagatgttcgcataatagtcttgaacctaagcatatgataatgaccgcagagtcacttccaaagatttaatcgcatgtgccatcgacagcggtgatgtattcacttggataatcaatgtcgaactacaatgaaatcaagcaaaacaacttaatcttgtccgatggaaaccggtctgactttaagaaggtataaaataactagtatagtcacaatagtcaaagaccacaatgcctagggaagttgtgggattaaacgggtcacttattaaaaaaaaagtccgtatctcgaccaaccaagttataaaataaatgggttcaaaatgcgtttggcccgtttaggccgcagcgatatataagtacctctttccgtgttcatctccagcaacaacttgagaagcattggcatactcaaactaaccgtggacacacaatcgacaatcgtggccttgacatatatacaccttaacactgttgtaagcaccatgccaccatcgtcccatgcagttcttttatcactaccaagttcaccttttgagccatcattgtttgatttttaccaatctttggagttttttttggggtaagaagtgaagtgaaaaaaaatatctaaagtttaaaccgttcaccaataagactctaatctataaaacaaccactagactacgaaacattttttcttaggagttactaaaactgcaaaaaacaaattgttaattgcaactattaaccaaattttactataatatagtatcataagagatataaaggatgaggataagtggtgatccatccgagtgggctgtacgttaatttattgacctcttggaattagcaaagatattttaccaaaaaagaatctaattaatattcaagaatagatccacatataggcctcattatttaattaattaacacaattctaaataatagtaatccataattcgtgatccacgttgagtattaaattattttacccaagaaggctacatacttttattattttctttatttttggccaactcatattatttgcaactaataatattttttagccgaaaacttctatattttggccacaatctagataaaaaaaattacgcaggtatttttgttttggagaaaagaaaacacctatattttggatccaaaaaaatttacttttgttttaaattgtacaattcgtacattgagatttttgtttaattatagtaagagaattagtatcagacgcaaatgggaaatatatatcggaacatttggggatataaaaattagaagagatgaaacaaacttccttaattaaaatggaacacaaccacatcaaagaaaaaccggcaacacaagatacaacacttaaaagttaaaacacttatcagaggtcaccagaggcatgaagagacctcaaatgaccaatttataagataaagataaagatctccatggaatcaaagataaagatcttcatggtcagttggaaacgggacggacatgaactccaattttgtggagcaaagcatcggctcttccatggaagccaacgattttgtggccttcctctttgagttcgaaggcagtgccagcttcaagtccaaagggaggggacgtttgcttattagtcttgaacctaagcatagttatgactgagccatcactcccaaagattttatcgtaggtgccttcgactgcgatgatgtattcacttggatagtcaagtacgaactgcagttattggaaccttgaatacgtcatcatggaaatcgaaagaaaatttgaattctctgatcaaagcatatatatagctatatgtatataacattcatcaacaacaaaaaaaaaaagagaaagaaaacattatacctcttcgaatccgagtagagtactctttccatgttcttctcctgtgacctcctcagggcttttgtcgtatacaaacttaacagccgatataccatcttgggcttgtcctacgtacaccttcttaaccccaacgtaagcaccatcatcccatgctgttccatcatcactaccaagtgccggtagcggcttggcaggagtcaatgggatagtcaacggagcaaagtaagctccaagagaattaagattgtctccggcagacccatgaaagccaatgatcttcttgtcttgaacttggagaaatgatctagtaccacgatcgtatccaatgaaacgagaagtctttttgttggatatgaacctaagcccttgaataagaccatcaggtttataccaaatttcaatagaaactagatgctcctcaggatggttaatcacaaactgtagagatcaagttcaatatgtcaatacttcaacgtaaaacaatagattttctataaaaattagaagaagtcaaataagcaaggaaaatgtataggaaccggatcagttggaatggtactgcctttgataccacgaagaggagtttgttcggtttgtccgttcttgacgtaatcgaactgaatgtattgaattcccattccgcctactgcaacctgaatcttggtcacggcgtcatgatcggatccatcgtcccattggttgcctcctttccctccttttgcttcaaccttttgagccatattttgcttgctgatcaatcttactatagttactataattggaaaaaaaaacaaattgtgaattttcaattattaaccaattttgtactaatagagaggaaaagagagatgaccttcaaaagtgagtagattgtgatcgatttaagtgaatcataggtgtttatattgacttcttgcatataaccatatatccgcatataggatcattgatcgtactagcagaaataataatctattatttcgtgatccacgaggcatatttaaaacattaccggaagaaatacatgttcaaatattcatatactccttttttacttccacagcttctcaactaatcgtctttatattggtgttggccaatgaaacgatggcagcaagctaattagttcttttaaaattcacagagtcgtcaattttattatatacgttattacttgtaaagggtgcaagttgcaatttatataagtcagaattctacaattagtgaccccctttttaggactctaattggttgacgatttgataagtcttgtaagaacatgtttccacagcattgtacattatttcaaacagtaaaagtataattgaaatcacctaagagaaattagaaccaagagtatatatataatacaattttctgtaacgctcaatctagaaacaagaaccggttcgtattttttggccaactcatatacttttaactaataactttttatgtttggagaaggccaaaaacttcaatatggtcacacattctagataaaaactttgtgcaggatttttttactgagaaaatacgaacaactatatatttgatccaaaaaagttaacatttgcattttaaattgtacaattcatacgttgagattttagtttgaattatagcaagtaaaattagtatcagaaccaaataatggcaaaagtaagtattatagaacatatagggaaactaaagatcagattggaacaaacttcctttattaaaatagagcacaagaagaacaaagaaaaaacaacatcgcaagagacaacgcgtaaaacacttatcaaagatcaccattcaccagaggcatgaagagacctcatatgagaaatttagaagatagatttgataacttattagatgcatggaatcaaggataaagagctccatcatcagttggataaaggacgaacatggactccaattttgtggagcagaacatcggctcttccatggaaaccaacgatcttgtggccttcctctttgagttcgaagactgtgccagcttcaagtccaaagggaggagacgtttgcttattagtcttgaacctgagcatagttatgactgagccatcactcccaaagattttatcataagtgccatcgactgcggtgatgtattcacttggatagtcaagtacgaactgcagttattggaaaccaaataaaacaattgaatacattatgatggaaaccggaagagaatttgaattctctgatgtataatttttacattcaacaaaaagagcaaagaaagtattatacctcttcgaatccgagtagagtactctttccatgttcttctcctgtgacctcctcagggcttttgtcgtacacaaacttaacagctgagattccatcttgggcttgtccaacgtacaccttcttaaccccaacgtaagcaccatcatcccatacagttccgtcatcactaccaaatgccgttagctgcttggcaggagtcaacggagttgtagtagtcaacggagcaaagtaagccccaagagaattaagattgcccccggcagacccatgaaagccaatgatcttcttgtctttaacttgtagagtgaagtgagtaccctcatcggatccaatgacatcagaagtcttcttgttggagatgaacttaattccttgaatgataccttcagggctataccaaccttctacagaaactagatgttcgtctggatggttaatcacaaactgtagaaatagatcaagatgaaaatgtcaaaacttcaaaatataacagtatacatatagaaagaagaagattaatgggcaaggaaaatataggaaccggatcagctgggagaacacggcctttggtaccacgaagaggagcttgttcgggttgtccgttcttgacataatcaaactgaacatattgaattccgtctatgcctgctgcgagctgaatcttggtcacggcgtcatgtgtcgatccatcgtcccataggttggctcctttccctccttgtgcttccaccttttgggccatcttctgcttcttgatagtacttacgaatttctgtagttgcaaaaataaattgttaatatctactattaaccaatttttacataatagagaagaatagagataagaccttttaaagagagtagattgttatcggtgctatgatcaattaaagtgaattgtatgtttatttatattgacttcttgatattgatcgtactagatgaaataataagggaaataataatttattctttcgtgatccacgaggcatatttatataaaaagcattactgggaaaaacgcatgttcatatacatttttttttttagataatgaaaatattcatatacttctacttgcacaacttctcaactaatcgtctttatattggcgttggcccattaaacgatggcagcaagctaattcattgttttaaaatttaaagaatcgtttatcaattagattatgtacgattaattatttgtaaagggctaaagttgcaagttgcaacatatatatacgttctccttattaagagtctaattggttaagatttggtaattattgtatgaacatgttttaaagccttaatcataatttaaaaacagtaacgtttaattcaaatcaccgaagattaattagaagtttagaaccaaagaggagactagatatatcatacaatattccgtaaaaaaaatctagatacaagaaccggatcatatggatctagccataaagaatactccaaaatatcacaactagttttaataactcttagggaaatttacgaattcctctgaattcaaaactgctttttttttttttataactgatttatgaaatattataaaattttgcgaagaatatttctaaaacaaattctgtattcgttggtaaaaagatttataattgtatcatttacactggtactaaatattaatctaattgagagacgcttaatatgattcataaattatcaaaaaagctttctagctcgactgcaaatgtaccatgggatattccaagaagtcgcacgatcgaatgaaagctggtacgtataaattattaaaagttgatctagatcatcaatcaagaaaacatcctatttaacaaaaacaaaggttaacatgtagtatgtatttatttatataattatctgttgcgaatgtgaaacaatcgatagaaattacactagctaagtaattaataataactatttgatcatctataactatattattcaatacttatatgatcaaaatatgtaagctagtggtttttggtatttcttgttgatgtgttacctttctagttgaaacctgcatatttacttattattaaaaaataaattcagtaataatatacctacgtcttggcattatctatttaaaatgaagtgggtacaaacttataattaatataaataaaaaagagattttaatattgcaatcatgttcccatcacttcatcagtcatcataaatagcaccccaataatttaacttagagtaaacaatagttattgagatatgaaaatcattccaagatagcaacagccagccaacagtggacttttgaaaaattaaaacaaatacgtaaacaaaattaaactcaaccataatcatgaatattttgatgaagatatacctttccagtcttcgatctacgttcgtgcgtattgagcttatcgttcttctcgttctcgatcgtcttcgcacacaaggccaagaatatatatatattttttttaatgggaaaaaaataccaaatttacgttttgttttgcatgtgaaggtactttagtttgactctttttgtcgagttattgcttccattcgttaaaatatttttttcaaaatactacaaaatggaaaatttatgacaagcaaatatataaattcttgccaaaaaagtttttttctttgtttttaaaatgattgacaacattttatcttttgacaaaaaaaaagacaaaattttatctaataaaggttacaaattaaacagcttttatttacgaattaaggttacaaattaaacacttagagagtgggctcggttagcctaccttaaccttcctcattgcccgcataggttctactccaccagaccaattaagtcccaccagattcacacttatgaatcttaagagaagaccttgataaaaacacacacacacacactgacacacacatgaatcactaacatgagtgagtggtgactagttacacatctcaactttaaagtctcattaagtgttactatttactataattttgatcgtataggttttagggtttagttgaatagttagttttcatttatcctcatgcatccaagtatagcataacacaattatcagtttatcacattccaacaaaacgatgctttattcaaagaagcagaccacttcataacacataacaaacaaacgaagcaagacatagttaaaagagagtaactagaagctgaggagtaacaaacagacatggctttttaattttattctaggaatagaagagaaagctcacaaagctttaagacttggtgatttgggtgacgtggataccaacttgatgaacaaaatctccagctttgccatggaatccaacgatcttatgatctttcatctccaacgcaaacgttgtgcctgcatcgagcccaaacggtggagaggtacgcttgtttgtcttgaacctaagcatcgtcaccaactcgccttccactccaaataatttatcgtaacttccctccaccgatacaatgtattcatttggagaatcgagcacaaactgccacaaaatacaaagaccagtgaaacttggatctcaagaaaacattattaggtcaatacgagaacagagcacaaaaacctcctctgttccaagaattgacatcttcccatggccaactccagctacaagctccttgcgattagcatactcaaacttaacaaaagacacaccggagtcaccttgtcctacatataccttcctcacatcttcatagaaaccatcatcccacatggctcctccatctccgccttttgcttctagtttcttagccggaacttgtgtggggactggcgctggaaccggtgcaactggagctggaactggcgcaaaatttgctccaagtgctctgagagcattgtcactttcactattacgtccacggaatccgacaagcaccgcaaggacgaatttcttactagacacttttccaaatacaggagagattctacactttgatgttttgaaagtaagcgaggttacataaccacaaaaatgtaagttccttccactgatgtaataaattcatttggataatcaaccttaaactcttttggttcttggttcatctttccgtgagaatgccgaacagatgtgcttcctttaacatacttgaacttaacatagcttaggtagctaccatcttgtgtaaccgatattttacttacaccatcgtaaacaccatcatcccaagcatatcctctgtctccaccttgaggttctaactgcttcacaggagaagaaggcgcgagaaaatgagctccaatagcaaacagagcagtaccagaccttccatggaacccggtaagttttgctccacaattaccttccaccacgaaatctgttttaaaaatcgctatctgaccatacatgggagattttctcccgtgtgatgtcttgaagataagagacttcacgatagttgtgttgtatctcgcaacatcgctatagcttgcctgaattgatgtgatatagttaagtacaaactgcaacaaagaagaaacagagcaaaaaacagagaatggtatagtcaacacatataattagaaatgcagtatcatatgtagacaaagttatgcaacctcttttagtactccggtgacacttccgtgcatttgtgtctcgaatttgccgtctttctcgtattcgattttgatacaatccacgccgttaccgttttccccaacaatcactttcctcacaccgttgtaaccaaaaacgctatcgtcgaatggatctcctttgttaccaccgaaaggtcctactttctgtgacatttttaactgaaagagtcaatagtaatgacatcaacaaactgaagaatttataataatctatcgaaacagaaatctaatgtcttagtgaaaaaagtattttacacatctaacatgaaccctactaacttctttattttattataaaattccagcatttggatgtaacactaatttatcaatcgttttcaactaaaacaaaatatgctaaagacaaatactaaattttagggaaaaaaaggatgataataaggaagagcattttacaagttctttgagatggtcaattgaaattttcgtagagagatcaatactcacggataagattatgagaaagtgacaaaccaagaaaggcaggacttggttataagaaaaagaaaaaaagaaaagagacaggcatgacttacctaaatatttcaattaaaatacgaagtgcgaacaaaggaatgcattatgcatgggtttaaatagtgaacgttgaaaagaaagttgaagcatcaatacatcttggatatgtgattctctttaatagagataatgttttatacacagttataattaaaagaaagatcaccattcaccattgtaaagagaaatcacattagcatagttattctcattagagaacacacaacacatagtttaaagagagtggctagaagcagaggagcaacaaccagagccctcctcaattatttgaaggtcagaagcaaaaaaacaattacggcctattatttgaaaatgtttttttttttttaattgaagaacaatgaaaaggaggttggagattcaaagtttcgaactctgcacctctccatgtgggaagatgactttgaccactagactagttaaacaattacaatatgaatcctgcatgggattagttgtaaacgcgtatacaacacatccatcgttatttatttaatattaagctatgactctcccttctagttcgcatttttttatctggggatttattttaagaaaataaacaatttattggataaaccacgaaacataaaacaattaaacatatagaaaacgtttaggaaaaaaaaaacatcaacaaaatggacaagctgacgaatgataatatggtggtatcaagacccttcccttattgcatcacaaacgttcatcaccaaatctgccttaattaggcagagtcaattccgtaaaagaagagatcatcaaaccggtcattggttggagctttaccaccatgcatcacaagtcctttcttgccaccaatggtcgcagttgtggacgcggtccatcctctgctactcggagtctcttcctctccaccaaacttatccagcctctcccattgcaacgtctctgtgtccaatgcaaaagttccatcggtcaattgacctggacccacgtgagctagcgggtccatcgcaatttcacctccaaaaatcacaatgtgtttcccaagagccgcactagcgaatacacttctttcggaaggcctcacaccgaatgtttccacttgtgtccacttgtcttgaacaggatcgtagtaatgaacatcatctacttcacatccgttaaacccatacacaacccataccttcccttgcaccacttcgagccctgctcctcctcttgcggtaagggaatctcctggagtcgaacaatgaaaccacttcttatcaacgatgttgtaagagtctagtgtattgagtcgtgccgtagcactcactccaccgaaaacgtaaacgttttcctcatcggctgccattgagtggaaactacgaggagtgggtccttcttcgaccggagttagcagtttccactcgtttgtggtcgtgtcaaacgagtagaaaccgttgtattgacgtgaagcgtctcggcctccaaagacatagagggtcgatcctattgacaccatacagacacctaggcaagagagggttggaatgtctcccgtggctggagaaatggaccaagtccggctctcgatgtcaaagacgtaaaggtgtttgtcgatgggctgatttggtgtgaactcaccaccaaaagagtaaatcttgtttcctacctgtgctatgtcatgcgagcatcttagccctggaccatctccattttcatccaccttataattaattaataatacttgttagttaggattttttataatatagagtctgcttagtgaactagctcccatggtgatatataaaagattactacctttgtccactttccatgcaagtttggagtgggcgacaatgaaatataagccccgagggagtctagaacgtcggtcgaacgtccgtgaaacccaacaatttttccaccttgtagcacaaacttaataccaggtctttgttcgataggctgagaggttttgcctttataagtcttgaatgaaagaaaagtgatcatctctgaggtcataccattaactttctcacggtatccttccacgtatacgatgtagtcatccgcatcaatctcaaactgcaaagaaaccaaataattttgagtgaggttacccatataaatatatatatatatatatccttttgacgaatcacaacatagaattatctatttttgtacctcttcaactcctagctctgtcttctttccatgttcatctccaacaaccacttgagaaccattgacatactcaaacttgacgaaggctataccatattgggcttgccctacatatacctttctaacattatcgtaaacaccatcatcccatatatctcccgtgtcaccaccctttgcttctagctttttggcattcaagggggttacattagtcaacggagcaaagtacgctccaagagaatggagattgtttccagcgaagccataaaatccaacgatcttcttgtcttgaacttggagagtgaacggtgtaccatcttcatatccaatgagatcagaagtcttcttgttggatttgaacgttagccctagaataagtccttcagggttataccgaccttctacagaaactaagtgctcctccggatggtttatcacaaactgtagagatcaagatcaaaatgtcaatttcttaaaaagaacattatcaaaacaaacccttgacaatatataacctatatatatatatatattaattcacgtcaatgtccttatagataaaaatgaagagataggcaaggatagtgtataggaaccggatctgcttcgaaactacggcccttgacaccgcgtagaggggcttcttcggtttgtccgttcttgacgtatgtgaacttaacatattcaattccgttcccgcctgctgcgacttgaatcttggtcacagcgtcgtattcggatccatcatcccattggttaccgccatttcctccttgtgcttcaaccttttgggccatctcttttgctttcgtttgatcaacctcttacgaatattatctgtatttacgaattttacttgtaattacaaatattaccaaatcttatacatagtacaatcatatgagagagatgtggagagagctgacctgagagtgagactgaagtaatgatttgtgtagtaaacattgcattggtatttattgaccaatggaagaagatacacgcgacatattttttctctactcgttgatcgcgaggcattaaattagtatatattaaaatatttttctctatgtaccaaataaattttgtttaaagatcctccgtaagaaggttcgttgaactgcaacattgaattttttttggtcaaggcacaaaaaattaggtggtgcagcttattacgggattttagagtagtgtttctctcccataatcgtcatgtgcttttgtttcgatgaatagcttgatggaaataaaacagatatgtcatctatgggatattgaaagtatgtgcagtcatcattttctcgggtgatctttgaaagtataatagtatagttttactcgccatttaatctttagcagcgataaaaaatttaacaaaaaaaaattacgaaaaactatactattatatattcagcttagagatctcgtatcattcagaatcacctccacgttcatcaaatcagtaaagcaccttctcgcatcgtccttcgctccttgcatcgtggcccaatgatagtgttccatgttgtcataaattataagaatagacccactttatggctggtttgtgttgcaagtgcatgtataaaatagagacgatgatatatttttccacgggaattatcatactggaatagatagagtccaaactatgatacatattgatattggatattccccaaaacgtatatttatttagttcaaaagtttgaaatctcagaacacaaaaacattggtttaatcggtttataatctacaccaatcccaaaccacataaaaccaaaataataaaataacattatttttttggtaaaaacattgattaagtatgaaaatatatctatgaagatgattcaattaaatggagaaagtgaatcaaaccttcttcttgtcgcatgaatctcaaactatggacgatagcttataggcgagacaattcttcaaatcatgaactcaaaaagttcctcccgaaaaccaatcttagtgatctctgctcattgggacaccaaattcccatatgtcaacattggtcttcgcaattccatgatccacgatttctatggcttcgcaattttggttttgaaagtttctttttttggttttgaaatttccatatatatcatctctattggattaattatttaatgtttgttgctgaaataggaagcgccaggagcaattaaattgaaactgtgatgctctttttgttatggttcgagtctccaaatcgatgacgctgattcttcagatagatcataaatgagatttgctgcatctcttgccgtcttcatctgtcatgggaggaaaaatagatgaagcaaaaaaaaaaaaaaagataaaaagactaagccaagaagaaacaatttttttttttggtaatcacaaacactaactaaatatacaatacagaaacaaggttgtgaaaatcactctaaatcgaagaaagtaatgtgttatgcagcgagtgcatgggactaaatatagttgaatcgtaagatagatttttttatgtagtgagatcattatgcactaaaaagaaaagagaaatcattatgcataatgacaaatgaaagaacgataatttcttgcgactgtagaacaaatgaaagaacgataacttgagaagtggccattaaccaagttgtaaagtgtgaacgaatgaccagaaaagaatgaactaataaggatatattttttaattttttcaaaaaacaatataataataaaccacctaaaccgagaattggttgaaaattacaatattatatatatatatatatatatatatatatatatatatattttaatcacactttttagtgacaaaaatatactattaggtcgatcgtttctagagcttccaacaaaaataataatataaagcacaactaattttcataattatattatttaacaacatcgtatgaaatatcatttctaatttttatttttgttttgtatacacgaagattgaaaacacaacttaatttctataatctctttcttcgtttttgtgtgtgacgtgttctttattaaactcttaattacaaagtgccatttcaaaattatcaaaagaaaagtttccaaataatatgttcaattttttaaaataataatatttaacaaaattgttagatacgttacctaagatatgaagaacgttacgtttgtacatgacttattttttatatattctatctgctgatcctattttaacatgattttacatatcaaatattaagttagttacaaaaaaattgaatgatataaaccaccaaatatgtggtactttagttatataggaccctctaaatggggtatatatttataggtttaacttcacttgggacaaaaggtttatcaccctgcaataagtataatttgaaatactaatttatatttggttatttgattacacttttttcttttaattgtataagatgttttagctaaagaaatatttactttaaaacaattcaaccaattatgaacaagactgatgaaaaatataaataatcaaaaaatattaaattaatttataatttatataaaattttgaaaaaatttctttaaaacatcaaaatatttcaaaagtgagaaagatacggttcatgtgtagatttccttttatatactatgttgagagagtcgagagaattcattaattataatctatttacatttgtatttcttgcttacacgtgaaatatgacggtgcaaaaagtcgaaacttttaagctaagcgtgatgtaacacttgttttttttctttctgtatatgattatagttgatagagataatatatatacatacaattatattatttgttatatatgatatttgacagatataatcacttattatatacgattataattacagttgaatattgacggtgcctaaagtcacaacttattagccgacaaaaaaaaaagtcacaacttattaactatttatacagtgattgacatgattcatcgtgttagttgaaactagggcatccatatttctctacattgtaatgtttgttaataacatgatagcaaagtttgagaattagtctgggattcagtaaaacttatctggttataattataagtattatgatttggaacgttttttaagtgtcggaaaatacattattgactgacgaactcactagtgatggaatataggccccattttgataggtatacattattgactgacaacactacaaaattaagttagtattgatcattgtagacccctctctttatctcctcctcggctgctctcgtatatacaattcatgaatcatgcataaacgcgttttcaacacatccatcgttatttatttaattgtaagctatgactctacctactaggttttttttttttttttttttttctggcgattactactaggaaagtacacaatttattggatacaacatgaaacgtgaaacaaacatgtagaaagaaaaacatattaaaaaaaaaacaatggtcaagctggggaaggatcatatggtggtatacccctcccttattacacacacaaacacagacccacacacacacacacacattcacaaacgttcatgatcaccaaatctgccttaattaggcagagtcaatcccgtaaaagaagagatcatcaaaccggtcattggttggagctttaccaccatgcatcacaagtcctttcttaccatcaatggtagcagtcgtggacgcggtccatcctctgctactcggagtctcttcctctccaccaaacttatccagcctctcccattgcaacgtctctgtgtccaatgcaaaagttccatcggtcaattgacctggacccacgtgagctagcgggtccatcgcaatttcacctccaaaaatcacaatgtgtttcccaatagccgcactagcgaatacacttctttcggaaggcctcacaccgaatgtttccacttgtgtccacttgtcttgaacaggatcgtagtaatgaacatcatctacttcacatccgttaaacccatacacaacccataccttcccttgcaccacttcgagccctgctcctcctcttgcggtaagggaatctcctggagtcgaacaatgaaaccacttcttatcaacgatgttgtaagagtctagtgtattgagtcgtgccgtagcactcactccaccgaaaacgtaaacgttttcctcatcggctgccattgagtggaaactacgaggagtgggtccttcttcgaccggagttagcagtttccactcgttagtggtcgtgtcaaacgagtagaaaccgttgtattggcgtgaagcgtctcggcctccaaagacatagagggtcgatcctactgacaccatccggacacctaaacaagagaggtgtggaacgtctccggtggctggagaaatggaccaagtccgggtctcgaggtcaaagacgtaaaggtgtttgtcgatgggctgatttggtgtgaactcgccaccaaaggagtaaatcttgttgcctacttgtgctatgccatgtgagcatcttagccctggaccttctcctttttgctccacctatgagtaatattttttagttatttttaaagaaattatttatctgattaatgaactcccataagataaatttaataaaattataaattttaaaagtgtcattatctgaattccaaattcaaccctcttttcttcttcattttttctttctcgtaagtgatttagtgattttgcggtggtaacaataacaacatatttatgtgagataattttttatttttgtttttggattggtctaagagattattaccttaatccacttcccaagcaatttgatagtggatgacaaagaaacataggccccaagggagtgtaaaacatctgttgaacgtccgtgaaacccaacgatttttccaccatgtagcacaaacttaaccccaggtcttttttcgataggatgagaggttttgcctttaaaagtcttaatagaaagaaacgtgatcatttctgacgtcatatcgttaactttctcacggtaaccttccacgtatacgatgtagtcatccgcatcaatctcaaactgcaaagaaaccaagcaattttcaatgcggaaagcaacaaaaaaaaaaaagaccctacctcttgatcaatcacaacatataaatctattttagtaccttttgactaaaaaaaaaaaaaaaaaaaaaaaaaaaaaaaaatctattttagtacctcttcaactcctagctctgtcttctttccatgttcatctccaacaaccacttgagaaccattgacatactcaaacttgacgaaggctataccgtattgtgcttgccctacatatacctttctaacattttcgtaaacaccatcatcccatacatctcccatctcaccaccctttgcttctagcttttgggccatcttttttgcttgtgttgataaatcttacgagtattacctgcaattaaaaatttaaccaaatcctttatcaaaaaagaaatatagataatttaaccaaatcatatactatctataatcatagagaaggggagaggtgtgaagagagaacctgagaagaaattggttgagtgatctattggtgggaattgcatgagtatttattgaccagcagtagataaacgggacgaatttcttgtcatattatatgatctcgtgattcacgaggcattaaattgatgattcgatcgataatggaagtgagtacacgttgacgatctacagtagttgatggggaagattatcattctacaggataaagatatgcaaactcattgttttttctcttctttcttttatgagaagaaagatttttatttggatggaaaagattttcattattcatgataagtatatgctatatctttttttgcctctcgcattttggcctaatggtagtgttgtactcaattctcgaaaatgaaccctctttaagaattaatgttgtgcggtaactgataagtatacatttaacatactagtataatggtctatgttatctatggaccaaaaaattaaatggagtaacaattcagtagagaaagacgattttgaaaatgaatcgaagtgcataatggtgtcctctgcaacgagtcaaacgacaacggtggaggcactacatcagttgaaccgtggcgtggagtttttgatttagagaaagcattatgcagaatcataattacgaaaaacaacgtgtgaatggttgatcagaaaaaaaaaaacgaggaaaaggaaaaattattagtattgttttttaataaaatataaaatattgggttgatagttttgttaaaagtttgatatagtttctacattatttggttgatatttttccatctgatatagttttacaccaaaaaaacaaaaaaaagtctgatatagtgtagacccgttttttgtctcctcctcagctgctctcgtatgaatcatgcataaagcgcgttttcaacacatccatccatcgttatttattactctaccttctagtttaatgttgaacagaaaaaagagaaggtaaactaaaaagaggaaaaaaaaaattaaaaaaaacaaaaactggcaacaaaatttttcgtttcggtgaattaggtaggtaatctgtttttgaacataaattaaataaatgactacagtggcaagtaaacaagggcaattattctagaaaaggttactttaagattctcatatatcacttttgcccctagaaaaatgtgattcgcaaatatcacgtgaacatttttctgttacagataatatgttgaccaatatctgaaataataaatattttaggtaccttttttttttttggcacactgtatatgagaatcttaaagtaaccatttttgaagaaaaattggccccttttttttttttgataaaggggtttcaaaataaatgcataaaaagtatagaaatgaggttatatagttttggaaagtagatgaaagagaaaaacatacaattaaagtagattctaagattagagaaagaaaacgcaatggattaggtggatataattgcccttgtttacttgccatttgaaccaacaagattgtttgccccttacccttatcttatctgtaccgttgacatgaggatttattagaattgcaagatttttataatccattggtaactttccactcttgattacattaattttttgtttcttttatggatagaaacttacaattcaatgcaaatttttctaaccacatttaccaaccacaaaagtagatgaaaccaccctatctgctgacttcttgttctattcatttcatctttagagaaaatcaaaatcataatatttttgtttgtagtataacgtaacatacccaaaaaaaattcggaaaataaacatcttattgaacaagccacgaaacattaaacatacaaaacagaaaacaaaaaacaaaaagatacatttagaaaataaaaaataaaatggataagctgacgaaggatcatatagaggtatcacgatccctcccttattgcatcacacagacacacagacacacaaacaaataaaacacaaacggtcatgatcaaatcgcgcttaatcagacagagtcaattccgtaaaagaagaggtcatcaaaccggtcattggttggagctttaccaccatgcatcacaagtcctttcttaccatcaatggttccagtcgtggacgcggtccatcctctgctactcggagtcccctcaaacttatctaacctctcccattgcaacgtctctgtatccaacgcgaaagtcccatcgattaattgacccggacctacgtgagctcgtggatccatcgcaatctcacctccaaatatcacaatgtgtttcccaatagccgcactagcgaaaacactcctttcgttaggcttcacaccgaatgtttccacttgtgtccatttgtcttcagcaggatcgtagaaatgaacatcatctacttcacatccgttaaatccatacacaatccatactttcccttgcaccacttcgagccctgctcctcctcttatgctaaaggaatctcctggattcgaacaatgaaaccacgtcttgtcaacgatattgtaagagtctagtgtcttgattcgatccatagcacccactccaccgaaaacgtaaacgttttcctcatccgctgccatcgaatggaaactacgaggagtgggtccttcttccaccggagttagcagtttccactcgtttgttgtcgtgtcaaacgagtagaaaccgttgtattggcgtgaaaagtctcggcctccaaaggtatagagggtcgatcctactgacaccatacggacacctaagcaagagaggtgtggaacgtctccggtggctggagcaatggaccaagtccgggtctcgaggtcaaagacgtaaaggtgtttatcgatgggctgatttggtatgagctcaccaccaaaagagtaaatcttgttgcctacttgagctatgccatgtgagcatcttagccctgggccttctccattttgctccaccttataattaattagtaatatttgttagctatttttaaaaggatttatattctgattagtaaatttccataattgtaaaataaaattaatcaaattataaattgcaaaactgtcattaattatctaaattccaatttttccctctctttttttttctttcgcgtccgtggtttagtatttttggtgctaacaaacaaaaccttcaatatacatagttgtgggagatctttgtatgttggtctaagtgattactaccttaatccagtttccaagcaatttgggagtggacggcaaagaaacataggcccctagggaatgtagaacgtcggtcgaacgtccatgaaacccaacgatttttccaccatgtagcacaaacttaaccccaggttttttaacgataggctgagaggttttgcctttagaagtcttgaatgaaagaaacgtgatcatttctgaggtcatatcgctaactttctcacggtaaccttccacgtagacgatgtagtcatccgaatcaatctcaaactacaaagaaaccatataattttcaatgcggaaagctaagcaacaaagaaaagagacactcttgaccaatcacaacatagcaatcttttttagtacctcttcaactcctagctcagtcttctctccatgttcatctccaacaaccacttcagaaccattggcatactcaaacttgacgaaggctataccatactggccttgccctacatatacctttgtaacattgtcgtaaacaccatcatcccatacatctcccgtctcaccaccctgtgcaactagcttttgggccatctcttttgcttgcgtttgataaatcttacgatttattacctgcgattagaaacgtaaccaaatagtttcaaaaagattatcatatataatgtaaccaaatactatactaactataatcatatgagaaaaggtagagagattacctgagaagtaagtaatggttaattggtgcagtgatctatgttagggaaatttcatggtatttattgacctggggaagatatggatgatggtcgatagggaagacttttagtttacatgatatggcaactcgtttttttcttctctttcttatttcttttatgagaagaaagattctcactatacgtaataaagatctgtatcttggccacgttcttcaaataagtataatctccccttgcatttttggcttaatggattggtagtgttgccctcaattctcaaaagggaaaccactttaagaattaatagttgtatcatgtgtggttgattaattgattgaagtaagatcatgtatatttaactatactaactaattctaaagctgatggaacgtgttcacgcacattctatttcatatagaaacaacgtttattcggtttaattcatttgaacctatccagtaacataagctgtcgaccaaaaacaaattaaataaatgaatatagtgggacgtaaacaaaggaaacgtaaacaaggggaattcttaccctttagaattttttttacagaatacaatttataaatatttggttgacagttaagttttccggacaagaatacaataattttgagcaggaaaataaaatataacttttcttttttaactcgtcgaaaagattattattatagaaaaattgtaaaataagttgtcaaatcttcgattgtttcaaattaaagacatgaaaatttcgttagggtgaattagtaggtaaggtaatctgattttgaacataatttaaataaatgactataatggcaagtaaacaagagaaattcatttaaaatatactactttgttatttgtcaaaagaatatgctactttaagattctcatacatcatatgaacaaattagattaaaatataatttctagaatacacaatgggaaaatatattaaacaaatcaatagtgtgtgagttggcattgacatggtaaatgcaaaatcaaaatacagcataacctatgcaattacatgatgggccttataaaaactacatactaaacaaacccaaaaatagaatactagccttattaatctaaaactcaaataagcccaaaattatttggaatgggctcacttccatatttggataaatttaaaatttcgggtatgagcaaattaacgcgagtttaaccactaagccatactcgcggcgcgtggagttccgtacgaaatatcgtaccgccgtctctgtgcgcgctatgattacggttataacagaacgatacatacatctatatatacacactccaagacaaaataagacctctctgctttctctcgtcttctccatttactcttttttctctgcagagtttttcggaaaaagaaattgttctttctcattgattctacatttctacagaacgagagagagataaggatttgtgagagaacaacaatggcgctcgtgaaaacggaaacgcaggcgttaggaaaccaccagcattcttcaaggtttggttcgctttacgtcggtgatcttagcccagacgtgacggagaaagatctcattgataagttctctttgaatgttccggtagtgtccgttcatctttgccgtaactctgtcaccggaaaatccatgtgttacgcttacatcaacttcgattcacctttcagcggtaaacaagactttcgacttttttactcgtttcttcgtttccagtctccgattttggtttcaacgtttacggtttttgattttggactctttcaattcttgttaaaaccctggaaatttcgttgtttttctctaagattgtcttgcgattaaccgatttaggtcactaattctgacagatctttgtttctttattgttgattctgtggattagcatcgaatgctatgactcgcttaaaccatagtgatttgaagggaaaggctatgcgaataatgtggtctcagagggatcttgcgtaccgtcgtcgtactcgtactggttttgcaaatctatacgtaaagaatctggatagctcgattactagcagttgcttagagcgaatgttttgcccctttggttccatactttcttgcaaagtcgttgaagagaatggccaaagtaaaggttttggctttgttcagtttgatacagagcaatctgctgtatctgctcgttctgctctccacggctctatggtttatggcaagaaactgtaagcttgtatgattcttagtaaccgaaggtaatgatgatgaaatggttgtttatttacttggtctatttttgactttaggtttgttgccaagttcatcaacaaggatgaaagagcagctatggcaggaaatcaagactctacaaacgtttatgtgaagaatctgatcgaaactgttacagatgattgtctacatacactgttttctcaatatggaactgtctctagtgttgtggttatgagggatggtatgggaagatctagaggtttcggatttgttaacttctgcaatccagaaaatgctaagaaagctatggaatctctctgtggactacaacttggtaattcaacttctttgtctgaacctattatttagtatcttgtcattagaccatagttcctgatttaaaaacattcctttgacaatctgcaggatcgaagaaattgtttgttggtaaggcactcaagaaagatgaaaggagggagatgctgaaacagaaattcagtgacaactttattgcaaagcctaacatgagatggtccaatctgtacgtgaagaacttgagtgaatcaatgaatgaaacaagactgcgagaaatctttggatgctatgggcaaatagtttcagctaaagtgatgtgtcatgagaatggcagaagtaaaggattcggctttgtgtgcttctctaactgtgaagagtccaaacaggctaaaagatatctcaatggtatatactatagctatagtagcttacccttaattatctgttctccagaccagtctgatatatactgattaaatcttgactactattacttattgttgcttacagggttcttagttgatggaaagccaatagttgttcgagttgcagagcgcaaagaggatcgaatcaagaggttgcagcaatattttcaggcacagccacgccagtacacgcaagctccttctgccccttcaccagctcagccagtcctctcatatgtgtccagctcatatggttgctttcagccattccaggtcgggacatcttattactatatgggcaatcaggtgccacaaatgtccggtcaccaaaacatcaccacctacgtaagcatttctctgtatcttcaaaaatatccaaaacctgtcttttgcattaaatgtcactcatacttcctattattataactcaggttccagctgggaaagtgcctctcaaggagagaagatcaatgcatctggtctacaaacatccggtatatgccttcattgacaattacataatgttgaatctttcattatctccatggtttttatgttgaattagttcgaaatgtttcatcagttgagagttttcatctctaagttgatatatttttgcaggcttatcccgttgccaagaggggtgctaaacagacactggtttttaagggtgaggttaacagaaatttagaggctgcaacatgctccaaagcaacaacatctgaggagaaccgtaaagaagaacgaagattgactttgtcaggaaagttgtcaccagaagtgaaggtagaggaatcaggaaaacaattgcaatgattgaagcttcttaaactttggccctgctgctctggctggagatttctcactgcttagaattctacgctgttcattttaacacttcattaggttttcctcatagcaatggtatatgtagatcttttgatcacacagggagatggttgtatatagtttctggtactaagtgttctcaactcttggtttagtacttgtaataagtttcaatacatttttagtaaaacagtgatgctttgatacataattcaaagaaaaacaaatgtatgactcaatgtgtgatagaaacagcgatttgaaaagagaatataagaaaaatacgtgagatcaaccgaggagagaaaagccctgtccaattagggcagtggcaagaatctcattggcagcttcagaaggatgcacactgtcccagaacacatactgagtagcattggagcatgtcccaaacgatttcgggttgcacaagagtgaagttgtctcgactgttcctgttccacaacatcctttggttgcttccgtgaatcctgttatagacaaaaagatgaatgtgtcatggattatctaaagcagatcagcaccaataaatgttataacaaactatatatatcagtccattttgaggacttaccggatttggaagggttctgaacaagatcataaagtggagagtagatgtcgaagacaacaatcttaagatcggaatattgcttctgaagctttgaagcagcagcgttaagcttcttgttaaagttttgagcatctgtgttgagtcttgaaacacagcctttttcatggaaaccgaaaagggttcttgcagcgggaagacatcctgttggaggcagagatgtcacaccgatcttccttgctccaaccgcatacacttgctgcaacagtcaatcaaaaactcaaaatgtctcatctttctttttctctattcagaacagaggataaccaaggaaaattctttaccttgataaatgtagagaagttatcgataaggaaagatccgtatgcatcaacagtgtaaactttgtaaagcagaggattcacatagtagttttgaacaaaatcactgcttcctgcacttaagagacagattgctccctttatgatcgaatcagcttttttgcttcctgcaatttttattagcttgctcttgtattccttgaaatactctacttgctgatacaacgggatcgcgtgctgccaaaaaaagaactaagatcagaaccaaaacaaaaaaaagaaacagatcaaagaagaaatgtatcagaacaaagaaccgtcactacttacattgagaagagcagctttgtcatcataacctgaagctgcagaagcgaaattagcaccaatgagaagattcttaccagaagcttcaggacttagataagctggtgggtacttagtgaagcctaaagtctcagctgtaacaaaaacaaacacaaagacttcagtgtcaaacaaacttaaaaatataacttgagtaacaagtaaaaccttttaccagttatatcagtggctaatttgccgttgcagaaacgaccggtggctttgtggttagcgaaatcacggccataaggaggataatcagctctgaaaagggtcggaagatagttgttgttgccgacatcaactacagagtcaccgaatgtcatgattgctggaacaagttgagcaaaggagatttggagaatggacaaggtagagaccaatgtgagaagcaaaaacgacgacgtgcaacgatccatgtttttgctttggtatgtgactatgtgtgaatggtgaagattatatgtacttttgagttttatatatacacatagataaagaggttaggagtttagtttacttcaatgttgtgtcaactctgaaactctatctctctctctctctctctctctcttattcaatatttctccaaccatttttgattcgtggaaaaaactgaaccagcctgtgttttgcataatttgatattataggtaaactttattaaataaatttacctttcaatggcgcacatggatgctataaataggatctggtctgtgtttttaaagtaaggaagatggaggttgtgagatatagctagggctaataaatgagagtggtttcacgtcgctttggataataattaaacaattaattctttcatatgtaatatatataagagattaaagaacatcttatagagtatgtaaatatctccctaatattaggctgttttctttcggaagagaaatttattgttgtgatactctccagctctacgaatcagcgttacactgcctgtatgagtgtatgtagtgtagactttacgtggaagaacttgaaataaattttagtaaatgctgggccattgaaagaaaacgttttactttatccacaaacaaacatttgatttatttatttgcattggtgagttagttttttcatgaaatagaaggtctatgtgatattcttaaacgacatcgtttgaaaaatagggcatgtaagagaaattagatggaaaagtgtaatattaattgtttatgataatgttattattttagacttttagctaagaatagtttgcatctaagccatggcattcttttttttttaataattagttttagtagagacaaatagtaacataatgataatgttattttagacttttacctaagaatattttggttttttttttcttttttaaatatttattaatcagtactagtagagacaaatattaacataatgatataaaaataggtaagaatatttaggatttggacacggttcctggaaacaaaccgaataatgtaaagcttagtttcttttttttttccttttgtaaacaaggtaatgcattcatcatagaatcgaaaaaatgcatttttttggtccactcttttctgtattccgttattagaggaagccatatgttacgaggtaatcgtagctataaaactcccaagggaaaatttggcgatataaggggaaaaacatagagacatttggaccgtttattaacggacataatataaaagtccaaaaccttctttataacgtacatcgaaatatataaaaataaagaggaactatttattatatagttttgctacaaaattcgacgacgattcctcatttatctctgtctctctctctttctctcttacttgggcctacgtgctgtctccttaggccccgcctgccttgccaactgttcattacaaaaaatttcacttcagcaaatactatatcaaaagtgattgatgataacttctaatcacattctaattatgtaaattattaagcataattgattattggctcgcctggaaataatgttcaagcttctttctcaacgttgagtgttctttcttcagttgctggaaagtcctcaagcatctgcaagtaagaaaaagcgaagaaaactaattagggggtcgaaaatgaagtaaagtaaaagttcaaggttcagcggattaattgcagcaattttagccatctaaactatacttattttcattttgaccccgttacttagttttctgttaaaaacgagaagcatgaaggtatataagtataaagacgaaagtacccttccgcatttccagctctgcagtattccctaaacgtagtgcattcagctttcactttacttgccccaatgctacaaaaaaaagaaatgcaacatttgtcagtataactaacgatcataaaatctaattatttctggttaaagtagattctgtcattgaatcctgaatgagaatggaagtaattttaatgtacttttgcgttacattcttttatcttataaacatttaagtattcgcatttctttaagtaaaattatttcttgaaggcgtaattagaatagtcaaaaactaaggggggaaattacctcgtgctgcttcccttaaactgatgcatgtaactatccagccgattgaaatcaaatgatcctctttccctgcattgtaaaaatgattagaaaactgaaaaaaaaaaaatatatatataatagaaaacaaaataatactcacaaagcttggtcaatgttattgattaaccgagctgaatctttgaagtataatgcggaaacttcttcaacaaaattagggtttgcatcatcttggagctcttctaactccatgaattgttcgtcgagatatccctgcatgcattttcctatattagtcattttctaaattatatgaagaaattcatatataagtggtacgacgtacgaagttatattacgaaaatacgaagaaacaaacgaccaaaacctgatcaaagagggactgcttgatgagtgccacttgcctctgcatgtttgtttaaattttgagaatagatttaactataagtgcgaaaaatcaaagtgataattcgtttttatcttaggtaattcgagtggcaatgcaatactgaaacgttggacatctgagatatatatagtgaaatatagaataaataaatagatcgtattacatcaaaaaagagaaagtagaaaagagaagagaatatttgtaaaatgatgggaacctgcaacgtaagggcatgaatgctgtattctactccagacataaaaagaaaacgtgtattcgttattatcagcttatttcgatgacacatagatgtatactcagtataattttctataacttctctataaaatatatgtataacacaaatggtaggtgttatcaaatgatcatatatgtgtgttgatatataagtttgaatgtatagtaatcttttatatatataagatagtgtttatgttaaagttttgaataagagatttcaattagagaattcctcaatgttgattgtttaattaatagtatggtccattatgaaacttaaactactgtggatgattgatctattgcccaaaaatataactgaaatgcatcttaattaataagtaatcaaaggatctcacgaatgggaatacgactaatattatatatatacgtacatcatagaaacatgtaaaatttcgaatatagaacctaaaagctaaacgttgatactatacgaaacacacctttggaaatgaggcaaatatatactagtaaaatgtatgtggacacgaattttcctgaaagtgaaaaagaaagttatagattgaaaaagtatacagttcaagaaaaatattctgaacagaccatttccgtcttgattaattactgaatttaattcatgttttcacaaagttttctataatatcattgtcttttcttttttctttttttttttgttatttttaaggttgtgatttcctgattttaatggtaccaattacgtacacccacaacattcaactatatatgtacatatgaatttacgaaatgggcaaaaaaaagttgtacttttggaagaaaaaattgttggaatctagcacactagcaaacactattattgcttatcttttgtttcaacaacagaaagcaatactaattcgaagtattttagtttggggtccggaattcaattactaagtaaggattatatcttgtgataaacattaaacgacatttttatattaaaaacatagtcaaggttagtatcatgatcaagaccagaaataaatagatttctattggggttttctgtttgatgtgttttctttctctttgaccgctgcaacaaacattgaaaaattagatgcaaatcttttccaagtttcttccattaatgtgtggaggtgagagggtgttgtgtgccaaggaaaggctagtacttgtgcggatgcgtgtgtttcctacttctatattgtaacaaaaaaagaaagaagtaggaaaccaaaaagagagagagagagaataaggtatacatatatccaacgagtaaaaaataaaccataaatttctgttattggaaacaaggaacaagtatctaaaaaggaaaaactgaagagcacataacaagtgtgatctaaatgattgacacaaagacataaaagatctttttatcattacagcataatttgttcctttctatatctctttctctctcagacaagcatcgtgagatcgaattacagaagagagagagattgatcatatacaaaaaaaaatcagctttatttattcctccgcccaccaaaccaatctcacataaaggacttgtctactacatattttcggtggaagtgggtttagaatctaagttttattattgcttgctgtctcatctcgattattctccttaattccgacctcccctctaataacaaatatgtaataccacaaaattagaagaaacaaaacaattcattccaaaacttgtgaggttggttttacatgataaaccccaattttgtatttaaatcaaatgttattatgtttaccttttagtattatacaagataaaattctaataaaagaggacaaaattcatgacatttatctaaattttgttgtatatgtgttacacaatccaattattcctttatatatatatgtgatcttaattttataaaagaaaattattttttgttcttatgatcttttgtatatttctaagctttaaggctatatatagtcttaactcttaattattatgaactcgtaactatcatctctgcctctggtacaaatgactaattaattcgaagggagaaaatatgtagagatttagttttcatatattattaggaaattgctagactataggctagtttgtaatataacttatattcatattcaagacaaaatcagtcttgtaatactttagaaggctagcttgttccactattaattcctatgattggaagattaatacatgtttagagaaagtttatttttaaatgatagatattcttcggaaagttatcttgagattttttgttggatatacatgatgccagaatttgtgctactaaagttattagaagtagctattagcacctaattgaactaagtatttcgtataaagggcacaatgttgactggttcgtgattgaagatgactccttaaaagttcaaatgtcgacacacaaacagatttttaattcttttaattgtgttgattactcaattaaaaacattcttctcaactattaatataaattcaataatatccaattatttgaaagatgtaacttcaatcatctatcacccgttaaataaagtatatgctaaacaaatttatttttatcctctatcactttcgtgaataattacacctccgcgatattatgaacatgattcctcccaatccgaaaaagctataatcctaaacaaattgttaaataacaaataaatcggccgataacgactaatcataatcataaaagtaaaataaaaatatagacccgagttttacattaaatcatagggaaccgtcttccgacatatcatgttaatatacaatttcatttactcatcccaactagaaaatactatcaagttttgagtagttgtcgtggttgagagttgaaacagaacaatagcaataattcttttgagtataaatgtgattggtacaaacataatggtcattgtgaagaattttgaattcgtgtttgttagttgttacagatgaggctgcacaaccatggaaaacaaattccactactatttgacaaacaaaactggtgacaagagaccatcataaagacgtttgaccattttattaaagggtttgaaacatattaaaagattaagtgatgaatccttttaggaataccattttggcattgttcttataactcattgggaaactttatatcatttgagtgtggttagaactctaagctatcatagctggcttacttagattacgttagtgagtattcaagatagattagacccttatcatccctaaagactacgtacgtccatgcctttacctttacagatagagataaaatgtccatagaactccatatactcccgattataatcatcgtttagtctccaataacatcttatcctccattctttcacacaattcttaggaattagcttagttgaacacaatttagactagtaccatgcataccagcatttataaaggctctcaattcattgtaaacataggttttctagtgaattagatatctctttcttgtgagaccgttctttaattagccatcgtctttaatttaaccatgcatttgtggtcacataaaatttttcaatttaggaaactagaatagaacttctctctcattaggaaatgtaatccaaactcattatcctatttatatcaccgttcaaaaccaaaataaaaaatggtagaatattaaaatatatgtcatctaactaacttcaactagttttctcaattgttaaagaactaaacacattttttccgggcaaaatttgctttgaacatatttctatgtatcaaaaagtatttcttttaaatgtatcaaccgcactagtccatgtgcggccatgcataaaagattgtaattcgatagcgttagggatataattcaccaccgcaaacgcttctaacgacataaatagagacacaactgcgattgatatgttggatccatccaaaacgtaagatcattacaagaataatcctgatataaaagccgtactagtcattcgagaaacgaaagagacggtagattgaagcacaagaaaggaacataaataaaagagatgaaagatagtgtgaatacacatttggagaaatgttgacacatttttactattttagcattagagagtggctcatttggaatactttaggaacttatggtgccagaaattgcaatcatttacaaaattcgactttagggtccctattcattttcttggaaatgattcccaacgcagcattgattctctctcgtctcctgatttgatttgtgctgccattgctgaaagcagcttcacaacaaagaacaaatactctctctttttctctttcttttctgcttatatccattttaatgttcttgtcgaacatttaacagtaaaaatggtcgaacggtagcaacaagtttatgttttgtaacattctttattgtttagtctctagataataaataatttgccttaaacatgaaaaatgaagggtaaaattgtaagttacgcttatcttatgtaagtatgacgtgatgctgagaaatgtgtttttgactgtttggtaagtctttgttacagtttgctctgtttttttttcctttgtaagtaattgttctctctaatggcttatggcttggtttgtttcgtcctaaaccaggaacatcctctggtttaatccggtcagggtcttccttcttcattctttaacacaataacaaagattttttagatagcctgaatcgcgctgttgcctttactcaaatctgcaccattaaccgagccattcgagtgaaacgctgatggccttgagggctctagtctcaaagatagcggggaaggggaagtttcggtttcgtgtcttgtcgccattcctatgctaagctgagacataccgaccaactcgtccatgttcacacgttctttagcaaatccaggttttggttttaggacctgatgctgctgagaagaagtctcagcgtttaaggcatgttctgttccgtgaagtgacgcagggagccaaatcgtgtaagtcactggaaaacaaggaggaaagaagccacccgggactagcattggtgaaacaccatttgatggttctatagcttcttgagatttttcctgtcgtggcgccgtggctacgacctcttcagcttctgtggtattattgagtgagagctcaagtgaaggaaggtagcttttcttttcaggttccttgcttggagaggaaccgtttaaggtctgctcttcctgtgttggcgatgaatcggttacctaaatgcggcaaaaacagaggagacattcaatacaagtttccaaacatttccatagaataagaaaaatcatgaagaaaagatactaaccatctcatctgtaaccatgtcgaagaggctagaccgtcttttcctgcggcttgaactagtatgtcgaataaaatacttttgagcatgactagccacttgtgtaggagttcttgacgttacatagtttctcgaaataccgcgccaatctcctttcccgagtttctgaagaccgactaagaatagtctatgttcctcttcagtccaaggaacacctgttacaccaaatatacatgtaaaaaccatatcacatttaagaatacaaaacctttcatcttcttaaactaaaattcaacaatatgattcacaatgagatatgttttgataagcacttaagtccaacacaagtatctaagcatccaacactaagttgttcccaacaattccactcaccagtaagatctaaatccattcaatttctagcaataacctttactaatgtcaaagtaaaacctttagagcaatttcaaattcaaagttccaaactttactatgaatatgcaacaatcgattattaagtcgtttcctttacctctcttcctctcaccacgacggtgactagacccagaaccatgagcaggatcatcagataaatacccttcattatgatgcaaattagagtatcgggcatgatccgataacggcgaatcattaagatttgacgtcgccagaggagacgacggagataaacggtggtgcgttgccgccgccgccgcaacagccaatgccgagagattacccatactcgcactctttttaataatcgagccatccgttaacctcacaccaaataacttcacggcggaggaggaaccagaccctcctccaccaccacctcctcctcctccgccacttccaccgcacgtgccaccaccacgcgttggacacgtgcgtgaattgtgcccattgttgctacaatgcgaacaccgacgagtcattcacacaagacagaaacaaacaaaaaagagagaaccttttggtgataaatgattcgttgaataagatttgtgtatacacaaattcaaagaagatttttagatagagatacaattgcgaccataggacttggttttgatttcttatggaaagaagaaggtaagggtagtttcggtattttaagtttgaaagacgacgaggattgtggtggatcgtacgttgaattcgtgttttaaattgctattataagcttttttgttttatccttaatcttacctggaaattatcgtttatgacaagaacaaatttatactattgtatcgtttcgttctttgtttaggataattttttttaaagatacaatgttaccgacaaaactcagttctgataaccaagataatgaaataattgaatttaaaagatgtgaggataatattatttaagtgtaaatctgtccgaaaacgccataaactatagcttttccaagtccacttgttacgcgatctatttctatattagaagagcgtgtgttcttacaagatacacgttttgcatatgagatgagacaagtggtttaaatttaaagagattggataatattacccacacacatatagttctttatttagtacgagatgtgattaggatttaaacaagctttcataatctttaacaaaaaagaacaagctttcataacttcttttttcttttcttaaaaaagtatgtatactctacacaaataaaacaaacacatttgacgtctaaacgctctttgctatatgttggtattttacgcgaaaggcaaacaccaaatatgaaaccaaaaaagaagaagagtaaatcccactacgcatttatgaaatttgggttacacggagatttcttgcaacttaagtaaccaaaattgaccggtctagggatgataataccggagaagaagctgagaagtctttagaaagctccggcaaatttgtatgtttttttcatatagtaaagtagattagatttcataaacagtagatatatatgcgccttcataagatgtatttgatgagtgatcaaatgttttcatgaaatagtgtaaatattatttaatcgaagtttgtcccaaaatacaataaactactcatctcttttgattcactcgttaggtgatcaagaatatatatatagtgtgtgtatgtgttctttagtgctcacaaaatgtgattgcaatcacttggaaccttaactagctcatcattgtcatgactcatgattaattttttccacgcagagttttcacaatttgattcttaaaataaatctatgtttatcttagatctgtaaaaagttttaaaatagtgtacaaaacggatataactgttaggatatacataaatttagatcttaagttaattataattagatttgtccttgtaaattctccccacaatctattgtgttgtatatattgtacactttacttacaatcaataaagcatcaatcacaaactatatggcataaaccctcatttttcatttttttctacttcacgccaaacatatccggcaggcaactacaccctatcgttgttggaagttgagcgttcttatgccaaaagcaaacataaacgcaaaaaagagagtaaagcccactaacacagtagcaatcggtatcataaaatctgcgtcgtatccatagtggttttcaatgtaccactttatcgtcggatcatttgccatacccggaactttaatcgtatcctccacgtcaccgtactgcgaaacaatcaatccatacacagtccaagccactggacagatccagtaataccatatccaccatttcggaattctctgcaagaggaaagtaaaaccagcttatgatagaatcaatagagaatcatttagggtttcagctttcttgccagaaaagtaaccaacactaaccggtctaggaatgacaaaaccagaaaagaggttgaaaagtccgtagaaagctccggcaaaaacagctgcaacttgctgatttggggtgagggcaactgtcatcatcccatagtatgtgaagtagaggaaggacataaatgatacgaagtaaaaccaaaagaatttggccaatgtccattcgaaacacatcatggcgtatataattagtgtataatatgtagtttggatcagcacatacggtatttcgcataccacctgaaaccatgggaaagttttagttaaagactgctttacgacccattaaggtttcttgtttgtcaagtaactaaaacgtttctagtttaatctcacctgtgctagggcataaggtaaagcagagtacatttcagcagctctttctctatagaatacagatctttccacggctattagcggttggacagatgaagagttgtttacgcccacgaataaaacagcagcatacattgctccaataacctttgtaagatcattagcgttttccctgtttttgaaaacagttgtatagagtttagatataagtaaggactctgatactagatttgaggcctctgtattcgattcaagtaattaaacaaacctttttgtgccaactttccagaaaattgatccgagcatgacagctgcagccaatgtaaagaaaaatcttgctagattgtagtcaggagttctccagtaagttatccactgcttccacaaacaagatttgaattgtcctaacaatgattgtgagaaccgcgttgagaagtagagatcgcttgctccttgtggtggtgtgcttagttcctttacaagattcttgttttgtctacaccacgaacaattctaattgagttaaaatatctggaatgatcttagctttgaatattaggttgaacttactgatataaggatgatgttttataatgctcagcaaaatctatctcaagcttagcttctgcagccattgagctcacttctagcatccatgtcgccggattatacttctctttaatcttcggaactccatgaatcgcctgcagtttctcaaaagaggactgatcatgaaagttcttacattttaatatagagaccttgacaaattaaatgtagaatctgacctggaaatattcgataatcttgtgagagttttgacctaaaggaccagcataaatcacttgtcctcctctcttcaaaagaagaagttcatcaaaagcttcaaagatatcaatgctaggttggtggattgtgcagaccacagttcttcctgtgtcaactgtattcctcactgtcctcatcacaatcgctgcagccctagcgtcaagaccagaggttggctcatccatgaagattatagatggattcgccactaattccactgcaattgtaagtctcttcctctgctctgttgataaccctgtgatacctggaagccccaccaccgcgtcttttagactctctagctctactagctccatcacttcatccacaaatctctgcaaaagttggtgtatggattgagatcctattataaatggtgttaagttacaagaagaagtgttaccattttctcatatttagtgacttcttttgggagacgaaggaaagcagagtagatgagagactctttgacagtaacttgcggtgagtggatatcgttctgttcacaataaccagagattcttgcaaaggtttcttgtcttttagggaaaccagagattctgatgtctccttcgatgtaaccaccggtttttctaccagctaaaacatccattaaagtggtcttaccagctccactaactcccatcaaagctgttaatacccctggcctaaagacccctgtcacttcctttagtagctgaagcttatccttggaaactccttgttccttcatttcctgttttcttttttggttaacatctttatggttttaatgtcaacaaggatttgggatttggtgttaccttaggcatgtcgacgtagtagtttacgttgtcgaaggacattgtgagaggagtaaaaggtagaaccattcctcttttcacgtcaatgctcttactctttgagccgttctctgctctgttttcctctgtattttcttttgaaacaacggcttgctgtttctcaagtgctggcatatcaacaaaaagtgatattgtttgtttgagaaggaacaaaaataaatgtcaacgttcatgttcttctatatcataacatttaggtctcaagttattgtagatatatgattctattagaaaacatgataaaaacaatcaatcaatataagtgtacttacggtttaggaatgtaagagcgagggtaacgaggatgttaaagagaaccgtaaacccgagaatgcctcctaccccgatccaataccagtttggatccgtgaaaatatcgaaaatctcaagaacagccaaccctaagctcgtggagttatcagaagactgcaaggaaagtaaaagagcattgcttgataaaaaaaaaaaaaaaaggaagtcatataagagacatgttaataactgtagcagaaattttaccggttgattaatccatctaggagcaagcatttcattgacagttaaagcatcgtaagtgtaagccattggtgaaacccagtaagcccatttccaccatttaggtatctcacctgttaaccataacatcatcaaaacacaaaattagttttcatattataaaaattagtttgatagtgttattgatgtactattacctctaggaacaatgaaccctccaagcaagaagaggaggaggataactagagctcctcccgtattagcaagaatcatcgatctgcaagttgccgcgatgaacctaaatataccaccagccatttgctgtgtcagaaatatcaccaacaaatgcttcaagaacctgccaaacaaaaataaccaattgagctaacattacttttactaggtggttaatattatctatatggacaatgttaacacgttgcgggttcaagaatcatcttcacctgctgagttctggagcaaatccgatcatgtaataagtaatggtgacccaaacaacagattcgaagatggagataggaatacccaagagaaatgttggaagactgaaggtccaaggaggatgaaacaaaaggtctcgttgcttgtagaacacgggaagtctctgaatcatcaaagcaagctctgcaaatccattaaacatgttaacgatcatggagaacatcaacgcaccgatgtagacggctccatcactctcgttctttgttcccatctccgttctcaggtacacggtcgacgcaatcaaagccataatgataatttgaactgttttggtaatgtagaagaaagcgttacgtttcatgagaagcaattctctgtcccaacagaccttgaagagttgagatttcggaacagagtgtttcttgaagacgagagaagctgggtgtgatttgaatctgtcgtaagggactgatagatctttttcaagattggctccgacatggaaggttctgaatcgtttggagaattcagagacagaaatgtaactgtatggtttttttgagtctgcccaatactgttcttggtctttccttgaagttacctgtttaccaaggcaagtggatcagattaattttcttctatcataataattattggaatgtggatcattttggaaaacccatatagaattaataatctgcaaagctgaaaatttgaaattgtaaaataacatatccagtcaaaatgtaaaataatgttatttgtaagaaacacatgccaaacaaacatatagcaaaccaacttatcttgttattagtaacttttacgaataattgatcaccatgttatttgggtccatattatttgatgcatactaaactatcaattcttggttaagtgataaaaattctgtaagtttgaacaaaacaagattagatatagacctcttgcaagaaatctgcggtgcctttgcggtcgggacacttgaaaccgcaagtttcaaagaaggtaagaacatgatcacgtggaccttggtacacgatctgtccttcagacaatagaatgatgtcatcgaaaagttcgaacgtttcaggagctggttgtaataaggacatgagaaccgttgcgtccgtgaaccgaacaatctcttgaaggcatttcactatttggtacgttgttgaactgtctagacctgtcgatatctcatccatgaacaatgtctttgttggtcctactatcatctctcctatttttgttttaagaaaaaaaaagttgtcatcgtgtgacttgcggctcacggagttagcatgattaggagtggttgatgaacagagaaagttaaacctgttgtgactcttttcttttgacctcccgagattcctcgaatcatctcatctccgaccaccgtatctttgcatatgtcaagccctaatatctgaagaaaaaataatccaataatcaccccaaattgccaaactaaattgactaaagtgtttaatttcggaactattggggttgttcagtgagaattggaaagaatatgactattaggtgaaaagttgggagtaggtaaatgtagggtccaccaattgcgtgagtagattttgtagatgaaaagactaattatctctgaataattttatttttggttatcaatgtatgcatctatcttatgttttcgacaaaatcgcactataggttaaagtgaaatcattactctgagagtatagtctgtgatgagactgctcttgacatttccagctgcaatggacttcatgaagagatccacttccggttccggcaagatccctgcgtccttctctcttctcaccaactcacttaacaaatctataacacacaactaaacttgtcttaatctgaaaaattcaattataactcacagaagaaaaattaataataatgaccatatctagtgccaactccttgacatctagcagaaaaatcaagagtttcttggacagtcatgactccaacatgaacatcgttttggcttatgtatgctgatgttttctgtggcacaaactcttccaatccatgcccattgtatgttactctccctgtcacctgtccattttcattaataatttaagtctctttttttctagaatgtgtaatcaataatcataatgtgtattatttaacctttaagctttggtctagttttccagctaacgctaataaaagagttgttttccctgatgatggtggacctaataaaagtgtcattctgccaccaaaaccatacattataatcaacatcgaaatgatgtaaaaaaaaaaacacattttaagtttctaagtaataaccttgaaggtttgataatcccggagacgtctctaagaatagtgactttagtggtttttgtaaagttaaaaccaagcaaacgaagacctctctctgcaatgtttaaagcagcgttgggtaatgtgggaagagctctttttcctatgtgacaattcgcctctatcgttactttctcgaatctcacttccactgtcggtagctttatccgcaccctgccataaatgttacaaacatcacataaaaaaaaaaaaaaagaaaattccaaaaacaagaaatttatatcagaatatattctgtcccaagaagaaaaaaaaaagtagtactagaaaactaggataaaaaacctgtcgattcgattcctaaactttttcaagaacttctcgttatcttcctcggtgactttgaagatagaatcgatgaacttctggcgatcatcaacaccgagcttggtaacgtcgacgagatcttcgtgaggatgaatgatagtggtacgaagacgagcaaaggttggaagtttctcgagagcagcccatttaagagcttcctcatcgtgatcatctatcgttgaaccgcttctccttgagaaatggttattactattactcgctaacaactctcctaagctcttacttaggcttctcgataacgtctccatttttttttttttggtggatttgggaattggtaaagaagagaagggtttgtttatttatgcattttgatttggtagccgtttaaaaaatttcggaaaataaaaagaaagcgtgaggaatatgcgggctgagtgggtaagagctaggacatgtggactaattaactaggttttgttatagaaaattgtattacgaaatctaattgtggaatttcttttaattttactatatataagggatttccttgaagtttaaactatgcatacccttttctttgaaatactagtaaacaatcaacgacaaaaacaacttctttcaaacagtaaataatagaacaacaatgggtctagtaaataatttgtctgggcctaaataaatcatcacattcgaaacaagtcctacctacatacttactaacattgtggtctaaaaagagtagacaattggtcaaagttacaaacaagtctcttcaaccctaaaaatcgatacatggaattaacaatgacccaaagaggcaaagagatatcgtctcaagaaatctttatatatatatacatatttgctcaatatatctcactaaagtttattttgcacaaaataaaaaagttttttattatatttggagaaagagaaaggtgaaactactgtattcggtgaccaagattggttctgttatgccactacataagatggatttggtgaccagcttggttctgttatgggcatgtaaatctgatcctctaattcaaggaaaaacctttaaaacagataaccaactaatagtacttataacataaaagccaaaaaaaatcatttattttatgtcatgtattttgcacagttaacattatacaaaagctgttaaaacactataaacactatagatattgactattgaggatcaaagctagagatataatattagtatacatattacatcgaccatcatctttcattatgaacactagtggattgcctatctttttttttttttttcccttcaattcattcttttaataaatgatacttaatgatattagactttacatattttttcacgatagaatatcattgatggtataactttatattagttggtatgatgggatttgcactcaccaactcatatctgtgcaaacgtgtctggcgttgaacaaataaaccaaacttgcaaggctcaaaggtcaaaagtgtttgaaattaatctccatggcttcgagctttcacggacccaacaccaacattaacaacttttcactttgataaaacacgtcgatacttgaaatcataatgtcacagattcgtcatctaagcgttcaagtttcgatattcttttacttcattttccaacactatgtaaaagaattactatataagaaataatgagctttcgaagaactcagccaagttttggtttgaggcttgaagcaaatgggtcgaagaaataagattgtgaagcccacagatgataaaggctttgagcatgactagccgttatatataaactatacaagcttatcctttataaaacaaagtgttacataaaaatatcttaattttatatataccgcaaaaaggctaaataaatcgtgaattccacaattcagaccaaaaaaattgaacattttcatgaaccaaaataattaccaaaattgtattgattttgctaaaatattagtcccattgttagtcaactactcaactttcttggcttagtcaatgagggagtagcttttgttatctaaattcgtcggtgttaacaaaaattctaagtcacgattctggaagaaaaattaagtttttttttcttcatgaaatccttttctttcaatcataacttatcgatagacaatcgttccctaccttggtgattatggactaatttgcgatatggcaagttgtatttctaatgaattgaaaatatgatattatatatgtctgatacactgcttgtctttgatactttttttgtttttgtatctaacattttccctgtgtttagatttataatttgtaaataattctattgaaaaatatgtgttgttttatttttagttgttaaacacaatacttgcctatctttgaaacaaccaaactccagctatcatactaaaatgaaaagtaaaaagtttactgcacattatagatacaaaaaataaaaataaaatcaagatgcccttatccaataggaacatacaaatcatttgaagcaagtcattacacattacatttcttctattaaatcaaacataaaagggagctcacctcacaaaagcgtataccatctagatgttcttcgagaagacctatttaaataattgcattacttataaattcaataaataaagtgatgttagctttataatcggtcatgttacacattctccaaaacatataactaattgttggattagctgatactagcaatttttcttaaaatttttcagagttgtattacttttacatacaataatgtctatcaaatcacttttacatatcgactaagggaagaacatgcacaactttgatttccattcttttttttcttagttttgaaaatcaaaagagattgaagtaaaatagtcactttcactcgtaaaaagaagtttttatttgactccttcgctttttgttgattgcggcagagtttgttgttttatgactaaaagagttcaaactaaacacaaagtagagagtttcatatctcggagttgaaaaattaagcataaaaaatggaaaagaaaattaaagaaaaaagttgaaataaaaggagaaaaagataactttttcttttattttgctttaaggaaagagccaaacagcttgcttgcattggcccttttacttacgacgtacgtacacccgagtttttttttcttgtctcataaagttttttttttcttatacaagcacgattatattattacaagtatgcaaatctcttttctctctatgtgacatttaaataagtaagtaaataacgatttttaacaatcactagagattataaagttaggtaaatacatatttggtcgtagaataaaccagccaaatcagggcttacaagcacaaaatataatacttcatacccgaaatttttaagatgggacacaatcatttggaggtctttgacatgtacatgcatgttcctctttatgtgtgttgggtttccaatccacgtcctcatgctcaacatttttgtgcatcaaattcggtttgtgtgggttagaagtagaaatcattattatgcaattgtaaaatgactaaaatctatgagtgtaatcttgcttttcaaaactttgattaaaatcacatttccactaaattttaacacaaaatgacgattttaacatttaattattttgagaaaatctcatgattccattattttgcgggaaaatctactttgtccaaaatcatgtttcaacaaaggagcgttcgattacgaaaatgatatttttgtccacgtctccattagccatgtcaccatcttcccataacggaaacggtgagtccgtaacccgtaaaggcactaagggagtgtttagttcaacctcagaaagctagaaaacaacattgtcgtgttacatcacggttttgtaggtaagtaatacggttttgtaggtagaggtgtcatcaagaaagttgcatacatgctcctttttgtttcataaatcacgttacgataactcgatgatgatgcgtttaagtctaaaatgtatttcgactaaatcatgtcaactaattttgttcacgatgaagtacaatactttccaactcatcaactatagtgtttcaaaaatacattacattttccaaattagtgtagaaaatagccacctgaataatattttattcatgataatataattttatcaagaaatgaggaaataatccccaccggcctcctccaaccaagaatattattacaacttcggaactaaatcagccaaaaatagaggaaatatttaggaagagagattgagagaaactaaggggaaaggccaaaaaaggagatttaattaggtgaggactcaatcatcttcttttgctgatacaagttcttgtaaaacttctttataaactcatccgctgccttgtccacatgtccgttagccacgtcaccctcttctcttaacgggaatggtgagtccgttacccgtaaaggcctcacggacgaagtactccgtccaaatcccggcaggtagggagataacgccgtcaaggcctcaatggaaaaagccggcgtgttacttccctgatcatgatctccaccgctgttgagcagctctagaacggctctggagacggaagtgtcgtcatcaagggtcggtggcgcttgaccacaggagaagaggctgttgtggtggctcttcttcttgaaggcagccatgttgaaggggaacgtgtagttaggagtgtcgctgcagctaaactcgtactcgttctgtggatgggacgcaacagccgagcctgggacacggcggcggttgtggaacatgagattcttgccgcgtttgagagtggcattaaagtcggctaggagcttttgcttagaaatgcctttgtgtaacatgtacaagacaaaacgtacaatgttccctagcttcttgcttattgatatattcttctccatctttagaattagagagataatgagactcttgttttgttttgtttttcttggctttgatatttgcttatggactaaggatcaatgtgtgtgggatttataaagaggagagaaagagaaaaacttttctacgaaaagaagtacttaaacgtggaacattacacaaacatattaatatgttgtgaaatagctttaggatttcaataacccaaaaaatggaaaagaaaaagaaaatttgaattgtattatcaactttagttgtactttagattgcactatgtattatagccatctatatatggatattaggtcttgcttttctagatgacatacatacaaaaatttaactagtggaggttttgtaagatgacttggccttctagtatgatggtattggtatatacgctttacaactatatctttttatttcaaaagtttttcttttttcgaaaaggaatgaatcaaaacactatattattgccactgtggctaaaccttttttctttaaactttgctttttagtttgccttaaaagtttaaatctttcaccagatagttaccattggtgcaatgagtgccacaaattttatgcaaagagaaaggaacaaaagttccaacttggaaaagaaatgaaaattcaacccaactctatacaattttctgtaatattaccctctaagtttatataatcagttttgttttagggttagtccacaagactgatctaaagatgagaaaaattacagatgactttgggttatatgagaaacataatctggtgtattacctgcacaataaatctacaaattttcctccgtcaccagctcgtctggtagtatcaacctctccatgtaagcctgtaggcacagacagtgaataaaattctattaagtaagtttttaaggatttatcatgagattatgagaaatataacgttttgattaattatccattattcgatctcatattaactaatttcaactcctaaatgcaaaatgtgaccatgattgatgcttgtgaagcaaaaacaggaaaggagtaattaacctttatcttgacagcatcagatggagaagggcttaaatccaaagcaatgccgaaatgtaacacggctttgtcgtattgctttagctgattgtatattttgccaagcgatgcatggacactgctttcttgaggagcacattctttgagctcttctaaaactttctgtgctttgtgataatcacctaggctggttaatatgtgagccttgtagtacttggggagcggattctttgcatcagtgagtacagccttctccatcatcatcaacgcctcatcgtttctctgcaaaatattatctcaaccttaaaaattatctctggactataactttctggaaagctaaatttcacagccaaataagaacatcacaaagtcataaagagtaatatatgatattagggatgtgttagtgtgtactggtttggttaaggaataaaggtatcgatattctaaacttaacagattgttgatgtgaagagcgtatttcagatacctttgactcatgcaaagcaattccatagtaacacatgatgactgaagatcttggatttatttggagagccagttgaaattgatgctgcgcaaactcgaatttctcctgacgaagataggtcattccaagaccgtaccatgcattatagtgtctcgtatctatgcccagagccttccggtagcatctctctgcatcctcgaattcttccaatgcggcaaacctgtgcagccaaggtgagaccggtatgttattaacgtacatgcatatgccgattatgcgcaaaagatgcatcgaaaagaattgtactcgtggccacaaagggtatgtgcatatgtgaatctttcattcagttggatagctctctgaaacattttgagagcagtatcatgatccttacgcaaactgtaacagttcccaactgcacacctgcaattcatattgcgaccacagtcattacagaaaaaaatacaagcaaagagaaaagtctgcagtttcagattttgatatgctagtgcaaaaagctggtttccattgacggtatgtggttaaagcttgtggtgttagagtctcgacgtagacatatgtgggttgatcatgtaagttttgcgaaacgaaagcggaagagcatattggtaatgaagattctaagaatgataccaggattctggagacaggcgatcaactgaaatcagttcctgagccagatagcccaacctcatctcttctttcaggtgcttcaaaaacaaaaatacgaaattactaaaagtaaaaaacaattacatagaaatccttgcaggtcaatcaaaaatcaagttctctatgctgatatcacaacaggataatgttcagagtcaacatcatgttcaagattagttcgggactgttcataatgaataataggaaaatttgcaaatagtgacaacagctcacataaagaacagtggagtatgtatccattccttccaaagcataaggatacttttgatgagcaagagtaaaggaagagtcagcgttgaagtagtcttgtagctcaaaatatgcttttccaacctatttcaaaatgtatccatggtttttagtttcagtgtcaaaaaccaacaaaatggaattagaaaatgacgtcaatgaccaaataagatcattccaatgaaaaaggagcaaagaaaaagccattcatattatcacctgcatgagaacccagtgtgtattgtattgtttctgagatagcttttgatatgccaacaaagcttcctgcagtagtatccatttttgtcattttaggcttcgacatcgatactttaacttttaagcagagaattcaagttgaagaatatgaacccaatacacacattgtcttagtaaagtacctgacacttgtacatatgtaaatgcctgtggccatctccaagaattttcagaaggcttagcacttctgaaattccagaaataaggctgaaacgatccggggaagattcactaggatttgacttttcctcatcatcaacagagcttccaatgtcacttacagactggcctgacgtcgttgctggatcatttagagtaacggtatcaggaatcactgcacatatatgttcaagtcttattgtcatgtaaattacttaagccacctatattattacatcatgaattttaactagagatctaactttttccatttcaaaaattacaaccaattgaggctctatagtccggtttgggagacagaaaagaaaaatatgatagtaaaacatcaccttctttgctgctttggattctgcattttccaatcatcgaggaaagagaaggtgcatagtttgactcggaaggtgaaagatgtaaccaatgggaatcttttccaaatgactgcgacataggattctttttccttgctgctattctagcactacggcggcgcccagattcttcttgagccttcaagataaggaaagtaaaagaagaccaataaatcaagtagctttagatggtccagccatagagctagaagatagaaacaaggtgggggaagctctatgttaaaaacttaaaatatctgcagtgctagatagatgatcattcttcgcctatgcattaataagaaaactcttatgcaaagaaaacaaggaagaaatcactcaaagcccattgtagatatataacctctgctgacaattcttcactaaaaaagtttcttcgacgcacacgcactccatgtacagacatcaaagatccttccactgctggacgacgcatattcttaagaagcagaggcggtagagcatccattacctgaacgataaagatacttaaagatagggaaaacagcttacaaacttctcattaccttatgaaagaaatatagctcttgaagaagatagtagacattgaataactgaggatttcaagctagtaactaatatgttctcatactagctcgacttaattatatcacctgtaaaagcactggagaaggtgtgttcaagtcccatccgtttgtactaagttgcctgtcagtatttggtggaatatctccaggctgctgcataattttcagatcttgttggttctctcctggaatgtgttctgtttgcgataaacctgtatcttttaaggccttatcagaatctgtaatctggtctatggttgctccttctgagaagcttattctttgttctacacaagttttctgaagacgctgggaagcaacattcccgaaaactgttgaggcttcttcagcggcacctgaaaaggtaatcacagaacgccattgcagagaattgaatttgttgctctagatatccagctggaataacggaaacataaactgataaatacataattcatacagaggtttcacttacctaaactacaaagttctccatatgcttcccaacacaatggatcaaatgacaatgccatcctaaactgttgtattgaacagttcttcctcccagaatatctgcaatcatgtaacagagagtaacacacatcaaacttagataatggaacatatgcagcaaactactaagcttgttacagcatcagtataccaacacagagaagtactaaacattaaagcatgcgagagacaccaatatctcatacagaacttgaaaagtaaattagcagtcacctatatataagaccaagaagataatgcccagctgcaccaccaggaacctgcatgtcaaaaatacagtagtcactagtcagcacttgccaattttcactcccaaaagactagcttgcaaaagatgtgtacaatgcccatggatatggagaatttttataaaagaagtaaaaaagcaatgccatatacttcttcagcataatcttcacagggcaacaatgcagcttcagcctctccaagaagatccaacttaaagcatgagaatgcaaataaataccgagactgaggcgtttttgaaccttcatttcacaatgtaaaacaagtttagtttttccaaacacaaataaaacaatatatgaaatgttcacatatagcaccagtaccgaagaatgtagagtacctttaaggatataatatgcactataagcttgactgttactcaagtaacacctggctaacaattgcaggttcacctgcataatgaagtagttgatcaccaccagattcacataaccaaaaaaatatatcaagggatgtgaaattcgagtaacggtatcaatctgaattgacattggcatacatcaaacagaaatctcaacctagaaattccaggtttggaataaaatcacaaaatcaactcaaaatcataaacatttcagtcaaattgaattgcatcctctagattccgacaaaatcgaaatagagtttgatccttaaaaacaaagcccagaattgaactccgcataaatcgagaattgtctattcgcaaacaactcaaaaagtcacacaacaaaagacagctacgactagaagatcggatcagaccacaagagcaacaaaaactgagaaaacgaaaaaagtcactccacatcttaaaaatgatgtgatcgaaagagacgaagctaagatttgaaaatcgaaatggagttgaatatagaagaatcgaaatcgagatacctcagatggaaattgggcgagaagaagttcgcaaaggaagatagcattggtgaacataaaatggttaaggtttttctggacacaattcgccagtagattctccatcatctgatgatgatgatgaccaaattgacgagacaatcgatgttgttgttgttcctcggaggctgtgtgtgtaatgtcgcctaagtaatcgcgcgccgctaaagtatttcaaaagcctaactttctcacgcgacgagcgtgtgatttttgtgacactagtgccccagatttttttggtggacgagacaacaagacaaggaccgcgtttggcgttttaagaaaaaatcgcgttctggaatagaaatcaagtttcagacaaagaacacaaatgaagtaagattagagtgccccaaatttagatatgcaactgaaattatatagcttaaacattgaatttataactatggaaattcatctataatgtatcttaaacgcaattgcttgttgtaaaatcgttgggtaacaaacgcgacaattttttcaatattcccataacgatcttttatgtgaccgttaaataacaaacgcgataattttttcacaccctaaacgactttttgtataaccgttagataaaaaaacgcggcaattttctcttaaacctttcaaaacgatcttttgtattaaaacgatgacgtattctaacttgagtatttcttcttattttagaaaagtatttgtgaaaacatactcaaaatctctttaaattaagttaaggataagatgagagatattgcattaatgctaatagaattctcacattttaaggatactaattggtaagtatatgctagatatttatgtattgttgaccaaaaaaataataacacaaattagcttacaagttacaaccatttaattttacaccatgttggattgagaattttgatggttattcctttatatgttgaagaaaccttctgggccaacaactttccaaataggcccaattcaaacccattgtacaaatgcaaggctactttcgtcatttttcgtaaggcgcttgaattttgcgttttcagaatcttggtttctagggtttcacttaccttccctccgcgcccttgagctctctacctgagcttctccgggattcctaaagctgaaattcaaacacctccattttcatcctcaaggtttgctctctctctctccctctccatcgatccattagatagtgtgattactcctatttgtgtactgtcttcgatgattggcgtcaatcttactaccttctcgtttaaaacccagtaacttgcgattttgttgaactttttcctcaattttctttcgattaatcctctagaaacccgtagctaagcttagattagtgatttcaatcgcaagattcaatattgatcttgcccaagtgaattaaagtcgcaaaattgatttgtttttgtttttttagctttcttatgtaattttgctcaaagctatatgattttttgtctttgcagggagataaataaaactctattgagtagaaaatgagtgctgcagcacacaggactcctaaatcagggaggcaatctctgctatttcaagatttagcttctcctgtttcagcacgtagagggaaattctcgagtccgggacaggcagctgcggtatctgcactatggcgtgagaatttcggaggatctgatcttccaccacctccaatgtatactttggatgaccggtccgatttctctcctgagtctggtattgcagactactctgcgtctccagatgctaagtctgacagaagaacaccattccagagttctggaaagaatattgtaactcctggtaaaggaaagttggaagcaagcccttctttttctctactgaatgcacaacagagtcagcaagtttcagggagtccgagttggtggtcgcagtcaaaggcaggtagtagtaccgagcaggatgataaagggaagggatctcctgtagaaggggtggttcagccaggtgcattggtcactcttccgccgccaagagaagttgctaggccagaggttcagaggcagattatacctacaggaaaccttgatgaggaagagtgggtcactgtctatgggtaaggccatttaagctttattgctctcgtttttctcactttactgttgcaaatgttcttgatttgtcaacattctcgtgtctctgaaattctaggtacatggatgataacagttatattggtactgggtagtgttattaagtgccttaacttgtgtctgtctcccatgtttcaatcttagagaactgttcataataaatgctgttctttaccatcatgatgctcaaatatcagcctttgattgtgattttatgttttgatcattgtgaattctgactctttacatggataataactggtagtgttattaagtgccttatcttgtgtttatctcccatcttttcaatcttaagaactgatcataataactgccttcagattttctccaggtgatacaaatttagtactacgggagtttgaaaaatgtggtatggtcttgaaacatgttcctggtccaagaaatgccaactggatgcacatcctctaccaggttactgttcttcccttcaaacctgtttgatgcatgttgataagcattcatagttcttctagacgagtcatcatacatgatagtctaatcaaatcttttatataaaggaaacaacgaactgacaatggtctgtgtatttgatacagaaccggtctgatgcacataaggcgctgaacaaagcagggatgatgataaacggagttgtaatagtaggagtgaagccagtagacccaatacagaagcaagcgttaaacgagagactcaacaaccaaggattcatgcctttacctccaccatcatccactagaaacactgctcgacccctgtctcgtcctcagtacttgcaaaacggcagcgctttctctcctcaaccaagtggtggcgctatggcctctccgtcaaagtcaatggtctcaaagttctttgacttgatgttcggtgtttaaaagctacttcaatggcatttcccgaatgattcttctttacacatagtttgaagtttttgagagcagagtggctaagtaaatcttagagcgtggtcaaaattaaaaattgtaagaggtgtttcaaattgtcttttgtattgacgacggctaaaaatttggtataaatctgattattaaaatctcctcttttagccgtttcattgttgtttgtatttgagcagactagtcatgcctcgtgaatgattgaaagaaagacactgattccatggaagcctcacgggcagtgttttagaaactccattaggaactagccacgtatctagcctgttgtgtttatatatcccctctcgcatgtaaattacattacaaaactcagtaactcacaatggcgaaagcagcagagcagaaacaaaacccgaccgttgcgagtgcagaagcgaagcttgatatccgcgacgtggtcaacacagccatcacttacggcgaagataaccgtcacggcggcgggaaacgcaatgacgtggccatgtttgtgctaagagccatgtgcatggccgtatcaacggtggctgttacgttaatggtaacagcacgcgagactagcatgaccactctctatggcttcgagtttcagctccacgccgtttggtctctctcagattctcttatgtaagcatatttcataaatttgacatcaccagtgatatgtattccacgttgcttttgaaactgacggttcttttacagatatctagttgtggtttcatcggcaacggttctttactcgttgattcaactgattataagtggaacaagactaatgagaaaatctccggtgattccgacaagaacacaagcatggttttgcttcgttgcagatcagataataggatacgcaatggtgagtggaggatctgcagctttaggagtgacgaatatgaacagaacaggaatcagacacatgcctcttcctaatttctgcaaatctcttggtttcttctgtgaccatctcgctggctccatcgtcttcgccttattcgcgtttctcctcctcgccgcttcttcacttctcgacgttctccatctctcacgccaccgctaaaaatttaattactgttttaccctcttgtacttctcgtcgttaattaagtttttcatcattacaataatcatttacgttatggggttgctttttggaatttgattgtttcaatcgatattaccgaatttcaatgttttgaattttgttgaccatgttccatatacacgacaaaaaaaatattcaaaatcacccgcgacaaacacatacatgagtgacactgacagaccggtttccgcgtctcgattcgtttttagcgtctgggcttcttaatgccttttttagagttaaatggcctaagtttttgttattgggctttaagaagcctttttatattacgattgttctgtgttctgtttcttctatccctttagcctgggaaatgatgaagctcattgctacgttttaatggcgatcactctatctcgactagcttggtttattgcaattcacttcttcatgtaagttaaattcactctacttcaattgaatcacatcatggcttgtcgtttccctctgcattcttcgtcaccttctcaattcctttcaccggaaaatcgtcagagactacccagaaattacccttcaatctcatgccaaaacaattcagctaccgaacgttgtccatgaagatggtgatgataacgacaaagccaagacaaaccaagtcaatcttctcgcaataccaatcacactcactataatctccgcttctctagccaaaccgtcgttcgcggctgcgaaggtaacggagagaaagagaactcagaagaaacctcaggaggctttgacacttgaacagcttaaagcttggtccaaagatttacctgtagtttcgaatcgtataccttatactgacattttgagcttaaaagctgaaggtaagcttaagcatgtgataaagcctcctaatttaagtttgcggcaaaaggcagagcctgtgttagtagttttggaggattctagagtattaaggactgtgttgccttctttagagggtaataagaggttttgggaacaatgggatgagttagggattgatgtacaatgtgttaatgcttatactcctccggttaagagacctcctgtgccgtctccttatttaggatttttgtggaaagttcctgcttatatgttaacatgggttaagccaaagaaggagtctaaacgtgctgctgagttgaagagaatgagggaggatttcaagaggcagaggaaggaggagattgagacgatgaaagaggaaagagtgatgatggaaaagacaatgaaggcgcagaagaaacaacaggagaggaagaaaaggaaggctgttaggaagaagaaatacgaggagtctctgcgtgaggcgaggaaaaattatcgagatatggcggatatgtgggcaagattggctcaggatcctaatgtggctactgctcttggattggtattcttttatatattttaccgtgtggtggttctcaactataggaagcaaaagaaggattatgaagacaggttgaagattgagaaggcggaagcagatgagaggaagaaaatgagggagttggaaagggagatggagggaattgaggaagaggatgaggaggttgaggaaggtacaggtgagaaaaatccttacttacagatggcgatgcagttcatgaagtcaggtgcacgtgtgagacgagcatcaaataagaggttacctgagtatcttgagagaggtgtggatgtcaaatttacagatgttgctggacttgggaagattcgtcttgaacttgaggaaatcgttaagttttttactcatggagagatgtaccgcaggagaggggtcaagattccaggttgaatgttgtgaaaacttctgtttttccttatatcacctagtatttgatgttaagttatatgatctatgaaattctgctgtttgatcatttctttaattttgttttcgtttaggtggtattcttttatgtgggcctcctggggtcggaaaaactttactggcaaaagctgtagctggtgaagcaggagtcaatttcttctctatctctgcttctcagtttgtggaaatatatgttggtgttggtgcatctcgtgtccgagcattataccaagaagctagagaaaatgtaagtctaataactttctatacctgtgttgatcgtagaacttaattctcacttttggatgcttctgagatcattcaagcagtacctcttggcttcttttctgttgattctcattgttatagtgaggatttagtctattactggatgttaattttaaggtggtctcactgcaggctccatctgtggtcttcattgatgaattggatgctgttggaagggagcgtgggttaataaagggttctggaggacaagaaagggatgccactcttaatcaggttccagacatttcagattgtgtaatagttttcttcgttatataacgggatggtaattttattcatttttttgtgtcccagctacttgtttctttagatggttttgaaggaaggggagaggtcatcaccattgcttccacaaacagaccagacattctcgatcctgcgcttgtgaggcctggacggttcgaccgcaaaatctttatccctaaacctggtcttattggacggatggaaattctgcaggtaacggcgtggtatctgtgtttatgtattcttaaacttgtaaatttgcaacaaaaaaaaaagaggttaaaagtagagttttgtcctcggtccaaatttatatttttgttttggttttgctgtttaggttcatgctcgtaagaagccgatggctgaagatttagactatatggcagttgctagcatgacagatggcatggttggagcagagcttgctaatattgttgagatcgcggcaattaatatgatgcgtgatggaagaacagaggtgggatcaatatttttagttcaaattagttatatctgctcttgttttttggatgggtttggtttcaaatgttaggatcgtgtagcatctggtaatatggtgtgtgtgaattaaattaagtgattggatgttgtgctcgataggaagcttaggctaatattaagtttagaagtctatttttgattccagcaagtaaaagactgagaaatcatctatattctgtaactctaatgcagttaacaacagatgatttgcttcaagctgcacaaatagaagaaagaggaatgttagatagaaaagacaggagcttggagacatggcgacaagttgcgatcaatgaagctgcaatggctgttgtagcagtgaactttcctgatatgaagaatatagaatttgtaggtttcttaaatctcttttccccttcatacattgaatgaagcttcaactttctgttttaccgcaccgtgacatttcgatgaccttgaccagctgacaatcaaccctagagctggtagagaattgggttatgtccgggtgaagatggatcatatcaaatttaaggaaggcatgcttargtttgtggctttcatcatacagatttactttcatgattacacgggttctttatgttaatctatatgtcctttggtggtctactatatgtagtcgacaatccatcttggatcacatcactgttcagttagcaccccgtgctgcagatgaactatggtacggtgaggatcaggtgagagatatgatatatcattttactcttctctaataactgtggtcatatttttttttagtttaccaacctttgctaatgatttgttacagttaagcacgatatgggctgaaacatcggataacgcaagatcagctgctcgatcattggttcttggtggtctttctgataagcatcatggcttgaataacttctgggtagctgatcgaattaacgtaaggccatatcttgacattgttttcacttcagttttcagagaacagatatcatcttctgatacatggatttgcaggatattgatgtggaggcattgcggatattgaacatgtgttacgagcgtgctaaagaggtaaagtagacttctaaatcaactacatctatatcatagcatctcctttatattggtcttgttaaatatatatttacaaacgcatacaccagattcttggaagaaacaggacgctcatggacgaggtggtagagaaactggttcaaaagaaaagtctaacgaaacaagaattcttcactcttgttgagctctatgggtccagtaaaccaatgccaccgagtatccttgaacttaggaagatcaaacggcttgagctagaagagatggtgctgaaactggacatgactaccgcaagaaacagttcataagatgattgtaatttggagaaaagagacagttcgtgacaatcgtagggaataaacatcaaaaacccattatagagacaatgaggttgatcctttatctatatttcctctgtaatctttgtaatagtacatgttagataattctttgagcttcaatatagtataacacttctttttatccatattgaagcaatagtcaattttaaattgtttcacatatcttgaaaaaaggattatgaatttttatgtcatgaacttatgtggagcatgtggattattttaatttgctatatataaaaattggaagacattgaacaatgggcacatgctaatccatgatttttctttttgttaggtatttaggtgaaattgcaaattgatgagaatcaaatcaagagtgcttaggttggtcgatatacatacaactatttgattattattacagagcagataacatttgacttgcaagatttgacaactaaatgatatttacgtgttaccaatttttattttatttttagttaacccgtttaccaaatcatttacttaacctccttattggtaattggccaccttaatggcttaatctctattattgaacccacccgactcatcatcatgtactgtttactaaaaaatcgaaatacccaaccgattttctaattttattatttaaaactcttacgtacataattgttctatacaattcacttcactgttattaatgataaaagtcgtttatttgaattttatcaaagcactacagaaattaatatgttaaaaatagttttctcatattttataatctggatataggttcaatacgatttctttgggttcttgtctcatataaagtgtccaaaattattaatcttcttaaacaacggtaaaaaaaataaaaattgaattcgtcaaaagaatttgacaacaagaaaagaggtccacaacggcagtatttgacttgctcgttcccacaccaccatctctactcatattcagttaaatactatatttaagctaaaattaaacacactcaaatattaaagaaataaacaaaacccgtgtttaagaagactaaaaatcacgtaacagtttcaaaataaagagctatgtgactatggaatctgaactgtaactccaccttttattaaaaattcaaatgcatttttcttctttgaatattgatcttttcggtttgttggcaaaagtttaactagtttgataaaaacaaacgaattagtggaatttaatatgaattataataaggatgaacccgtgaccaaaacacaaaacaaaagtacgtgaccgttaatgttctgtacttatgttggtcgaaataaaggaatttcattttatccacagtgattttatgttggttatactgtaaacgtttttcacagcagaagcaatgttatttttttgcaaacataaactatattctattagtaatgttggtgcacaaaaaaaaaagaagaagatataattagtcaaaatattaaataagtaaaaaagattggacggtgtacctcatttgaattatttttagagtgttctataatgcattctcatatttgatcattacaaattttgttccaacctaaactcctacagttacctaactataatataaatttcttgcttctggaattatctaatcgacatacctagattaataatcttcaatcttgtaaattggaatgtagttatagaataatgtcaacttgtcatagattccaactattttcttcacaataattgtaacaatttaaaatcaattatagtcagcattggagaagagggttattgactggtgagaagaaacaaagaatgaccattgactcttttaggaatttatacgtttaagaagagttaaataacatttttgtttgttgtgattcacaagtacaagaacattgcgtaacgatagtttccaatttccaaacttacaataattgtatgttatatatattacacatttacataaatattaataagtatattttacaatatttggtacactagccctagtatagtagcatatgctacgtatccgtacaaaaagaaaagaaatacaaatgttatctatgatgcaatattgcaatataatgcactttcctaacttaattagtgattaaagctccacaattccacgaaattaaactccgatatttcttcataaaaatccataaccggaggatacacccaacaatcgaacggctcagaataagccagatcagcacgtgatgtcacactctcgtcataacttccttcttcaatgttaggcagctccacaattttctccaacctctcctcatcctctgactccgccgccacgtaagaagattccgacgaaggtggggcctccggagcctcatccttctctaacagtttttcttcgaccaccatggcggcggcttctgcggcggctgtctggatatcatgcggcgatgatgacgccggacgagggaagagagaagcaagctcagggaaatttaagacggcggaggagcctttgatggtgagagcagcgacgtcgtgagcacgagcagccatatcagcggtgacaaaagtgccgagccaaatacgagttttcttacgaggttgtcggatctcggagacccatttgccccaacttctcatccgcacacctctgtaaacaggatgttgcattgaagaagatgaagaagcagaagaagaatctctccttctctttcttgtgttgttgtttctgggtggagcttcttcttcagacaagtgggtgcttgttgtagtagttgcatcagattggtctgatgacgatgatgttggtgatgcagagctgttgagtgacgtcatcttttgtactctcgtttgatacttacttcttctttttgtgtggatgtgagacatgtatttatagactgactgctaaagtgctaatgagagagctttgattctgaggtttttttttttaataaactttcttttagtataaaaacataacacgttttttttctggtttttggatgtgagaatcaatagtaattattacaaccgtcaatcgtaccaaattagactcttaaaactgtatagtattttttttatttttttccatatacatatgagtaaattgtgattttgattttacaactgcatactattattattgtgttcttgtttttagattattttgattgttctttgttttgggtggaattagactatttctttcttttaatttttgtcaacaagcatactatttcttatttcaaaggctaattaatttggtggaaatgtgtcaaactatcaaagaaaataaatacttaatttgactaatgaaattagacgctccattttaagtgacatttagcctacccatctttcaattatcatgaagattttataaaaatccaaaaaaaaaaaaaatatatctacacctattatatgtaatatacatttgaccatattgataattttttaaacgaaataaaactgaggatggatttgccaacaaagaagcataaaagatgcagagaatgtaaaaagaaaagatttacagaagagatcgtttattaactttctaaaaaataatctcaatgtctccttcgtttcctatttgagagagacttggagagtctaaagttacttccatatgtcactatcaatctgcccgttgaggtatttttattcattctttatttttatatttacacagtatgggaacctcaaaatcttattaattggatttatgtaatgaggatgtcactcgtcattttcccgttaccactttttaaaaagataagaaaagtaacttccaccatttttttcaatctttaccgttggtagaaagtacacaaaagatgcattcttattaaacttcaggtaagaaaataaaggggcatcatttcctttttctctcattaatcaaactctgaatagtttcacctaaatagattgagaaattattagctttctttctttcttatcgtatgaaaatatctacaccaatgcaaacacttgaccaatggatgtatcctaaaataagtaacgccaatttaaaatgagcaaaccagtataacaggcaatgctgagaatatggaccaagtttaacgtgtgagaaaaaaaaagctcattgcagccacttagattagatctaccttattttattaactactccaaattgtaacagacatcacgattaaacaaaattatccctggctttcgtttttctccatcaacaaaattttctaattaagaaacgcaaaaacaactggacttgacttgaagtctttaaactattcatatgcatttcctttctcagtttcatttcctttcttgtctacgttcgatacacagacacaagtctcttcagatataatatatagcaacggaacaaaataaacacatctagtaacaaacaaaaagcaactctacaactacatgttcatgccaagaacaatggactccaaagaagaagaaaaaccaaagacaaaacgaggaaacagataaaagaagcaaaaacccttaccatatgaattataaagctatctccattttctcctcaagtctatacagctctcataaattaatgttttagcttcctgcacccttgtgtccacatctcatgaaatagcatttaacactggaaggcggaattttgtaagcaaccatcaagatactctctttgtgtcgcgggctgatgtaagatgatcctgcatcacacaaacatttatgtagttgctccatgagtgtatgtacatcaaacgaaggttttttaactatgccacaaaagtagatctagtctgactatgtttaggtggttttaatcgagctagacattatgtgtgtgagatttgatgtcacatgtacaaagacaaatggcagattgaccaaactttagaatcaaagatcaggagcaagatggcaaaacttacagaaatgaaatcgaaggctctggtatcttcttttttcgaaccattcattgttgaggttggagcctgattaccaaaatttggctggaatatatcagggagtgcggactgattccctccacttgtacccatagaaagaacatttccgctaccctgagcgttcagattgccgaactgctggaagttggacatattaccaaggtactgctgctgctgagctaacaagcttgccatggcagcgtaattcaaaggttgggatgcaaaagctggattcatcatcatcccttgaggaaaattgaatggcataacacctccaggaagcattgtgttttgaataaacccaggattttgtgagccaagaatgcctccaacaggattttccggtgcttggtggctggtggtgctcggcattgcaaataaatcctgtggaagagtgcttgaagacgagcctttctgatttgaattgttttcgtcaatggagaaacttcccatcaaatcattaatgttttttgcatcttttggctctgcttcaagttttgcagttgacccaaacatatcaaatagatcaggcacatgattaccaccaacagcagcggacttttccccgacagtcattccagagaagaggtcatctgcactttctttttcttcattcggatgaaatgagacatctgcaaaggggtcgtcatcagttttcttctcgctgctactcagtccaatgtcagagctatccccaaaccaatcatcatccatcaatggacctgctgtcgccactgtactgccagtatctatagcattcagattgttcaaagtatcgtctgaatcaccggtgtcaatcaagtcaggtaaatcaacagcagcctctcgcttcacagtattatcagagctgctcatcaacccacttgactgtccaccatttagaaggctcagaacctacacaacatcggtatctcgagttaaccaacaaattagcataatgccaaaaaagagttttgtgaatggttataacaagcagaagcttaccttgttcgccttttctcgaagggaagattgtggagactctgcgcaccgctgtatggcatccaagttttcactaaaataggtatgtacaattgaaaaattctcatcttccttcttcctcaaaatggcctcaaggacacataaagctttcatccgaacctgccaaacagaaaaacacagttactttcaaagtacaaaagtgggaagattaacgctacagaagaaacaagccagggaaaagaaaatacagatgatataatcaagaaaaaagtacattagtagcatcaaacagtttcacaaggaggtgactaggaaataatcataaacatacctgccacattggagaatggagcttcccgtcaagagcaatgcttaaagcaacagcgtccatttttgcagcctctaaaatgaaaacatgaagagcatcacgagttggctgcaggcgtacaccaccagatgtaacaatggtttccagcagcttttcctcacgagttttgctctcaacacgaactgaagcagaactttcacttgcttctccggaagcgtggccccaagatccaccagtcgtgttcttagacgttccgtagttaccatccttccccagcttaactggatcatatctactgaagttctcattttccatagttaatgatctgtggagatttggacctctgtagctgctgctgccattctcattcttctttggcaaatggccttgagcaaaattactgattccttgctttatagatgcacttccaatacccaccacctcactaaggaacgatttattatcattagagggcacctgaaagttagtattcccgaatccttcaatgcgtctgttgatgctttcaggagcagctggtttagtaccattctcttctgagaatatagcagaaattgtttcatgagcagtttcccgtacagccttattaagtgcatctccttttaaaggatctggatgccccttgtaatggaatagattgcgcactgcaaccgaattcctttgcatttctcgtctaaactctgagccagactttcccacagcatactttatcaacctaagagcctgtatatacatataataaccaaaatcagtataaccagttcctacagagcttttagccacaataagatccattctacgtctccctataaacaaactctacgctataatcaaacacataaagctttctctttgatccattctaagaaaaaacaaacatctacctacaatctaaatcaatcccgacatgcaaacatttcaatcaaaatcttcatggaaaacaaatgtctcacaaaggaacaacatttcacaatcaaaaacagaaaacaaacgtaattgaaaataccttctgcttaacaatggggcttttgttatcaagacgtttcaaaatgaattcagaaaactccttgacgatgctgacatgagaagaacgaaggaggtcacagatctcttccaatttgtacacaggcgcaactttgtcctcatcagacgtaaccgcatctatcatccgcgacctccaatacgattccacagctctcctgctcgtatccatggcgaattcgaaacaaaacaaccctaattcccaaaatcacaactttttcgtcctcaccagtcaaaaaagcttcaaagacaacaactttatgaaagaccgatcctcaaaacaattagatcagtcaaaaaaccgatcctttaagctccaattccagctcaaattcaccaaactaaagatcacgatcgggatccaaatttcccctataaaccaatcaacgcggaggtaaaattagacccttgagacaacacaatcatgcgtcaagcggaatcgaatcaataacctcggagaaatcagcagagaacggagaaattgagaagaaaaaaactcaccgattcgtatgtgacagagaaagaaggaagcggtcaataaagaggaatggttgtgtgttcttcggtgtctttccttatttcccaaagttccgattttttttaatttctttttcacaattcacattatgcacatgaaactgatttatttcctctgtcacactcacaggaaaaatcaattaaattgatattatttctaaagacaatacaacacagtcaaaaacaggggacaaaacagaacattctaatctatatactaattgatgaaaaagctt

SEQ ID NO: 427 - DNA, 71521 bp, Arabidopsis thaliana
actgcaccaattaaccattacttacttctcaggtaatctctctaccttttctcatatgattatagttagtatagtatttggttacattatatatgataatctttttgaaactatttggttacgtttctaatcgcaggtaataaatcgtaagatttatcaaacgcaagcaaaagagatggcccaaaagctagttgcacagggtggtgagacgggagatgtatgggatgatggtgtttacgacaatgttacaaaggtatatgtagggcaaggccagtatggtatagccttcgtcaagtttgagtatgccaatggttctgaagtggttgttggagatgaacatggagagaagactgagctaggagttgaagaggtactaaaaaagattgctatgttgtgattggtcaagagtgtctcttttctttgttgcttagctttccgcattgaaaattatatggtttctttgtagtttgagattgattcggatgactacatcgtctacgtggaaggttaccgtgagaaagttagcgatatgacctcagaaatgatcacgtttctttcattcaagacttctaaaggcaaaacctctcagcctatcgttaaaaaacctggggttaagtttgtgctacatggtggaaaaatcgttgggtttcatggacgttcgaccgacgttctacattccctaggggcctatgtttctttgccgtccactcccaaattgcttggaaactggattaaggtagtaatcacttagaccaacatacaaagatctcccacaactatgtatattgaaggttttgtttgttagcaccaaaaatactaaaccacggacgcgaaagaaaaaaaaagagagggaaaaattggaatttagataattaatgacagttttgcaatttataatttgattaattttattttacaattatggaaatttactaatcagaatataaatccttttaaaaatagctaacaaatattactaattaattataaggtggagcaaaatggagaaggcccagggctaagatgctcacatggcatagctcaagtaggcaacaagatttactcttttggtggtgagctcataccaaatcagcccatcgataaacacctttacgtctttgacctcgagacccggacttggtccattgctccagccaccggagacgttccacacctctcttgcttaggtgtccgtatggtgtcagtaggatcgaccctctatacctttggaggccgagacttttcacgccaatacaacggtttctactcgtttgacacgacaacaaacgagtggaaactgctaactccggtggaagaaggacccactcctcgtagtttccattcgatggcagcggatgaggaaaacgtttacgttttcggtggagtgggtgctatggatcgaatcaagacactagactcttacaatatcgttgacaagacgtggtttcattgttcgaatccaggagattcctttagcataagaggaggagcagggctcgaagtggtgcaagggaaagtatggattgtgtatggatttaacggatgtgaagtagatgatgttcatttctacgatcctgctgaagacaaatggacacaagtggaaacattcggtgtgaagcctaacgaaaggagtgttttcgctagtgcggctattgggaaacacattgtgatatttggaggtgagattgcgatggatccacgagctcacgtaggtccgggtcaattaatcgatgggactttcgcgttggatacagagacgttgcaatgggagaggttagataagtttgaggggactccgagtagcagaggatggaccgcgtccacgactggaaccattgatggtaagaaaggacttgtgatgcatggtggtaaagctccaaccaatgaccggtttgatgacctcttcttttacggaattgactctgtctgattaagcgcgatttgatcatgaccgtttgtgttttatttgtttgtgtgtctgtgtgtctgtgtgatgcaataagggagggatcgtgatacctctatatgatccttcgtcagcttatccattttattttttattttctaaatgtatctttttgttttttgttttctgttttgtatgtttaatgtttcgtggcttgttcaataagatgtttattttccgaattttttttgggtatgttacgttatactacaaacaaaaatattatgattttgattttctctaaagatgaaatgaatagaacaagaagtcagcagatagggtggtttcatctacttttgtggttggtaaatgtggttagaaaaatttgcattgaattgtaagtttctatccataaaagaaacaaaaaattaatgtaatcaagagtggaaagttaccaatggattataaaaatcttgcaattctaataaatcctcatgtcaacggtacagataagataagggtaaggggcaaacaatcttgttggttcaaatggcaagtaaacaagggcaattatatccacctaatccattgcgttttctttctctaatcttagaatctactttaattgtatgtttttctctttcatctactttccaaaactatataacctcatttctatactttttatgcatttattttgaaacccctttatcaaaaaaaaaaaaggggccaatttttcttcaaaaatggttactttaagattctcatatacagtgtgccaaaaaaaaaaaaggtacctaaaatatttattatttcagatattggtcaacatattatctgtaacagaaaaatgttcacgtgatatttgcgaatcacatttttctaggggcaaaagtgatatatgagaatcttaaagtaaccttttctagaataattgcccttgtttacttgccactgtagtcatttatttaatttatgttcaaaaacagattacctacctaattcaccgaaacgaaaaattttgttgccagtttttgttttttttaattttttttttcctctttttagtttaccttctcttttttctgttcaacattaaactagaaggtagagtaataaataacgatggatggatgtgttgaaaacgcgctttatgcatgattcatacgagagcagctgaggaggagacaaaaaacgggtctacactatatcagacttttttttgtttttttggtgtaaaactatatcagatggaaaaatatcaaccaaataatgtagaaactatatcaaacttttaacaaaactatcaacccaatattttatattttattaaaaaacaatactaataatttttccttttcctcgtttttttttttctgatcaaccattcacacgttgtttttcgtaattatgattctgcataatgctttctctaaatcaaaaactccacgccacggttcaactgatgtagtgcctccaccgttgtcgtttgactcgttgcagaggacaccattatgcacttcgattcattttcaaaatcgtctttctctactgaattgttactccatttaattttttggtccatagataacatagaccattatactagtatgttaaatgtatacttatcagttaccgcacaacattaattcttaaagagggttcattttcgagaattgagtacaacactaccattaggccaaaatgcgagaggcaaaaaaagatatagcatatacttatcatgaataatgaaaatcttttccatccaaataaaaatctttcttctcataaaagaaagaagagaaaaaacaatgagtttgcatatctttatcctgtagaatgataatcttccccatcaactactgtagatcgtcaacgtgtactcacttccattatcgatcgaatcatcaatttaatgcctcgtgaatcacgagatcatataatatgacaagaaattcgtcccgtttatctactgctggtcaataaatactcatgcaattcccaccaatagatcactcaaccaatttcttctcaggttctctcttcacacctctccccttctctatgattatagatagtatatgatttggttaaattatctatatttcttttttgataaaggatttggttaaatttttaattgcaggtaatactcgtaagatttatcaacacaagcaaaaaagatggcccaaaagctagaagcaaagggtggtgagatgggagatgtatgggatgatggtgtttacgaaaatgttagaaaggtatatgtagggcaagcacaatacggtatagccttcgtcaagtttgagtatgtcaatggttctcaagtggttgttggagatgaacatggaaagaagacagagctaggagttgaagaggtactaaaatagatttttttttttttttttttttttttttttttttagtcaaaaggtactaaaatagatttatatgttgtgattgatcaagaggtagggtcttttttttttttgttgctttccgcattgaaaattgcttggtttctttgcagtttgagattgatgcggatgactacatcgtatacgtggaaggttaccgtgagaaagttaacgatatgacgtcagaaatgatcacgtttctttctattaagacttttaaaggcaaaacctctcatcctatcgaaaaaagacctggggttaagtttgtgctacatggtggaaaaatcgttgggtttcacggacgttcaacagatgttttacactcccttggggcctatgtttctttgtcatccactatcaaattgcttgggaagtggattaaggtaataatctcttagaccaatccaaaaacaaaaataaaaaattatctcacataaatatgttgttattgttaccaccgcaaaatcactaaatcacttacgagaaagaaaaaatgaagaagaaaagagggttgaatttggaattcagataatgacacttttaaaatttataattttattaaatttatcttatgggagttcattaatcagataaataatttctttaaaaataactaaaaaatattactcataggtggagcaaaaaggagaaggtccagggctaagatgctcacatggcatagcacaagtaggcaacaagatttactcctttggtggcgagttcacaccaaatcagcccatcgacaaacacctttacgtctttgacctcgagacccggacttggtccatttctccagccaccggagacgttccacacctctcttgtttaggtgtccggatggtgtcagtaggatcgaccctctatgtctttggaggccgagacgcttcacgccaatacaacggtttctactcgtttgacacgaccactaacgagtggaaactgctaactccggtcgaagaaggacccactcctcgtagtttccactcaatggcagccgatgaggaaaacgtttacgttttcggtggagtgagtgctacggcacgactcaatacactagactcttacaacatcgttgataagaagtggtttcattgttcgactccaggagattcccttaccgcaagaggaggagcagggctcgaagtggtgcaagggaaggtatgggttgtgtatgggtttaacggatgtgaagtagatgatgttcattactacgatcctgttcaagacaagtggacacaagtggaaacattcggtgtgaggccttccgaaagaagtgtattcgctagtgcggctattgggaaacacattgtgatttttggaggtgaaattgcgatggacccgctagctcacgtgggtccaggtcaattgaccgatggaacttttgcattggacacagagacgttgcaatgggagaggctggataagtttggtggagaggaagagactccgagtagcagaggatggaccgcgtccacgactgctaccattgatggtaagaaaggacttgtgatgcatggtggtaaagctccaaccaatgaccggtttgatgatctcttcttttacgggattgactctgcctaattaaggcagatttggtgatcatgaacgtttgtgaatgtgtgtgtgtgtgtgtgggtctgtgtttgtgtgtgtaataagggaggggtataccaccatatgatccttccccagcttgaccattgttttttttttaatatgtttttctttctacatgtttgtttcacgtttcatgttgtatccaataaattgtgtactttcctagtagtaatcgccagaaaaaaaaaaaaaaaaaaaaaacctagtaggtagagtcatagcttacaattaaataaataacgatggatgtgttgaaaacgcgtttatgcatgattcatgaattgtatatacgagagcagccgaggaggagataaagagaggggtctacaatgatcaatactaacttaattttgtagtgttgtcagtcaataatgtatacctatcaaaatggggcctatattccatcactagtgagttcgtcagtcaataatgtattttccgacacttaaaaaacgttccaaatcataatacttataattataaccagataagttttactgaatcccagactaattctcaaactttgctatcatgttattaacaaacattacaatgtagagaaatatggatgccctagtttcaactaacacgatgaatcatgtcaatcactgtataaatagttaataagttgtgacttttttttttgtcggctaataagttgtgactttaggcaccgtcaatattcaactgtaattataatcgtatataataagtgattatatctgtcaaatatcatatataacaaataatataattgtatgtatatatattatctctatcaactataatcatatacagaaagaaaaaaaacaagtgttacatcacgcttagcttaaaagtttcgactttttgcaccgtcatatttcacgtgtaagcaagaaatacaaatgtaaatagattataattaatgaattctctcgactctctcaacatagtatataaaaggaaatctacacatgaaccgtatctttctcacttttgaaatattttgatgttttaaagaaattttttcaaaattttatataaattataaattaatttaatattttttgattatttatatttttcatcagtcttgttcataattggttgaattgttttaaagtaaatatttctttagctaaaacatcttatacaattaaaagaaaaaagtgtaatcaaataaccaaatataaattagtatttcaaattatacttattgcagggtgataaaccttttgtcccaagtgaagttaaacctataaatatataccccatttagagggtcctatataactaaagtaccacatatttggtggtttatatcattcaatttttttgtaactaacttaatatttgatatgtaaaatcatgttaaaataggatcagcagatagaatatataaaaaataagtcatgtacaaacgtaacgttcttcatatcttaggtaacgtatctaacaattttgttaaatattattattttaaaaaattgaacatattatttggaaacttttcttttgataattttgaaatggcactttgtaattaagagtttaataaagaacacgtcacacacaaaaacgaagaaagagattatagaaattaagttgtgttttcaatcttcgtgtatacaaaacaaaaataaaaattagaaatgatatttcatacgatgttgttaaataatataattatgaaaattagttgtgctttatattattatttttgttggaagctctagaaacgatcgacctaatagtatatttttgtcactaaaaagtgtgattaaaatatatatatatatatatatatatatatatatatataatattgtaattttcaaccaattctcggtttaggtggtttattattatattgttttttgaaaaaattaaaaaatatatccttattagttcattcttttctggtcattcgttcacactttacaacttggttaatggccacttctcaagttatcgttctttcatttgttctacagtcgcaagaaattatcgttctttcatttgtcattatgcataatgatttctcttttctttttagtgcataatgatctcactacataaaaaaatctatcttacgattcaactatatttagtcccatgcactcgctgcataacacattactttcttcgatttagagtgattttcacaaccttgtttctgtattgtatatttagttagtgtttgtgattaccaaaaaaaaaaattgtttcttcttggcttagtctttttatcttttttttttttttgcttcatctatttttcctcccatgacagatgaagacggcaagagatgcagcaaatctcatttatgatctatctgaagaatcagcgtcatcgatttggagactcgaaccataacaaaaagagcatcacagtttcaatttaattgctcctggcgcttcctatttcagcaacaaacattaaataattaatccaatagagatgatatatatggaaatttcaaaaccaaaaaaagaaactttcaaaaccaaaattgcgaagccatagaaatcgtggatcatggaattgcgaagaccaatgttgacatatgggaatttggtgtcccaatgagcagagatcactaagattggttttcgggaggaactttttgagttcatgatttgaagaattgtctcgcctataagctatcgtccatagtttgagattcatgcgacaagaagaaggtttgattcactttctccatttaattgaatcatcttcatagatatattttcatacttaatcaatgtttttaccaaaaaaataatgttattttattattttggttttatgtggtttgggattggtgtagattataaaccgattaaaccaatgtttttgtgttctgagatttcaaacttttgaactaaataaatatacgttttggggaatatccaatatcaatatgtatcatagtttggactctatctattccagtatgataattcccgtggaaaaatatatcatcgtctctattttatacatgcacttgcaacacaaaccagccataaagtgggtctattcttataatttatgacaacatggaacactatcattgggccacgatgcaaggagcgaaggacgatgcgagaaggtgctttactgatttgatgaacgtggaggtgattctgaatgatacgagatctctaagctgaatatataatagtatagtttttcgtaatttttttttgttaaattttttatcgctgctaaagattaaatggcgagtaaaactatactattatactttcaaagatcacccgagaaaatgatgactgcacatactttcaatatcccatagatgacatatctgttttatttccatcaagctattcatcgaaacaaaagcacatgacgattatgggagagaaacactactctaaaatcccgtaataagctgcaccacctaattttttgtgccttgaccaaaaaaaattcaatgttgcagttcaacgaaccttcttacggaggatctttaaacaaaatttatttggtacatagagaaaaatattttaatatatactaatttaatgcctcgcgatcaacgagtagagaaaaaatatgtcgcgtgtatcttcttccattggtcaataaataccaatgcaatgtttactacacaaatcattacttcagtctcactctcaggtcagctctctccacatctctctcatatgattgtactatgtataagatttggtaatatttgtaattacaagtaaaattcgtaaatacagataatattcgtaagaggttgatcaaacgaaagcaaaagagatggcccaaaaggttgaagcacaaggaggaaatggcggtaaccaatgggatgatggatccgaatacgacgctgtgaccaagattcaagtcgcagcaggcgggaacggaattgaatatgttaagttcacatacgtcaagaacggacaaaccgaagaagcccctctacgcggtgtcaagggccgtagtttcgaagcagatccggttcctatacactatccttgcctatctcttcatttttatctataaggacattgacgtgaattaatatatatatatatataggttatatattgtcaagggtttgttttgataatgttctttttaagaaattgacattttgatcttgatctctacagtttgtgataaaccatccggaggagcacttagtttctgtagaaggtcggtataaccctgaaggacttattctagggctaacgttcaaatccaacaagaagacttctgatctcattggatatgaagatggtacaccgttcactctccaagttcaagacaagaagatcgttggattttatggcttcgctggaaacaatctccattctcttggagcgtactttgctccgttgactaatgtaacccccttgaatgccaaaaagctagaagcaaagggtggtgacacgggagatatatgggatgatggtgtttacgataatgttagaaaggtatatgtagggcaagcccaatatggtatagccttcgtcaagtttgagtatgtcaatggttctcaagtggttgttggagatgaacatggaaagaagacagagctaggagttgaagaggtacaaaaatagataattctatgttgtgattcgtcaaaaggatatatatatatatatatttatatgggtaacctcactcaaaattatttggtttctttgcagtttgagattgatgcggatgactacatcgtatacgtggaaggataccgtgagaaagttaatggtatgacctcagagatgatcacttttctttcattcaagacttataaaggcaaaacctctcagcctatcgaacaaagacctggtattaagtttgtgctacaaggtggaaaaattgttgggtttcacggacgttcgaccgacgttctagactccctcggggcttatatttcattgtcgcccactccaaacttgcatggaaagtggacaaaggtagtaatcttttatatatcaccatgggagctagttcactaagcagactctatattataaaaaatcctaactaacaagtattattaattaattataaggtggatgaaaatggagatggtccagggctaagatgctcgcatgacatagcacaggtaggaaacaagatttactcttttggtggtgagttcacaccaaatcagcccatcgacaaacacctttacgtctttgacatcgagagccggacttggtccatttctccagccacgggagacattccaaccctctcttgcctaggtgtctgtatggtgtcaataggatcgaccctctatgtctttggaggccgagacgcttcacgtcaatacaacggtttctactcgtttgacacgaccacaaacgagtggaaactgctaactccggtcgaagaaggacccactcctcgtagtttccactcaatggcagccgatgaggaaaacgtttacgttttcggtggagtgagtgctacggcacgactcaatacactagactcttacaacatcgttgataagaagtggtttcattgttcgactccaggagattcccttaccgcaagaggaggagcagggctcgaagtggtgcaagggaaggtatgggttgtgtatgggtttaacggatgtgaagtagatgatgttcattactacgatcctgttcaagacaagtggacacaagtggaaacattcggtgtgaggccttccgaaagaagtgtattcgctagtgcggctcttgggaaacacattgtgatttttggaggtgaaattgcgatggacccgctagctcacgtgggtccaggtcaattgaccgatggaacttttgcattggacacagagacgttgcaatgggagaggctggataagtttggtggagaggaagagactccgagtagcagaggatggaccgcgtccacaactgcgaccattggtggcaagaaaggacttgtgatgcatggtggtaaagctccaaccaatgaccggtttgatgatctcttcttttacggaattgactctgcctaattaaggcagatttggtgatgaacgtttgtgatgcaataagggaagggtcttgataccaccatattatcattcgtcagcttgtccattttgttgatgttttttttttcctaaacgttttctatatgtttaattgttttatgtttcgtggtttatccaataaattgtttattttcttaaaataaatccccagataaaaaaatgcgaactagaagggagagtcatagcttaatattaaataaataacgatggatgtgttgtatacgcgtttacaactaatcccatgcaggattcatattgtaattgtttaactagtctagtggtcaaagtcatcttcccacatggagaggtgcagagttcgaaactttgaatctccaacctccttttcattgttcttcaattaaaaaaaaaaaaacattttcaaataataggccgtaattgtttttttgcttctgaccttcaaataattgaggagggctctggttgttgctcctctgcttctagccactctctttaaactatgtgttgtgtgttctctaatgagaataactatgctaatgtgatttctctttacaatggtgaatggtgatctttcttttaattataactgtgtataaaacattatctctattaaagagaatcacatatccaagatgtattgatgcttcaactttcttttcaacgttcactatttaaacccatgcataatgcattcctttgttcgcacttcgtattttaattgaaatatttaggtaagtcatgcctgtctcttttctttttttctttttcttataaccaagtcctgcctttcttggtttgtcactttctcataatcttatccgtgagtattgatctctctacgaaaatttcaattgaccatctcaaagaacttgtaaaatgctcttccttattatcatcctttttttccctaaaatttagtatttgtctttagcatattttgttttagttgaaaacgattgataaattagtgttacatccaaatgctggaattttataataaaataaagaagttagtagggttcatgttagatgtgtaaaatacttttttcactaagacattagatttctgtttcgatagattattataaattcttcagtttgttgatgtcattactattgactctttcagttaaaaatgtcacagaaagtaggacctttcggtggtaacaaaggagatccattcgacgatagcgtttttggttacaacggtgtgaggaaagtgattgttggggaaaacggtaacggcgtggattgtatcaaaatcgaatacgagaaagacggcaaattcgagacacaaatgcacggaagtgtcaccggagtactaaaagaggttgcataactttgtctacatatgatactgcatttctaattatatgtgttgactataccattctctgttttttgctctgtttcttctttgttgcagtttgtacttaactatatcacatcaattcaggcaagctatagcgatgttgcgagatacaacacaactatcgtgaagtctcttatcttcaagacatcacacgggagaaaatctcccatgtatggtcagatagcgatttttaaaacagatttcgtggtggaaggtaattgtggagcaaaacttaccgggttccatggaaggtctggtactgctctgtttgctattggagctcattttctcgcgccttcttctcctgtgaagcagttagaacctcaaggtggagacagaggatatgcttgggatgatggtgtttacgatggtgtaagtaaaatatcggttacacaagatggtagctacctaagctatgttaagttcaagtatgttaaaggaagcacatctgttcggcattctcacggaaagatgaaccaagaaccaaaagagtttaaggttgattatccaaatgaatttattacatcagtggaaggaacttacatttttgtggttatgtaacctcgcttactttcaaaacatcaaagtgtagaatctctcctgtatttggaaaagtgtctagtaagaaattcgtccttgcggtgcttgtcggattccgtggacgtaatagtgaaagtgacaatgctctcagagcacttggagcaaattttgcgccagttccagctccagttgcaccggttccagcgccagtccccacacaagttccggctaagaaactagaagcaaaaggcggagatggaggagccatgtgggatgatggtttctatgaagatgtgaggaaggtatatgtaggacaaggtgactccggtgtgtcttttgttaagtttgagtatgctaatcgcaaggagcttgtagctggagttggccatgggaagatgtcaattcttggaacagaggaggtttttgtgctctgttctcgtattgacctaataatgttttcttgagatccaagtttcactggtctttgtattttgtggcagtttgtgctcgattctccaaatgaatacattgtatcggtggagggaagttacgataaattatttggagtggaaggcgagttggtgacgatgcttaggttcaagacaaacaagcgtacctctccaccgtttgggctcgatgcaggcacaacgtttgcgttggagatgaaagatcataagatcgttggattccatggcaaagctggagattttgttcatcaagttggtatccacgtcacccaaatcaccaagtcttaaagctttgtgagctttctcttctattcctagaataaaattaaaaagccatgtctgtttgttactcctcagcttctagttactctcttttaactatgtcttgcttcgtttgtttgttatgtgttatgaagtggtctgcttctttgaataaagcatcgttttgttggaatgtgataaactgataattgtgttatgctatacttggatgcatgaggataaatgaaaactaactattcaactaaaccctaaaacctatacgatcaaaattatagtaaatagtaacacttaatgagactttaaagttgagatgtgtaactagtcaccactcactcatgttagtgattcatgtgtgtgtcagtgtgtgtgtgtgtgtttttatcaaggtcttctcttaagattcataagtgtgaatctggtgggacttaattggtctggtggagtagaacctatgcgggcaatgaggaaggttaaggtaggctaaccgagcccactctctaagtgtttaatttgtaaccttaattcgtaaataaaagctgtttaatttgtaacctttattagataaaattttgtctttttttttgtcaaaagataaaatgttgtcaatcattttaaaaacaaagaaaaaaacttttttggcaagaatttatatatttgcttgtcataaattttccattttgtagtattttgaaaaaaatattttaacgaatggaagcaataactcgacaaaaagagtcaaactaaagtaccttcacatgcaaaacaaaacgtaaatttggtatttttttcccattaaaaaaaatatatatatattcttggccttgtgtgcgaagacgatcgagaacgagaagaacgataagctcaatacgcacgaacgtagatcgaagactggaaaggtatatcttcatcaaaatattcatgattatggttgagtttaattttgtttacgtatttgttttaatttttcaaaagtccactgttggctggctgttgctatcttggaatgattttcatatctcaataactattgtttactctaagttaaattattggggtgctatttatgatgactgatgaagtgatgggaacatgattgcaatattaaaatctcttttttatttatattaattataagtttgtacccacttcattttaaatagataatgccaagacgtaggtatattattactgaatttattttttaataataagtaaatatgcaggtttcaactagaaaggtaacacatcaacaagaaataccaaaaaccactagcttacatattttgatcatataagtattgaataatatagttatagatgatcaaatagttattattaattacttagctagtgtaatttctatcgattgtttcacattcgcaacagataattatataaataaatacatactacatgttaacctttgtttttgttaaataggatgttttcttgattgatgatctagatcaacttttaataatttatacgtaccagctttcattcgatcgtgcgacttcttggaatatcccatggtacatttgcagtcgagctagaaagcttttttgataatttatgaatcatattaagcgtctctcaattagattaatatttagtaccagtgtaaatgatacaattataaatctttttaccaacgaatacagaatttgttttagaaatattcttcgcaaaattttataatatttcataaatcagttataaaaaaaaaaaaagcagttttgaattcagaggaattcgtaaatttccctaagagttattaaaactagttgtgatattttggagtattctttatggctagatccatatgatccggttcttgtatctagattttttttacggaatattgtatgatatatctagtctcctctttggttctaaacttctaattaatcttcggtgatttgaattaaacgttactgtttttaaattatgattaaggctttaaaacatgttcatacaataattaccaaatcttaaccaattagactcttaataaggagaacgtatatatatgttgcaacttgcaactttagccctttacaaataattaatcgtacataatctaattgataaacgattctttaaattttaaaacaatgaattagcttgctgccatcgtttaatgggccaacgccaatataaagacgattagttgagaagttgtgcaagtagaagtatatgaatattttcattatctaaaaaaaaaaatgtatatgaacatgcgtttttcccagtaatgctttttatataaatatgcctcgtggatcacgaaagaataaattattatttcccttattatttcatctagtacgatcaatatcaagaagtcaatataaataaacatacaattcactttaattgatcatagcaccgataacaatctactctctttaaaaggtcttatctctattcttctctattatgtaaaaattggttaatagtagatattaacaatttatttttgcaactacagaaattcgtaagtactatcaagaagcagaagatggcccaaaaggtggaagcacaaggagggaaaggagccaacctatgggacgatggatcgacacatgacgccgtgaccaagattcagctcgcagcaggcatagacggaattcaatatgttcagtttgattatgtcaagaacggacaacccgaacaagctcctcttcgtggtaccaaaggccgtgttctcccagctgatccggttcctatattttccttgcccattaatcttcttctttctatatgtatactgttatattttgaagttttgacattttcatcttgatctatttctacagtttgtgattaaccatccagacgaacatctagtttctgtagaaggttggtatagccctgaaggtatcattcaaggaattaagttcatctccaacaagaagacttctgatgtcattggatccgatgagggtactcacttcactctacaagttaaagacaagaagatcattggctttcatgggtctgccgggggcaatcttaattctcttggggcttactttgctccgttgactactacaactccgttgactcctgccaagcagctaacggcatttggtagtgatgacggaactgtatgggatgatggtgcttacgttggggttaagaaggtgtacgttggacaagcccaagatggaatctcagctgttaagtttgtgtacgacaaaagccctgaggaggtcacaggagaagaacatggaaagagtactctactcggattcgaagaggtataatactttctttgctctttttgttgaatgtaaaaattatacatcagagaattcaaattctcttccggtttccatcataatgtattcaattgttttatttggtttccaataactgcagttcgtacttgactatccaagtgaatacatcaccgcagtcgatggcacttatgataaaatctttgggagtgatggctcagtcataactatgctcaggttcaagactaataagcaaacgtctcctccctttggacttgaagctggcacagtcttcgaactcaaagaggaaggccacaagatcgttggtttccatggaagagccgatgttctgctccacaaaattggagtccatgttcgtcctttatccaactgatgatggagctctttatccttgattccatgcatctaataagttatcaaatctatcttctaaatttctcatatgaggtctcttcatgcctctggtgaatggtgatctttgataagtgttttacgcgttgtctcttgcgatgttgttttttctttgttcttcttgtgctctattttaataaaggaagtttgttccaatctgatctttagtttccctatatgttctataatacttacttttgccattatttggttctgatactaattttacttgctataattcaaactaaaatctcaacgtatgaattgtacaatttaaaatgcaaatgttaacttttttggatcaaatatatagttgttcgtattttctcagtaaaaaaatcctgcacaaagtttttatctagaatgtgtgaccatattgaagtttttggccttctccaaacataaaaagttattagttaaaagtatatgagttggccaaaaaatacgaaccggttcttgtttctagattgagcgttacagaaaattgtattatatatatactcttggttctaatttctcttaggtgatttcaattatacttttactgtttgaaataatgtacaatgctgtggaaacatgttcttacaagacttatcaaatcgtcaaccaattagagtcctaaaaagggggtcactaattgtagaattctgacttatataaattgcaacttgcaccctttacaagtaataacgtatataataaaattgacgactctgtgaattttaaaagaactaattagcttgctgccatcgtttcattggccaacaccaatataaagacgattagttgagaagctgtggaagtaaaaaaggagtatatgaatatttgaacatgtatttcttccggtaatgttttaaatatgcctcgtggatcacgaaataatagattattatttctgctagtacgatcaatgatcctatatgcggatatatggttatatgcaagaagtcaatataaacacctatgattcacttaaatcgatcacaatctactcacttttgaaggtcatctctcttttcctctctattagtacaaaattggttaataattgaaaattcacaatttgtttttttttccaattatagtaactatagtaagattgatcagcaagcaaaatatggctcaaaaggttgaagcaaaaggagggaaaggaggcaaccaatgggacgatggatccgatcatgacgccgtgaccaagattcaggttgcagtaggcggaatgggaattcaatacattcagttcgattacgtcaagaacggacaaaccgaacaaactcctcttcgtggtatcaaaggcagtaccattccaactgatccggttcctatacattttccttgcttatttgacttcttctaatttttatagaaaatctattgttttacgttgaagtattgacatattgaacttgatctctacagtttgtgattaaccatcctgaggagcatctagtttctattgaaatttggtataaacctgatggtcttattcaagggcttaggttcatatccaacaaaaagacttctcgtttcattggatacgatcgtggtactagatcatttctccaagttcaagacaagaagatcattggctttcatgggtctgccggagacaatcttaattctcttggagcttactttgctccgttgactatcccattgactcctgccaagccgctaccggcacttggtagtgatgatggaacagcatgggatgatggtgcttacgttggggttaagaaggtgtacgtaggacaagcccaagatggtatatcggctgttaagtttgtatacgacaaaagccctgaggaggtcacaggagaagaacatggaaagagtactctactcggattcgaagaggtataatgttttctttctctttttttttttgttgttgatgaatgttatatacatatagctatatatatgctttgatcagagaattcaaattttctttcgatttccatgatgacgtattcaaggttccaataactgcagttcgtacttgactatccaagtgaatacatcatcgcagtcgaaggcacctacgataaaatctttgggagtgatggctcagtcataactatgcttaggttcaagactaataagcaaacgtcccctccctttggacttgaagctggcactgccttcgaactcaaagaggaaggccacaaaatcgttggcttccatggaagagccgatgctttgctccacaaaattggagttcatgtccgtcccgtttccaactgaccatgaagatctttatctttgattccatggagatctttatctttatcttataaattggtcatttgaggtctcttcatgcctctggtgacctctgataagtgttttaacttttaagtgttgtatcttgtgttgccggtttttctttgatgtggttgtgttccattttaattaaggaagtttgtttcatctcttctaatttttatatccccaaatgttccgatatatatttcccatttgcgtctgatactaattctcttactataattaaacaaaaatctcaatgtacgaattgtacaatttaaaacaaaagtaaatttttttggatccaaaatataggtgttttcttttctccaaaacaaaaatacctgcgtaattttttttatctagattgtggccaaaatatagaagttttcggctaaaaaatattattagttgcaaataatatgagttggccaaaaataaagaaaataataaaagtatgtagccttcttgggtaaaataatttaatactcaacgtggatcacgaattatggattactattatttagaattgtgttaattaattaaataatgaggcctatatgtggatctattcttgaatattaattagattcttttttggtaaaatatctttgctaattccaagaggtcaataaattaacgtacagcccactcggatggatcaccacttatcctcatcctttatatctcttatgatactatattatagtaaaatttggttaatagttgcaattaacaatttgttttttgcagttttagtaactcctaagaaaaaatgtttcgtagtctagtggttgttttatagattagagtcttattggtgaacggtttaaactttagatattttttttcacttcacttcttaccccaaaaaaaactccaaagattggtaaaaatcaaacaatgatggctcaaaaggtgaacttggtagtgataaaagaactgcatgggacgatggtggcatggtgcttacaacagtgttaaggtgtatatatgtcaaggccacgattgtcgattgtgtgtccacggttagtttgagtatgccaatgcttctcaagttgttgctggagatgaacacggaaagaggtacttatatatcgctgcggcctaaacgggccaaacgcattttgaacccatttattttataacttggttggtcgagatacggactttttttttaataagtgacccgtttaatcccacaacttccctaggcattgtggtctttgactattgtgactatactagttattttataccttcttaaagtcagaccggtttccatcggacaagattaagttgttttgcttgatttcattgtagttcgacattgattatccaagtgaatacatcaccgctgtcgatggcacatgcgattaaatctttggaagtgactctgcggtcattatcatatgcttaggttcaagactattatgcgaacatctaatccctttggtcttgaagctggcaagactattatgccaaagggattaaatctgatgatgatgggagaatcataatgatccttcagttctgaccataaaacttttcgctcctccacgtagtttgaagcatagacaaaggaacagaaaaattcatcctgtcgatcttctagcttcaccgaacaagtcagcaattgaccactcttataaataggactaagtcgcacattcttacgccatagaacccaaatacgaccccgtctattgtgctcataattagtgagaagcgaccaatccttgaaaagcttaccaacaagctgcgaaaccttactctcctttactctcgtttcaaccaagcaaccaaacttgaaaaaagattagttattagaattataattatcggtaaccttgaaatcaccatgaaattaattttcttgttatattcttatcctcttcttctttttcttagcaattttttcttcatatccttttttttattagtagtctattgagagaagtttaatacaacagtagagtagaatgatataacattactacttgaaatagttgtttgcgagcgaattcatgttttgtgaagaaaatcgtttttcaagtattttattacccctagcggattttttataagaaaactaaatttccgcaatctggatcttgaataacacgcgtagacaacacaccacgtcaacgagtttcagggtcgacgtacacgtcaactttaacgttttatagaagattttgaattagtatgctgatccatttttataaccccaatctgactaaagatcgcgattcacgagtcgcgaaacaacgagatacttaggcacaaatctttcttgccacattcaggcacgcaatgatgtacgctagactatttttttgctgtcaacaactactgaaaaatgtttttgttttcttttcttttcttggtttgatatattaaattgcgacaacattaacaattatcaaatcttgtagaatattgaaatgaaacaatgtaatatcctgaaacacaatttccccatcttgaaaactaaaacttcattggcaaaataaaataaaatgaaacctcatcttatttccgacaaaatcagtcattagaagtttttcgtgcttcaagattccaatgaccacaagtaatataaatctataccaaaccaaatttgactaccatccgtttgcaattagaattcaattttcctttcatgttactatttcaaacagaaacatgccaaaaatggaacttacctcattatgtccgataactaaccgttatgctactccttaagaaacgtgtgctactatcatatcattaatacacaaattcaactcatttgcttcatattcacaacaatttaatagtttcacgtatcgtggatatatcgcgagattatacaatatcttctattaattaattgctggcatgattgtaaaaaaaaaaaaaaaactgctggcatgtattcaaaaaaatcaatatatacccccatgcagttcttcgtagatggatcactcgactctttctatctatctcttatcaggtcaaatcttattctctcatatctgatagtatttttgtaaatattggttattaaaaaattgtgttcgtaattacaggtaattcgaaagacatcaaaagcaagcaaaagatggctcaaaaggtggaagcacaaggaggtattggaggagatgtatgggatgatggtgctcacgacggcgttagaaaggtgcatgtagggcaaggccttgatggtgtttcgtttatcaatgtcgtgtacgagaatggttcacaggaagttgtaggaggtgaacatggaaagaagtcactaattggaatcgaaacggtacgtaaaaatgttttgcttcgaatccactaatcttgtctttattttgcttaagtttatattatatgttcttaaaactactaaactctcaatactagggatataacgttatgataggataatagctcgcggaccatccaattagccatgtttagaatttaggtcgtatcagttctaatgattaattatagttctaaagccaaacctaaatattaaaaataagaaccaataattaccagaccaattgacgccttatacgtataattatggttctaacaagccaaacctaaaccttaaactattactcaatatatctttctatttttgcagtttgaggttgatgcagacgactacatcgtagcagtgcaggtgacctatgacaaaatatttggctatgactccgacatcatcacatccataaccttctctacattcaagggaaaaacctcgccaccctacggattagataccgaaaataagtttgtactcaaggaaaagaacggtggcaaacttgttgggttccatggacgcgctggcgaaattctatatgctcttggagcgtattttactacaaccacaactcctttgactcctgccaagaaactaccggctgttggtggtgacgaaggaactgcctgggatgatggtgctttcgatggtgttaagaaagtgtatatagggcaagcccaagatggtatatcggccgtgaagtttgtgtacgataagggcgccgaggatattgtaggagatgaacatggaaatgatactctactcggatttgaagaggtataatacttcttgctttcttctcttgtggttgaatgtgaaatgtttttacaaaatgatatgaatatcttacacaaaaatatgcttgggtaagggaatccacataaactttcgtggataaaatcatgcatattttatattagctagtgttgaatatctccatttttgatataaaatattttaactaactcaattgttttatttggtttccatcaattgcagttccaacttgactatccaagtgaatatattactgcagttgaaggcacatatgacaaaatatttggttttgagactgaagtcataaatatgcttaggttcaaaactaataagaaaacgtctcctccctttggaattgaagctggcacagccttcgaactcaaagaagaaggttgcaagatcgtcgggtttcatggaaaagtaagtgcggtgcttcatcagtttggagtccatatccttcctgtcaccaactgatcatcacatatatatatatatatatatgtctcttctataccaccaagtttgtcacgtgtgatatcttcattaagttttaagttttctaatttttcttgttctgtttatctatgttttaagtgtctttaagtatggtgttttgtgaagttgttatgcctgtaatattatatgtgattggctttaataaaagtgggtgattattatacatatcagttgcacattaggagaaaagcttatattcatactcagtatctcggcatctagtgtatgatggaaacaattatctttaagactttagcattatttaaagtgagaaacaagaaaacttcgccataattggagaattggtcattttgatcaaaatccaacaccagactacgcgcagtccgtttcgaaggaggtacactccacttagtatctagatttaatttattatacagtatgtttaattttttttttttttcaaacacatatttttcttcttaagaatatatatggaaatataatatgttaattatgtaatgatcaaataatattaaaacacacatatatatatatatataaaccatatgagcaattggataacgggtaaaatctaaccaggtttcaaaaattgtaactattgttgatttttttttttttttgatcaacaactattgttgagaaaaacatgtattatgtgagcaaaggaaaaaaagggaaaaaaaactacagatcagtaatatcaactactccaattcaacttatttgcttcatattcacaacattctaatattttaatgactcgtggatcacgagattatattaacatttctatagattaattagtggcctacattcaatgatatcaataattacacattttatccagaaataaaaataatcaataaatacgcatgaaggtcattgtaatgcatatcaataactcgttccctctctcctcaggtaaattctcagtctctcgtctgataatagttttgtagagtttggttaataaaactaatcgtgtacgctactaatacgtacaggtaactaattaatattcaaaaagatggctcaaaaagtggaagcagggggtggcgccggaggagcttcatgggatgatggtgtccacgatggcgttagaaaggtgcatgtagggcaaggccaagatggtgtgtcatctatcaacgtcgtgtatgcgaaggactctcaggatgttgaaggaggtgaacacggaaagaaaacgttacttggatttgaaacggtatgtagtggtgtttgctaccactctctttgagtttaacttattagccttgttcggatcagttttaaagctttgtaaaatgagaaccaattaagactagaccaattcacacctaatacggtctagattgagttaatctatacaacatctctactcacgagaggtatcttttcgatcattgcagtttgaggttgatgcagacgactacatagtagcagtgcaagtgacctacgacaacgtgtttggccaagactctgacatcatcacatctattaccttcaatacattcaagggaaaaacatctccaccctatggattggaaacgcaaaagaagtttgtactcaaggacaaaaacggtggtaaacttgttggcttccatggacgcgctggtgaagctttatatgctcttggagcatattttgctacaaccacaactcctgtgactcctgccaaaaaactatctgcaattggtggtgatgaaggaactgcatgggacgacggtgcgtacgatggtgtcaagaaggtgtacgtaggacaaggccaagatgggatatcagccgttaagtttgagtacaacaaaggcgcggagaatatcgtaggaggtgaacatggaaagcctactttactcggattcgaggaggtattttttgtttttgctatcaaaattcaaaatatgttgtatcttttcattttcttaaaactaattgacagtaagcagattgatctatatgatttaaaatcctttaattgcagtttgagattgactatccaagtgaatacatcaccgcagttgaaggcacctatgataaaatctttgggagtgatggcctaatcataactatgcttaggttcaagactaataaacaaacgtctgctccctttggacttgaagctggcacagccttcgaacttaaagaggaagggcacaagatcgttggcttccatggaaaagccagtgagttgcttcatcagtttggagtccatgtcatgccactcaccaactgatcacattacagctacctccttcgcttccatcgaacttgttaatgtgatctcttgaaaataacttgttatacctatgatggttatgcctatctatgtttaaatgtttttaagcgttctcttttgtgatgttggtctttatataatgttacgtatgatagatttgaataaaggtggttgattccatccctataaattgcacattaagtcccatcgtgaacaacgttcgatccatactaaattaagttactgcaagtgtgtttagcgtattcagattaacattttactgaattaattttgttttaggtaaagacccgcgaatatatgtttaatatgtttaaatgaagtccaattattacatggggactatagatcatataatcatagattaaagttcattattgtttaggtataaataaaagttttttgaaaatagtattaggttttgtaagtaaaaattggttaattgggtggtcatgatcatactgataaaaaaatgaaagtatatgaaaaaaggattgttggaatgtattaatttggctcggctttggcaaacctgggatagattgcgtcctaacttttagtgatttggcatttaggccttaccaatcaactgatccagcccatgtaatgctaatcttggaattttccctttttgaaattcagtttgcaatatattaatcttggatttttccatctttctaattgatttacaatatttttatattggatcagccgcgtaaggaggagatctgatctgatctgatccacacacgtctcacgagtgtagtaggctcgacgtgctcaaactcaaagtgtgataacgtattttttaagcttaaaagaagtcatcattattgttatctgtctcaatagaaataaacgccacgagatccacgagtcgcattttttttattttgccaaaagtcaaaaatatgtttccatatatatcttcggaaattaagaagaattagattttaatctgcggtataccgcggggacaatttatctttttaaagttagtataatttttttttgcaaattatatctatttataatatatttttattttatagtttacaattattattaagtaacgtactgccaaacccgtcccgccaaacccatcccgtaaaaaaaccatttatttatattactgttgatcttatttatgatatatttataaatcattgtctatatatttttgtcgatgcgggacgttgaacccacacattttttgccaattggttaatatatgttcatttttaaaattttgaatcataaaatatgatggaaaaaattaagatttttttaaactctatatattatataatgatgttaaaaattatgatatatcaaactttttataagtttaaatattaataatgttttataaattttaaatatataaataataatatttaaaaaattaatatgtttgtttataaagtaatgacataataactctaaaagcaaggatttagaagatttaaatctttaattaaatattttcattaataaataattaatgtcagtgacatgacattgtaaataagttcaaatacaaaatttatttatttaaacaaaaaacgtttagtaagaataatatttatttaacaaaaaactttgttttaaaatattgttaacaaatatgtttatgctaattttaagggattgatttgaagtttgttaggattaaatttgattgataatgtgattgacaatttaaataaaaagtttaaagtaaaattaattattttggaaaaaaaaattaatgctaatgacattagatcgtaaataagttcaggatttatttgctaaaatagctacaaaaatgtatatatagatttcaaaatatacttttttaatcactattttttcgtggagtagctgtctacgaatgttctatccaatacattcgaacacgtgattgttcgttaattttcttgattctgtaagagaaacaaaaaatatagatgtccaactttttttttcgggtgggaatatagacgtccagcttagctacgtactgaataattcaaagttccaaactagtatatattaatacaattgacgataaggtcataaggatcgatggattccaacgattcgatacaagtattaatgaaataagataacacgattgtgacagcaaactctatattgatatttctattttttaattagccatgcgttgcacgatcaatttacaaaataataaaagaaaatgatcgatcaaagagcattccattgaaatttaattccatcctgtaatcacataattttgggcccaatcctatttttcaaatgtaacatgctattacatagtcacatagaacatcctaaaatagggttaaaatgtacttttatctatttgcaattttgatattttcctttctgaaaaagattagtatatggcaaattatcttttagataaaagatcttttgttctgactatacattaatttattttaaaaaaaaaacttaacagatatatttgcaaatacaaaatgatgaaaaataaaagggataccataatctaaaatctgacaaagaaaatatacaaaaagtcaattacgatacttagaaaaagaactatatatttttgggtagggaagttcaaaaacaaattaccgatttgctgactatatgagcaattattacatacttttatttatttgtacaacaattattacacatacttgtgtggaccaacatgattaattttatattggccatatggtgcgtagtaaatgttataataacttgaaattaaataataactaagctcgactcgatatatagatccaaccagtagcctctcttattcacacctaatcttcatcttcatcttcgcattcatagtctctacgatcaggtaatccccctctctctatctatctttcatatatgtgtgtatgtgtaaactatctatattctgaaaatagatcaatcaattgatcttttcctatctcaattgttttcacaaccatcagtttgacttttgatcgtttaaggctcgagagaattatcattcactgtagtaaagatagtttataccaacaaacccatttggtgttgaccagctttcaacataagtatgagttagagctagaaccggattagtattaatgttacttgtacctgttcatagtactaaccaaaaatgatccaaaaaaatgaaaataacaaataaaccatttatggttatcacagatagataaaagaagtcaacaacgatgtcttgggacgatggatcacacgcaaaggtgaagaaagtgcagctaaccttcgatgagatcatctactcaatccaggtcacgtacgacggagccaccgctcttcaatcccagcttcgcggctccgttggtcccaaatctgctgaggtttgtggaaaaaaacacactaagatcacttatttttacagatataatgtgtaatttttttgttaagttaattaactttaatgtcatatacatacataatcagttcactttggctccggacgagtacataacggccctttctgcttacggcaaatcgttgagtacgcaagaagttattacggcgttgactttcacaaccaacaagacttcttatggaccttacggtaccaaatccggtttccagatttctgctccggaagccaccggtaaacagatctccggtttccttggtaccagcggcaatgttctcaacaccatcgacgttcactattctcccatacctactggaggaactggcaccggaggaactggcaccggaactggcaccggaactggcactggaactggcactggcaccggaactggcactggaactggcactggaactggcaccggaggaactggcactggaactggcaccggtactggaggaactggcactggaactggcaccggaggaactggcactggaaccggcactgggactggcactggaaccggcactgggactggcactggaaccggcaccggaggaactggcactggaaccggcaccggaggaactggcactggaaccggcactgggaccggcactgggaccggcaccggaggaactggcactggaaccggaactggtaccggttcaggtgctcagaaattggaagcacaaggcaacagtacaggaggtacatcatgggacgatggatccgattacgatggcgtgaccaagatatacgcaagctacggtggggaaggtattcaatacgtcaagttcgactatgtgaaaggtggagtaacaaaacaaggagttctacacggtaaacaacaaagtagacaaaatccaagagaggtaagcttacgtacaactttctttcaaggtttctaactatattttatacaaagattatattactgacattgtgaaccctttttaattttttgggtagtttgtgattaaccatccggatgagtatcttgtttctgttgagggttggtatgaaaccgtcatgctaggaatccagttcaaaacgaacttgaacacttatgaggtcagcatctatcctttcgaacctagtactgatactaaatttactcttcaagttcaagacaagaagatcattggatttcacggtttcgcgggcaaccatgttaattccattggagcttacttcgttccaaaatcctccaccactcctgttccttcaacccctttgaagctgaccgcagaaggtggtgagacaggagctgtatgggacgatggttctcacgatgatgttaagaaagtttatgtaggacaaggccaagatggtgttgcagctgtcaagtttgaatacaaaaatggttctcaggttgtttttggagatgaacgtggaacgagaacattgctaggattcgaagaggtatgcacgcttaagaccaactatttttattggtttcccttttcaactaatttcactattcattatgcatttatctatgtagttcgagcttgaatcagacgaatatataacatccgtggaaggatactacgaaaaaaactttggagttgatactgtagtgacaacgctgattttcaagactagcaagaacaaaacagctggaccgtttgggattgtatctggcacaaagtttgaattcaagaaggaaggttacaagatcactgggttccacggacgagctggtgagtatgttaatgctattggagcttatttagctccatcaggcaccacccctttgactcctgcaacacaatcccaaaagctagaaggagctggtagtgaggcaggaactttatgggatgatggtgctttcgacggtgtaaggaaagtgtctgtaggacaagcccaagatggtattggagcggtctcgtttgtgtacgacaaagcaggtcaggttgtagaaggaaaagaacatggaaaacccacattgcttggatttgaagaggtatactttattagttcttgctttctctttcgtcgtttaaccgtatagtttattatcctcaattttgttcttttttgtgcttcttgaattgcagtttgagcttgactatccaagtgaatacatcacggcagttgatggcacctacgatgcaatctttgggaatgaaccaatcgtaaatatgcttaggttcacgactaataagcgagtatctattccttttggaataggagctggcacagccttcgaattcaagaaggacggtcaaaagatagttggtttccatggaagagctggtgatctacttcacaaatttggagtccatgtcgcgccaataaccaaataattatggagattttaagtatcttttgatgatagtttacacactttgaataagctgattctactttatttctctctgtttgtttactgcttcagtgttttaagtcttctctttgtgtttgttgctgttgtgtctttgatggatttttgtgatccgatttaataaaagaagtgtgttcaaagtaattctctagtctctttatttgaaattccggggatagcagattggtttccgcaacattgactccaagtttataatgatcttgatgatggtctaaaagttttgaataagctgactctaatttactaggttctgtttgtttatataccttcagagagtttcaagtcttctcgttgtggtcttgttctgttttcttgatgtgatttcttattcattttaacaaaagaagtttgtgcaaagtcacaatgcagaaacccactttatttagattttagataagcaaagcacacagatgcattatccttaagaaaaacaaaatacaacactagaccacaacttcataaactcacaacataaccttattcaaatttcagggatatccagattggtttcacatcatttggctatgggcgcaacattgactccaagtttgtaaagatattcaccagcttgtccatagaaaccaacgattttgtggtctttcttctccagtacgaattcagttcctccctcgagtccatacgggatagatgttctcttgtttgttttaaacttaagcgagacgattgccggggcatctacactaaaaatcttgtcatagtagcccgacacggcagtgacatactcatctggtccaagcacaaactgcacgttttgcaacaaaattaaagactttaggtttctagatcaataactatagaaaacaagatttgaaaatgaaatcaagattacaacctcctctgctccaagcaatgtcttcttcccatgatcacttccaaggacaggctttgaagccttttcatagtcagctttgaaataggtcacacaagagtcaccttgtccaacatatatcttcttgacactgtcgtgaacaccatcatcccaagcaactccaccatctccaccttgtgctggaatagtattggaagaaggagtcaatggtgtggacgaaggaataatataagctcctagagaatggatcagatcacttgaagttccatggaatccaacgattttgccgcctcctagctcagcttcttctccagaggttagtccaaacggctgagaagtttttcctttgaatgtcttgaatataagagctgtgacgatctctatcggtgacccgaaaagtttctcgtagtaaactttcacataggtgatgtagtcttcaggatcaatctcaaactgcaaaaacaaaaacacatcaatactagaaagaaagaaaaaaaaaacttttgggcaatttcaagaaatacaaagatttgtgtacctcctctgttccaagtagtgtttgcttcccatgttcaagtgatacaatcttaccatctttctcgtaatcaaacttgacataaacaacaccagagtcaccttgtccaacataaactttctttacattgtcataagcaccaccgtcgtcccaaacatctccaccacgaccaccttgagcttccaatttggtcagaccacctgataccggcggagtcagcggtgtagtcgacggaattatataaactccaacagaatggatcaaatcacttgaacttccatgaaatccaacgattttgccacctcctagctcagcttcttctccagaggttagtccaaaaggctgagaagttttccccttgaatgtcttaaagattagagccgttacgatctctatcggtgatccaaagagcttctcgtagtaaattttcactgatgttatgtaatcttctggatcaaccacaaactagcaaaaaaaaaaaaagacaaccaaaaatgatcagttaatgttgatgacaagagaactctcattgaaaacaaaatatttacctcctctgttccaagtagtgtctgcttcccatgttcgtgtgatacgatttttccatctttctcgtaatcaaacttgacgtaaacaacaccagaatcaccttgaccaacatacactttcttgacgttttcgtaagcaccaccatcgtcccattcttctcctccacgaccaccttgagcttccaactttttcgccatcttttcttcttaacctaaagttatagtacccatttcttagaaactgtaaacgcacaagagccatgaacagacactactcaagcactttcatgatgatgaaactaatctaatctgaggactataatacttccactaggacattactttaaacaatggtatcatattctcatagattcattatcatataaagaaattcaataattcaaataaaactagtaaaaatcaatataacgattttgtgaaagaaagaaaaaaggagtacattaaagggaaggaagaaacacctttgagtgtgagaaatggagatgaagatggaatatgaatgagttaatcttgggattttgtatatatactatatagtatatataaaacatttttgaatacgaacattaaattctcttttcatccaatactaaccactttttttttctgccaatactaaccactttttcttttctttttgagagactttatattcaaccaactcgtgcttcacgagggatggaagctttgattagttaggacttaggaacttgtattaatctaaatatctttttttttttaaaattgaatctaccttacaacataaaatttgtaaagagaattccaaaattccaaaaaaaatcacctaaaattttaaaatcgtgaaagcagcatcgtaaagatgttctcttctgttttttttttttttttttaactctcttttgaatattggattagagattttcacagtgtcgtagattcttcgtagagtctgttatgagttgacatttaccataggaattgcattatcgtgagaaggttaaatgataaattgacatttataaattctcaaaatgtaggttatgagttgtcaaagaaatgtaggctatgaaaaaaaaaacttacgtctaaaaaaatgcaaagttaagaaagaaatactcaaagttcgtggcatttgaccatctctcagctacacctcaaattatagctcatgagaatggcccatgaatatgattgtggctccgttaatcacgtggtattaaaactcacacacgaccatttctcatctgcctccaattatagcgaaaccgttacaactcgttgttcacgtgagcatcaaaatgtgcattactcctttcaagttcggcaaatcctaattatccattttaatggactgcagagactttaattagagcttatagaactttaaacattttggtttaaatcttaaaatagaaatttaaccaatctcaaatgatttttttttcttttcttttggcataagtttcataactcgatgatgaatgctacgataatatagacatacagtatgatgattagatgaaaacagataaagaagaaaaagtgtatcgtacgccccactcggtgataatgattaatgagactatatatgagagtacccaaatatgattttttccactcatgaatcgtattgcactatttctgcattattaagatagacccacatttaacattagaccaaaaaaaaaaaaagatagacccacaccacctgttatagtatttagtatttttacacatccactaaacgacgacaattgacaaaatcacacaaacctttctcctttattcatttttgtttaattcgggtcccttgctttttagcattcggctctcattcttatcttcccatggatggatagtcatagttatataatacagttcaattgaagttatgcagtatatatatgcaccacacacgagtcttctatatatgtggatactacgtttcaaaataattctattaacttagagaagataaactttcttagtacttttttcgtttcactttacacacacctcaaaaaaattcttgtttcatttgtgactgcatgtaaatgtcgttaccttacttgaatttttacacaatggtacgtgaaaaagaaaagaaaaaaaatataattgagagaaaatataataggatcacaccactacaatacatgggctttaaattcatcttttctatatgttataatttgggccaagactattatatcatatgggcctatcaatgtaattagaagcaattgcccgatccaataaccttaattaggaaaaaaaatcgttcccttctctcgtttcttttcagctctgactcggcctctatctctctcccgtcgtcagccacattcaccggtactcatctgaccaagctagggtttcgcagtcatcatcatgtaccgtacggcagcttctcgagccaaggcccttaaggtcaatgtcctacttcacttgtttccattgagattctggtttttttaggagaatgcttagtattgaacaatttgtatgattcattgtttttggatttggattaaagggtctcttagattcttatagatcttgattcaattttatcgctttatagtagctggtgccattattcatgctttttgcaggtttatgaaatgtctctgtttcgaaagttcttatttttacaatgttaattgaatcaagagattaatgatgcttaggatgtgtgtgtgtgtgtgtgtgtttatagggcattctaaaccacaattttcgagcttctcgttatgcaagttctagtgctgttgcaacgagctcttcttcctccagctggctaagtggaggctactctagttcacttccttctatgaacattcccttggctggtgtctctcttccaccaccactctctgaccatgttgagcctagcaaacttaagaccactactcttccaaatggtctgactatagccactgagatgtctccggtgagagcttcttttagtaatcccaacatcaacttcctgttaaaaactactggaaagtgattttgagtgaaattttgttcagaatccagcagcttccattggtttatacgttgactgtggttctatttatgagactcctcaattccgtggagcgacgcacttgcttgaaaggatggcattcaagagtacattgaacagaagccattttcgccttgtaagggaaatagaggctattggaggtaatacttcagcttctgcatcccgagagcagatgggttacacaattgatgctctcaaaacctatgttcccgaaatggttgaagtgcttattgatagtgtgaggaaccctgcttttttggattgggaagtgaatgaagaggtacttcatgtcatgttgcatgtatctcacaaacattaaagctaagcaatttttttacactgttttcatcatttttctcctggcagctccgaaaggtgaaagtagagataggagaattcgcaacgaatccaatgggttttcttttggaggcagttcattctgctggttactctggcgcattggcaaatccattgtatgcacctgaatctgcaattactggattgactggggaggtcttggagaattttgtttttgtaagaccgttaacacaagagattattgcattcgctggaactagtatcactggcttttggtttgttatttcgtagatgtgtcttttttctcattttgttctgaaatttcaggagaattacactgcttcacgaatggtcctagcagctagtggagttgatcatgaagaacttctaaaagtggttgagccattactatctgacctccctaatgtaccccgacctgcggagccaaagtctcaatatgtcggtggagatttccgtcaacatacgggtggagaggtacaaatatgacgtttcaatgggcttctttgagtaaaagaaggtttattattcctaatatctttctttttttgtttcaccattctcaggctacacattttgcgcttgcttttgaagtgccaggatggaataacgagaaggaagctatcattgcaactgttcttcaggtgcctgactcaaatacattacttgatctttcaaacgcaaagacttaattgtgtaaaatccaattcttatcagatgcttatgggaggaggtggctcattttctgcgggaggccctggaaaaggaatgcactcttggctctgtaagtctctgaatgtgttctctttctacttgcggtttttcaacactcatgttttaatgtaagttagttatttgttggtcatgatgatgatgagattggtttctttattgtctggatgcagatcttcgccttttgaaccaacatcagcagtttcaatcatgcactgcattcactagcgtctttaacaataccggattgtttggaatctatggttgcacggtgagtttgcaccgatttctagttgttgcttattaacggtttttagcactttgcaatgtgggtttgcttacattcttttggcgttgcagagtcctgaatttgcttcacagggaattgaattagtagctagtgaaatgaacgctgttgctgatggaaaaggttttctatatatttcatccattcttttttagaaccatttatcaactcatacagacatattatttactctggtgtacatgctttggcagttaatcagaaacatcttgatcgcgccaaagcagcaacaaaatctgcgattctgatgaatctggaatctcgggtaggtcacttaaaagttccacctctttttcttaagccatgagggtgactttataatggaatttaactgtttgtgtgatttgcagatgattgcagcagaagacattggtagacagattcttacttacggagagaggtacatacactttgtaacattccacttctaaactgattataaccagacttttctctaactgtttttttttttgttttcccaacatatctgcaggaaaccagtagaccaattcttgaagacagtagaccaacttaccttaaaggacattgcagatttcactagcaaggttatcacaaagcctttgacaatggcaactttcggagacggtaatgacaaaaccatcatcacagttttacatcttttataaaacggcattgcaaacttaaatccattttacttattctaaaatcttgtgttgattttgggacagtgttgaatgttccaagctatgactccgtaagcaaaagatttcgctgaagagtgaagaagtaaaaaagatctttttacatcataagatagagttgggacctgtagaataaagatagccttttttttggagatccaaccaaattttttgtttcatctatctctcaagtttctgacctaagataagtccatgaaaatggtgacaaattacgcccatgtctccaatttcgttgttgcgtatttcttctcttcggttagtgaataatgattgatacgtttaccaacttttttcagcttcaatttttaaatttctttcttgttaaagaatgctggcaaacataggcattaaagatagatagaagtctactactacataaaatattttccaaattattaattttatgaactcttaaatgctttaatattttgttaataaaaggattattgaataaatggatctaaataatagaaacgactccatcagacaaataattgccttaaaagtatcttaaactctcaaccagatataagatagatccacaataaattactactagaattagatcaatttaccatagttatttcgaaatgtgaaagcataatttacatacacactcctaaagtctaaaatgaaggtgttattttttttttgacagcctatgatgaaggtgtttaatcacagaaaaccttaattaaaaaggctattagggaatctttttggcggattacgaggtaaattagagcttatcaaaagcagttgatgtgtattttaattatttctactttcagaagaacgaatatgatgacgtaaacacgtatcggcatgaaccaatcatattccctggtggtttttaaaaatgattagatatagaaacattacaaaaagattttgaaaaatcacgataatgataacgtcatgtcgtacttgtctgacgctacatggattccaaatttattgcaaatttcaacctcatttcgtcatcatagttacttattaataatatcttccctcgattactcgcatctttgaatttcaaattcttcataaccaatatctaaattcaagtaatctcttactattgaagaacattataattttgaaatatggataagtttcttacttctcttatgcgtaatcgacaaaaagcattccacatgaagaggaaaagaagcaaatttcacattttttccaaagcaaagcaataatttacaaaaaaaaaaaaaaaaggaaagtcataaatgaaaagtcaaaggctatgacgatattttctttaaggacgaaaataacgttttttactaattatagaatctaaaatcagtctcgttctgacgaaactgatgatcatacgaacaaggagagcgtttctgttgctgcgtttgcgtttgcggttgtggttgtggttgcaccatcctcacaccactaacgctacttctagccgccataatctcatcaagtgacaatctttttctatcaggacgttgtctcggtgcactatgcgaacgtaccttggctttaaacgactgcgtattagccatatagctaggtgtcatcaaaccaggataacttggcctaaaacaagcgtctctgcaaacacttttcgccggcgatgggggcgtgtagtaatagttattattagccattgatgaagagaatctcggcgtgttttgagccgtaggaaacttgcatttctctcccggaaaactccattcgaaatctttggcttgatagatgaaatcatctccacattcggatacagccacattcattctctttgatcttgatttcgtcttgtaagtatcaatctccacaatcttgggactggtctcatcgtacgcattgttgttgtgattactctgtttctctacagagattgatattctcttgctatggatttcacttcttgaatcatccaacctctcctataatcaaatcaatccatcaaaacataagttttgactatagagattatgttagaaataagacaaaagaaaaagaatggttattacaagtgagtgtcgaggatgaaacatgttgttgcggttgatgcgttgcgatcggacgctggtttgagctctaatgagagcttgcatgctatgcagcgtttcggcggcgcgtttgcggactaagtatcctcttaccaaagcttgtagcttcactaaacctttcaaagctcgtaacgcttttctcgcctataacaaaaaaaaaaaaaatacttagaccaaataaccacattttagtgtttaatcagaaaagaatctaactttcttgaaattagcaaagatgtgttgtactgtttcattaacgaagatgtgtaaggagcaagtaaagtacagacatactttcttttagttttgtcgaatctaaacgatacccacatggcaaaattcaatctttttgcgtcgaaatcgattacacaccaaaaaaaaaaaaaagtgttttggaggtttttaagaaatttaccaaatagcccttgaagactgattgaattttcactgcggcccaccgctccattgcgttcccggaatatcctccgcttcttccgttacttgttaacctgaccaccgccacagcagcttgagccgctgcaaccgctgcgtcagcagccgcggctgtagcagcagcaaccgcaatcgcgtgtttgttctgttctttgtctgtttccgcaaggtaagttctgagccagacggagtcagcttggagaactttccggtgaatgttagaaccaccggcttcacctccaacgtcgccggaaacacagttctctttctctttgctcttcttcataccaaaaatacccttgaaccatctcgcagctcttcccatcttctctttcaattcaaattataaagaacggtcaaaaaaagttttaaagagagaaacgtttcggagatgacaaatcacaaatacccaaaagaacttttcgtatgcagaaaatgaagaggaaaacaaaatttacggcactgaaactgaagacacaatgtgatgttttgagaaaggagaactgtaaaaaaaaagagagataagaagttcaagaaaagagagagagaatgtgatggataggttcttcaaaaataaatataagtatcaccatttatatataaagtattatttgaatttaaacttgagcaaaggacaaataggttgattataaaaactagttatgtacatttgttatggagtatttttgttttaaatgcaccgttaggtaaagaggggctaaaaacttttgattatacgatatagcttcaagtataaggtaacgtattttataattcaaaaactaatgaacaatattaaaaaacttaagcgtcagatttaagatatcttactattttcagcaaataaaattttatatgttgctcaagaaatattaacttttgaacaaaaagaagaatagtttatatttctagttttgtcattgtaagacaaacagttacttcatttgaaaataccttgaatttaatttcaatgaactgacaacagttgtaatcatactttttgaacacgaaaagtaggaatcattactcagaaaaatttgaaaacgaattattaaacgaaaaatgatacggatttacagaatatttttacacagagtctagattttagggctgtgaataattattgttttgaaaaggataggaagaaagaaataagaaaaatattaaaccaaaaaagatctgacacaacctcgtgaagaactgaattacaagacaaaatgatgtcatggagagacaaaagatggagcgctctaatttttctattaatcgaatttcttatttctttcgataacataatacttgtataatttaaaaatatgccaaaagagaaaaaaaaaatagaaaatcaagcagaaaagaacacggatctgcagacaaacaatgaagacgaatatattaactattttctacaaattaaacctaaaaataaacgcaccttcaaagattcaaaagtggtgtgtctctctgcctttagcaatttgttattgagtaattaaaaatatgtctttatggagcattgtgttcttactcggttttagagatacccttctcgtaattcccgttattaataaatttaattatcccatttcccttcctcaacccataatcccatttattttaaaatatatagtataaatttaaatgctaaccaaaatagaaattttttcttaaggtaagaagatctaatgaattttgaaacaatcacaaattaatccgtttttatttagtatgaagcgtgcattacgctaatgacattgattatcttgacttattagctgtttctaaaatatagtctggtttcaaatggattgatatatcatataaatgcaaaaccaaactatatatttttacggtcgtggttgacgaaacgttgactaagttgttcccatcattatagctaaggtttatgctcatgtcggagtgtggcttggtgaggaacaaatgtgaaactggaaactataacaaaaagttgaaactttatgtcttaatgatgagtttctgttaccaatcaaagaaggtagtagcattgggttttgtctacctcgagaaatgaagttaactttgtgaaacaatgtaccttttaacgtttttctttgtacttttttgggtgtgatttatatggttttgggaagtcatactaattttagattctatagtcgttatggaaatttcacggttgcaaaatatatatacatacatccggtaaaaattgaccaataacttcgatcatcgtgacaaacaaaaatatttaccgcagcaagcaaaatgtattttaccttttacattgtcaggaaaattctactatggaatacctagatttgtgacaagactatatttttggttctaacagagtagatgatactaacgatgagacgtaaattagtgatgataatccttttttggttagcaagagtctttggatgataaatctcttaacccaaaatttattataattattgaaaatttaaaatgcatttggcatgcgaacaaaaagcttttgggatcttattttggggacaatgagttgttctcgtacagatgacagatccaatcgctgaatataaaattaggaatggacatttagttttattttattttattgggtttgggtcagtatggttgattttgttttagtacaaatgaagctcacatctaaccgaagttatagatcggtttggtttgattttattttggtttgcgttggagttagttcccatagatttaaatctgcaaatgtatgttcttgtgttctttttcaaacaattgtctgcatggtctttaagccacataaataaaaatgtctacaacatgtttcaacccactttgaaaggtactatcattgtaaggtttaaaattgagaagacaaaattttgtttcaagcattataaacgctctttgtttcaaagagaggatgacgaattattcacatttcatttgatagtgatcaacgaataaagataagcagtggtaatgctaaagatttcttcagagagaaatagaaatgtatcttacagcatctatactatatagaaatatcgacgtaattttataaaatcattcagccgggatgcaacataaagatcaaacaagccatatgacttatggaacgaacagactaattaagatatatttggaagatttgttgtcatctaacgcaatttctagctcatcatttaatttgacaaacctatacatattttaaaaccattctacacgtttaaaccaatattgagttgtcccgccacggcccaacaatttcaaaatgggagatgagtttgttcaatgggacgcacggacttacgttgcaaagactttaaaatttgattacattaggcaaattatcttactgcgtttaccattagttaatcatatatacgtgaagattcttgatttcctactactgtttgtaattttgcatggagtatgttcaggtctcttttaaatgttttaatcactgtaaataagtgtttaagtaagtttctagctggtttatatccaactcatttaccaaaaacaaaatatcaaactcaattcatttgatcatgtctcacacatatttgtctatactataagaagtttaattatgatgtctgtttttttttcttttcgatagcttcaaatgaaaacacacattcgacaccgaacatgatcatgaacatgatagctcgattcatcaattcaacagacgtgataaaacaacgtaactttataaaatgggtaaaagaccttgtctaaaactgcataaaaatttgagattaattcaatgatcattatgaatattacaaattcatatatatatatatatatagagagagagagagaaagaatttaaacatttaagaacataatcgaagtgagcttcaagctttccatatactgtatatgctattacatgaattacaagaagaacttattcaaatcgtaatcctaatcagtgttaaattaactgaaaacttatttatatatttgtaaaaatttaccttgcctttcttttatttccttttttctttttgcctgacttcaccctgtgtgccataagaccccttctatgaaattggcactctttaaagttatcttcgtcaggccatctctgaagaacctctgcttcttatggcttttcctcttccttaccaaaactaatagactcactttgtctcttgcttcgttctcaagaagtagatacaccaataagaagacataagttttgtctctttttcaaagatttctctgttgttcgcttaaatttacgatacaacccttcacaaaccatatctacttaaaatgaaaggagcatatagaaacatatgaataaaagtttaaccgatgaaacgaacaagtcattaagcgtttatatgtcaaagggatgtttctagaagcactcgatagcttagggacactttactcatagaaacatttattcatataactcaatgattatacatttacattatgagcacacaagtaatacgataggcccatcacaactaaaaaatgctaaattctttctttcgttctatcttctccttatgatattttcagtttaattcagatgtttatacctacgtacgcattaggctggttagggaagtatttgattttgtatgtattcaatttcttttatattagatctgttttgaattcatctgatttgttccctttggctcgtgagtgtcgagaagaacactcatcattgtcttattgctggtacgtttcacacattttaataaaagatctttcaaatagttagatcatgacctactgtataaacttactttgttgaaagactgatctccgtatctgtgttcttttgttttggatttttcctgttgtattatctatttattttccttagatataacaaaaatatatcactctcttcatacaattatatagatttatccatttttattaaaattctacgttttaaaattttgatcgttttatcattcaaagaaatcggcgtttttgtcaagttgtctctacaatttaacttgaattattttggagcgtgaatttgtttgacacacgatttaaaaactttctaagggatcatcatataggagagctaagtgggatagacatgtagaaggattcaaccctcaaattcattattctttagaaacaaaaatatatacatattttaccaaaaaaaaattaaaaaaaatatatatacatattcaacagttatgggcgcctccacttgatgaattctttatattggagaatcttgtctctagtcaaaacccataatcatctatttcattttatataaactagtacatacaaattttagttgagcaagatttcaaaacacgcatggaaaagattataaatgtgtaaggatcaccgacgaaatttataaacctatccaccttactccactgtccacaacaaaaaattgtactatttaccataaaactccactacaagaaccaacctcattatcactatatatattcaaagttgtacgtaaggtagacatgactctagtgtaagagatgaatatattgaagaaacctttcactgtttttcttaatgtgggccaaatattcctactgttttacaagataaagtcgttagtgttctctacgtttaaagagtatgtcggagaaatattttccattttatacagcgctcttaggtgttacaaataggagatacattagtatgtagggttatatataataagatattattttttaaaggtggtaccaaattatcaagtggttcaattcttaccttatagcatttaaatgttgactaaaataattattgacaagtactattcgttgcatatatgttcaattcatttaaaatcaaaattttcaaagatttggttataaactttaatatatgtgtgactgtttggagtgtgtcgaccgacccagcatggacccaaattcttgatgtaaggcccatttaagagtaaaatggcacacagtccgaataaagatacccgaaacgttacgcagtgtatttgctgatattcactaataacacaatggacaattaataactgatgaaactaaactagaaggtttacgtcgacatttttaagtttttttatttgtttatcagcaaaaaaaacaggtattcaaagttcaattctttgttgcagtggtggagataaccatcacaatcatgtatattaaatgatgggttcctttatctaaagaacgagttataagtctcacatttgctatgagttaggcatgtctcaacgaaaatgactattctgaaaaaaaattcaatgtttctatcgtatttatttttcatgtcccattcagtattttcccccagaccccaaccacaaattctaacccatacactcactactgctttataagaagacaccacgaattgtcaattgctcatgttgttgcgctatattattttttgcatatgcttaataaggtaaaagttagtatgtaaatatatctttaggttccaaacaatgaaaatataataagtggtgcgcagggccggttcaaactttttgaagaccttttgctgatttataaaaactgactttagttaatattggtttttaatttctgtaatttttggaccctaaaaccttaaagaaaattgaaaaaaaaattgaggaccctgtgcttttgctcctctagcactcccctagagccggcactggtgcgacattttgcaacaaatgaaacaacggaattttccaactcattatgttgcggctatcgctttacatatgtttcgaaaatgtttcttttttggtttggttaaaagttaaaacatataccattatttagctaccaaaaaatgttattatcaaactatttggctgcatcaatttcaatggttatattgtttaaccacaacactcatctggtaatgagaaggacaacttcgaataaaatttttaagatgaatacaagtcggccaagtgatgcttgtggtatgaatatatttatcacgaaaacaatgtgctaaattaaacatatctatagtgatgttttagtcgatccaccaagacactgtccaataagttacaatgtgtatgtatgatttaaaaagtcaggataaaaagctgctaaattctgcacctagaagaacaaaagagatgatatagccaccaaaattatcacgacatggactgatctcattctgaaaagtcttttttgagttttcaacttccaatcttatcttcttatatacatgcatactcaggttaaatagtaaaaacaagaagaaaaaaaaagacaacaacaaaaacaacaataatggcctttcattctcagctttttacatgattaaaggtatagccaaagttggaaggaacaaaagttaaaagagcttttacagagaataaaaatttcatcttcttttttcaaaaagagttttgcagacatgcatgagataattattacagtatgttctaattatctccttaattaattaaaatgcttataaacacagattgcttatgtaatctcatcgtctagtgtcttgaagacatgggaatatcagatcagatcaaatgtttctctggaccaaaaaaaaagtaaaaaaccaatgattaactcttatatataacaaaaaccagatgtacatttataaagctttgagactctctgtctgaaataaaagtttctaaaaagactcttcagtgcatcatcttctcttgcttactgcatccaactgcaaatatacagaggaacccttttaatcatatagctctaataaatcatctaaacatataagaacagaagcttacatgtcaaggcagatgaaatctcagagcttttaatcacacgcagtctcttcacagatgaaacaaacattctgtgtttaaaaacaaagattaaagatcagttagtatgcaaaaaaagaggtataaacaaatctccaagcaaaattctattctttaggtaaagaattatcaatttgaattactactactattgattaaaagctgagaacttttgttgttatatgatcaagaatctaattctgcaaaacactgaatcagattcagagaacaaaaggggaaaagattcttactgccatggaacatccccaacaagcatcttgtccccttcattgtcttcataggttaaagtaaattctcctttcccatctaataatccaatgataggtttctcttctccttgaccatcagagatatctctttgagctataaaccaacaacatacacaaatcatactcagtaaacacaagtaacactcctaaagaactaaaaaacagaatttgagattaagatttaacctgcgagtagacctctgaagagtttgtcaacgacaaaagagagctgttcgtagctgttgtaagcattgagatcaactttacgaccaataggaacaccatccatgttgatcttgacaaacattccttccttcttggtttcaacttgtttttcaccatcatcactcttgttgatttgacctccatgagaggattcgttacctagctttgaagagcttgtgctcgctagattctttctgaacgaacgaaccggaggccaacccaccactggaccaggagcagttctttgaaccagatatcaaaagaaacaagagacatatgtcaataccaaacgacaaaaacagagcaaaacagagtaaatgttgaaacttttaacatgtgaaggtaaaaaaaaaaacacagattgcagaagatgggtccctaatgttcaagagaatatcctctgtcaaagcagtaagaaaaaataacagtgaaggaaaaaaaaggagattataccttttctgtgagatgtgaggaacagaagtggttttgttggaaggagagaagtgattgccattaaaacagtggaaagatttgtcttctgtttccttcttgatgtttcttatctctgtgttcttcttcttgattgctgaatgatcttcttcatcaccaccgggtggtccaagccttagctcaagtttcttctcctgatctgtgttgttcttgtcttcttggtaccatttccttccttgtggaatcaaatcaagaagttttggaccgatttctctgtttcttggacaaccttccattgatcaacccaagattccttctatacgttaactatgtatgaaattgaaatctatagcttcactaaaccctaagaaccccttttaaagaaacaatcccacaaaactgagagcgagagagagaaagagagatgtgtaatgaaggtatggtaagagagcagtggtgggattttatacaaaatcaaagctttttttttctctctctcgtgcacgctttggtgggttctctctcacacagccttacctttttttctttctcaatttgttgttctctctctctaaagattctgaaagggacgagaagagaaaaaataggaatacaaagaaaaggaaatttggatttgtatgaacaaaaaaaaactcagaaaaaggtaaagcaaagtagagtgactccacttttactcctaaaccccaaaagtagaaatgaaaactacaataaatttacagattgcataccaagaaaaacagtaattgttcttgacatgaaaagagaatactgtgaaaaaaaagaagtgggttttaacgtttttggttttaggagttcttttgtggagtaaaacacacgcaaccttgtctttttttctgcctcaaatatcgctaattaagggtttgtctagtaaaagaagcaaagcgtgctgttctgtttctcacaagtatacgaattagaaaaataattaaatgcgtaattccaataaacaacttgaccattaaaaaaatactaataagagtaattaaaatatgataacaataaaggaactaagggaagatcccataatttatggtctgtttttaggaccactctcttatccactgtccataagacacatatccctatgcttttctaaaaacatttttctataggtcgtcatggtaatttgatactttaatagtaatactaccattctacaaagatatacataaagcaaataataaatgaacatcatgggaagatcaattgagagaattcaagaaatgggtgaggcattgtataaacatacgaatctgcatggcgtctcagtgagatatatgtaattatttatttataaatttgccacacaatatgtcaatttgttaggtagctaaacaattattttgtcaaaagttaaaaacaatgtgtacgtgtggattacgatggtataatttaatttgcttccccaaccaagtaaatagtcaactgtttgtttgtttttcctaatcaaaaattttcttttctcaaatctacaaaatcaacatattttgataaaaataacaaaagaaaagactttagcagaaacaattgtagttggtcctttgatcttaaaaaatgtacataattttgcagcgtaaatcaagaacatatttcaagtttttcaaccaaagattgaagctattttatttggtttttcaggagggggaaaagaatgtacatgtctctcccacgtacgtgtgacaccgatattacgataaagccgacgtagaaaaatctcgagtgagagttccggtcaagtaaggaagggtaatttaggaaattgaagaaggagtgtgtctctagtcatatcttgtcgccgttttacccaactccgtgactttcttccctcactgtcagacaaaaccttaaccatggttaacataacctgaacctctccggtttaacttaaccgcactaactagatccgcacagacaaactagacagtggacacatgttgaagttgcacaagattttgagatcgtacgataaggtttaaatttgggctttaatcaaagccgtagaagtgaatagagatatagcaaatgtgacggctgtgattaaaagagtacaaagcaaagcatccgattaaaaaagtagccgactcaggagaaaaggaacaaaaaaacaactcgtgaattgaatgtcatatcaagggaaataaagaaaagcaagtgagaatagtggtggtgtcaatgatgctcttcctagaattttcaccaagaaataaaattatttttatccactcactaatttttttagtgaactaaaaaaggagtatatgtaagaaattgatatcattttaacaaaataaaaagaggaataaaagaaaaaataatccaaatatggataaggtctgaactgatcctctagtataactggcccatgaaaatcacgctgaaaatgagcccaattgttgatcatcaatgttcatgaacttcatgcctttatggaaaaatgggttgactattgagttttgactactaatactagtagttttgtgaatttatcacatatataatgcaagtttcttagagttgaatgaaaaaaaatcatgccttgcatatttgattgtactcctttcttcaaaattttgttcatgtttttgggtgcttgtatttgcatatttagagtagactatagaaaactaatttttttttttttttttctcatctcttcttatcagacttgtattccagaaggcttcacctcttacgcaagtggagtttttacatatcaaagtaaaataattaaaaattcatggatggtttaaaatatacaatctcacaaattatgagttgtctatttataataacctataacaatgtatatgattatttgttttttaacagctgaatttcattgatttaacaagtatgattatttgttgtttaagcaagagcaaaactattattcaacaaattataattgtttctatgggaaaatcttatttttatacataacagggataaaataaaaccgataaataacatatacaatagattttgtaaacattgatattaatttactcagtgattattattatctaatatgattattaagtggtaaacaaaattgtagatattattttgttaattatcgacaacacgacaaacaattagaaagaaaaaaaaagcaggaaaaaaggagtttcttaattttcacaagttattaaaaaggttaaaaatcaaaaccaatgtcggatactatatcactgattaagagcccacccaatgctcctcccagaagcccagctcccactccaagcccaagcccaagccctggtttattattattattcttcggcggcacttgtgtagtcggacaaccgtatccatatcccggtgacgtcggcggcggataaccatacccgtgctgattctgcggagacgaaggcgcgaacccgtgaaacgactgtgacggttgcgtttggtggaacgaatggccgggaggcggcggataggattgatgctgcggcggagaagtactgtaatacggcggaggatataaattcgatgcagagggtggcggaggtggataaacagcgactggctgttccgggtaatgagaatggtactgatacgggttcgggtacgggtacggcggtgaggaataatgttgcggcggagacgacggaggatatccaatcgatgataatggtggatagaaatttgcttcagacgattgcggcggaggataatttgtcgtcgccgacgagaaatcagacggtatatccatcggattcgtgtaaacgtgtgatgatgataccggtggatcctggtggaaaacgtgtgatgaaaccggttgatccggtttaaatgtcggtgaatcgaaccggtacgaaaaagtcaacgagccttgaccttttccaaacggagttctgacctgatacgtaacaaatctcatcatcccctgaccgtcaccgttagatgacggcgacgaagaaccatgaagaagctcaagaaccgggacttggacctctccgagatctttgtcgccgaagatccgatcgcagaccaatttcacgacgagggttaaacgaccttcgtgtgctaacctttgatcaacggaaaatttgacggtgtgattccaagtaggctcagattctccggtgcgatcgatgggggttttctccttatgattcttccgagaatcatcgccggtgatccaaacgacggcgtatacgtccatttttgtgatgaggttgacattttcaagatcttttgctgagtaaacgttgagctctaaggtaagattcgccatggctaaggcagagagggatcgaaagagaaggagatgattattgattccgtcaaaaatagattatataaaagaatctacgcgtaaaataatatttatgtaaccgaagcttctcttaaataatcggaaaattaacataaacagatgtgtatctagtggacagtagaagatttttccttttagctatatagaaaatcaatcttaggcgttgatttgcacagatctttgacacgtctttaatcaagttttgtcttccaatcagatttctttgcactgacgcggaaactttaatttgatacaagagttaaatttctagtatttttctaccattaattgatgcaatgacataatttcaaagatcattcattagagatatgggaatttataagtttagaaacattcctaccattaattaatactacaaggcttgatttttaagaacattttgggctccatgactgaggagtaacgtagtcaacacggcatgagatgaaccggtttctgccaaggctgattcggctgcgttctttggttttcttcctaaccggaccatccagcagtacctcgcggtctcgattcaccacctccgttgagctcacgaaacccatgtctgattcatccatcggaattgcaatcttgatttcattcaaaatcatcactctgttaaattagaatataaatccggttaaaaaaaatatgtacgtcaaacggagtcactaatctcacttatcacacaagtcagaagtcgcaaagcaacgaattccttgattcctaaggtacatctaaaaacctctcaaggaactaccaaatgggacttcaacaaactgatcttgttaatttgttatacatcaaccttgtcgtattcacgagtacgaaaacttcactcttccttactacgcatgcaaacttgatccatcctttcttgtaatgcacgaaagccaaaatttattgcaaaaattttcagtgtgatgtatcggcatggttcggtttgctgagttcaatgatgaacaaacgcacacaggacaacgacaaacgatataaattgttctttccatctgcggtctcagagacataactttgaactagtaaaacgaataacccccaaagacatgattctgagagactacaaagttattaattgatgcaagacttaatttcaaagatcactttgggctccacgactggagtaaagtagttaatgcggtatgagacgaaccagtttctgtcaaggctaattcggctgcgttcttcatagccatggttcgctccctaaccggacactccccaattatctcttggactcgtttctccacctctgtagagctcacgaaacccgtctctgattcattcatcgaaatcgcaatcttgatctcatccacaatcatcactctattaaacctctgctcagcgtacaacggccaagccaccatcggcacacctattatatagtaaaccaattcaattaaccacaatgaacattttaagcatatatataatcgaaaaatgtgtatatatatacattatttaccagcacaaacagcttcaagaattgaattccaaccgcaatgagtgacgaatcccccgactgctttatgattcagaaccggaacttgcggagcccatgatttcacgaccatccctttgtcttcggttcggcttaagaatccttctggtaagagtgatttcaaatccagttctgtcttttctaactcgggtggattacggaccacccacaagaatctctgcccacttttctctaaaccaacagcaatctctatcacctgttcttttgagaacaaacctaagcttccaaaacagagaaacacaacactcttttccggctgcgaatccagccaattgagacaagaaactgccttgttgtcgtttctatcttcgattcttccgtttacaatgagcggtccaattggataaatattgcgaaaacagagctcctctgttatggccttgatggctctgttttctaaagcatcaaacgtattgataataatccctgacgacttcgagagctgtttaccgaacattataaaaacatcgtagacctcatcgtctcgttcgagcaccgccttaggcatatcggagcccttcatcggaggaacgccggggatatgaactgtaggaatgtctttgaggttttttccgggggttgtttcgtcgatggtcgggagatagaaggaaaaggcgagacatgcggctccagaggtgtagaagaagtaaaccgggaacgtgaagtcagcggtgatgtctaaaacggcggtgcagaagaaatcgatgatcattgctcggacattgaaattccgagagagtgagaaaagagttcggtggacacttgggttgctaaaacagaggatctctaggaggagagattcgtggtggtggcgagaggtggaggaggaggagtacggtgtgacggcgggaagatggtggaaggttattgaagggaaggaggaggagacggaggagatgtaagtggcggttgattccggctgataaggcggtggaactaagataatgtggatggagagagatgggtttttggagaggatggttttacctaactcaaccatggacactaagtgacctattggtggtgcaggatacagaactatagcttcttcacccatggctcttcctaaggtttgtgagatttgttgcaagaattggaaagttaataatgatgatatggttaactgtcacacgtctctttgaatgttagatatgattttcattaactttttttggaggaaagtgacataaaatcagatggaccaatagatgatatgatccatggataatggttgcacctctcgacaaaataatgtcacaagtcaaaagttttagactttgtagtcacaaaacagcgagaatttcttttaccggggttaaataaatctaatatatttttgtttagatatatatacatttaaatcatttaaaatgtaaattataaatacatttaatgtttttttcatacaatatatctataaacgattataatatttttacggtgagaacatattagaaaattgtatcaacaatcttaagctgaatcattcggcaatatgcttaattcaaccacattgaaacatgttaagtattttaaatctcacataatgacgtcataaacatggttaggtatgtgtgtgctgaaagtatttggtgttgacttaacaatttttgtcaattcttaattcataggaaaaactcataaagtgtttgtaatggaagttaatacttcaaagagaacgtatctaagagaaatgaagcataaactaaatgaaaaagaaagtgtaattatgatattttgaaaggaaattatcttcagaaagcaaagagacataattgttgcaagggatggtcatcaaactcaagacttgatactatggaggtgatcaaatactaccaattatgccaaagacctattttgtacaatgatcaaccaaaaatttcatgatcatatcatttattggtccatgatatcagtggcatacatgggttcgccactgaaaaaactaacatatcttaacatttgttatgttcaacacaataaatactcataataaaaagtcttaaactttcttcgcaaaactagtgactgtctcactgaccgagagtctttatatacgattgaaagttcgttatgacgttccaagatcttacaatttttttttaaatatgattaaggttttacctatccaaactcaatttagaaaaatcaattttattgaattcgaataattgattccattatacagtgtgccttaattaatggaacatatttaattcatgtctcttgtatcattcaagtcattccacgtctatccctactatattatttggaaagtacattttaaatgtaatcttattttttgtaagtaattacataagtatgccattagaaataaaatttaaagagtaaattaattcatctctttaaaaattaaaaagtcaaatactaatttaattaattaaatttaattaaaaacgaaatacattattaatttccaaaaaagtaaccaattaaaatcaacaaattagatttgatatctaaattatcatattaattttttattaattattatagttcacctctcatctttatatgattctatttttgcaaaaaataatactatcgttataaaaaataattatatttttttcgcatatgacataacttgaatttttaaaaagaatataaactgttcaatacatgaaaaatattataacgggtcaaaaatagatttaagaaaattttctactgagtactgagtcataatttgaatatttatattcaatttcataatattattttaaaaatttataatcttatatattacaataattaataacatattatatatttttatatgtatgatgtgattcaatttttaatacaagctggaaaatcctagaattgacgggtttaaatcgatattaatacaagatggtatactacaagtgaaactctaaaattaacaatcaaaatacaagtgtataattttaaacactaaacaatataaataatatcaacaaaacatatacaactcgcagtttactatacatttaaaatcaaataaaataatatcatatatttataatcatctttacaataaaagtttttagtttaactaaaatataagcctacctgcggtatactgcaagttaaaattataaataagcagattaccatcacgatgtatgtaccttctcacatacacacctatcaaaaacttaaaacctttcaaaacctcttggtatattcaaattaggattcttcattcatggaatcattattccaagggttttgggatgtcttatgaaatgattttggcagaagaggatgtaaatttttttgaataaaaagtagtcagcaaaacatatgttttttttgggagtttttagataattaaatcagagaataagattgggcatatgagtaactcattcgaattcgggtagaactcgttcgggtttgggattaatgggtatatgatttactacctaatagaataattctaaatattcggttctggttcgggtcggatccagttgggtttgggtcagtttgcacaaaacgtttcagaccctaaaaataccaaaaaaaatagaaacgagaaatttgtatgtagatagcgggtctccaaacaaaaaaaaaacttttaaatttgttaagttttaataaatttaattatatttgaatatattttactaaatttttacaaacataacaaataatttttgaatagtttagttgttttaaatatttaggtccaaaattaattgatatatttagatttataattataatcttagataattagataatattacgattaaatataattaatattttagatattaaattaatgtttggatttttgaatactctttttgggtaacgggtaatttacggaccaatcagatatccacgggtttactaaaactctacccaataaggaaatttcctaaaattttaacccgccttaacccggttttttggttcgggtattaggttggttatcgggtccgttctttcgttagccctattaaagataatctaatataggccccaattaggttcacatatataaccaaaatactatacaaagactaattctaagttatgccaaaaattatatcctttaatacaaagaaaacatgtttcttaccaaaacaacttgtatacaaattttacacatttacttaaaactacatatgttgtatttattataaaaataacatttttaaacaaagtcaatctaatgcagcattatatgcaaatagtacaaacattgaaaaatattatggcatcatttttatactatactatttcttgtgtaattcgaataaaatatacaatttaatttataaaaaatattaatgtctgtgctgtatagcacgggttatgatctagtaatcttttgcatgggaaaactaattattgtctttttatattaacataaaccgttttcattgggtgaatgaaagtttttgctctgtttggtttattttatcattttcgatcaatagaaatatttatccatgaccgatacattacgaagacgtctagaggtattgaatgatgttgacttggatttggaacataaatcgatgtttcctagtaaatcatgtggttcaagcaaatctagttaatcagttataaaatacatgaaaacaaagttctttttattgagatatctgaattaatcagactgaatacaaatatggcaatccggagtaatgaaaccacgcacttggcttgttttattcaaaccataattattcactctagttaccactgagtagtatgcagcaattactaaaaaagtaaaaacaaaacaaacgatacttagcctataaacagaaccaaaccggtttagttgtttttggcggcgttttcaaacgaccagctccaaatatcgtgacgctcaacggcacgtcccatggaaccagcaaaaccggcgtacatgttttgaagaagaacttcattgagcactctgggagcttcgatcaaagcccgcttaggtttcttaacgttttcaggcgcgagtgtaaccgtaatcgtagagtctttgtttctgaactcaacccaagccttgaacctctctccactgctaagattcacatctttaaacgaccaaactttccttttcccgactcttgtctgaacccagtaaccagctttctcagcgacaagagaagtcattgagttgatgttaactccaacatggttaccactaatgtctagaaactctttgttctgaaaagtatcgaattcgatagccaagatgtggttctctggctttccatcgttggttttgttgaggattccgagatatccgccatctgaagcaccggagttatcagcttccggggttatgatgaaggcgaaaccttgaccggagttaggtttggtgcgaggagtgatggagaaagtgaaagaagtttcaaatgaaaaaggagaagaagtgtttgaaggtttgaatgggatttgattgatgtaaagaccttgaccatgagagaatgggttctcgtctcgggtcatggataaagctccggatcggcttacaccatcagaggaaggaccaagctctgcgtctcctaggaataacaagttgctgccatcgaaggaatcgaagttgaatttgacggcaaaagctgcgttagctaagaacagaacaagaaaacagagtttgtgaatctgcattgtgtgcgttttttttttggtgttgttgttttttgtgattgaaagattgatgatgaaaatatttggaggttgataatgtgtttatataagggataacgtaagccatcgagtttgaatattcaaatttatacttcgaaaaatggtcaaataaattaagccaagtggattcgattcagatcggacgccaccacaaagggcctagcagtgaaaatggacccatcagatgtcatgaacaaattaattttattcttttgataaaatataattgattcgagtaataattaattataagaaaaaaaaaaaatcgattataaattgttttgaataataattgattaattatattttcttgtcccctttctctacgaaacattacgaatttcatgcgtcgtgtacatatctgtaagacatagccacttttagtttatatgaactattttcgttacgtggatgcaaaatacgtttttctgacgtccacataaatacactctggaaaagtttacgttcagaggagtttacgtggatgcaaaaaaacgtttggcaatctcattaaaaagttttttgataaaaaagaaagataaaagtaatcatgctaataattaagataacacgttttaacttttacgtgaaatctctttgattcaacaaacataaaaaaaaaaaaaaaccattgataagaaaacactttctcttaaaccaattacaaacctcaattaaaacacatatccgttgagaaaaataagaacacacatatgtttatttagtttaacttggaagatgtcttcttctacgtatgaatggtcttcattctttcattatattctccatgtgatagctagtcatgtaactccttttgaaatcaatccttgtttattaggaaaaatcaaacatcaaaggaagaacactccaaggaagaaggttgatcttattgtctttgaacggatcatcaagcaacataggaagacaaatgtcctttgatatgaccgactttattttgtgacgttccaagatttgtaacgttgcctttttagcagattcatagttgaggaccaaaaccttatgatttttaaactccagcctcaaatcttcggtgctacattcctctattagctcgcatagatgcttaagattctttacttccactccgttcactttctccacctgttcccaccacaactattaatatcttttcctagacataataattgcacaaaatttggaaccatgtttatctttctatcgtttttatcgttagattcaaagttgagacaaactaatggcgtttcagttagctttcaccaagaaactctcaagaacaagtaataaataaattacctgagcaccatataaactttggtatccttcgttgatgtcatctgctaatctctacaccaagaaacaatttctctctaagtgcaatgcctaaatgttatattgaaaagaagacatatttttaaactaaacatgcttttattgttaagaaaaatagcatctttagtagctctacatatcctcattctttctaccaaactcagattcaaattaaacatgattgaattaaagagaaaaaaaaaacaaatagtatcgtggacaaagaaagatgcaaacctcggaaattttgacttggtgatgttcactatcaagatatgttttagtgagaggcacaaaaacaaaacccccaaatatgtagtaacttggaacattataaaattgttgcactgtaaagtttggtttcacctgtgtacaaaagaaagtagttcagaacaaaatgtgaacgagcagggccaaacaatttataaaatataacagacgatgatttaccggttttagactgatattgtactcatactcttttccgtttcgtaaaactttaactaaggctttttcacctggtttcttcatagaaaccaagtagctgaaatctatccgtcttttgttttggaaaggaactgcatcaaacagaaactcacttcacaagtaaatatggagaagaccattaagcaatatctattaccaatatcattacctttctcatcatttcctattggaacaccatcaattgcaagaataatgtcgtcttttctcaaaattttgtaagcccccgacgacgagtttattttgttaataagaattcctgtcatttcatggctcatcttgaaatgattacggatttgaacattttcgagagattgatatgaaagatccaatgagccgaaacaagaatattgtctgctctcttgaacactagttatgaaatgcttaattattggagttgggatcacaaaactgcatgtaaaaaccacaccccaaaaaaaaaaaagttaaagagtttcccccacctcttgatacaaatgtatgtaaattgattatctaagatttacagtttagctttcaacttaccctatttcatataccacaccaacgactttgtttcccataatcaccgggccaccactattttcatcgttgatagttgcatcaatctgtattgatagcagatcactgtcactgtaatcgtatattctagtttcaactctaagtactagaccttttgtaatgcagatattttcaccacctgcattttgagcacattaatataattctactaaccaaatcataagaaaaatttcatcatttagcataattttatggtatattggaatatgaattataagattgtaggaaacatgcatgatatgtctccatatgatttattaccaacaacggacacaacttcttggagaggtggtatgtctccaagctccaagggattcatacccttccaaaactcgtcactatcgatctccaagatggccaaatcacattcatgtgaaatcttttgaacttttgctttgtatttgatttgagagccatgtcttttgacgtccacgaatgtgtgatcattcatagccatcaccacatgagcgttcgtaagaattttccttccggcgattgcaaatcctagaacatcaatttcaagccataaaaataacaactttgaagtgagctttgagataagtatagtcacataccagtgcccctggatgatttttggtcaagagtcttccaaggtttggatttgctatactcggtagagttagagaatacctttacaaccgaatccagcaccaattcatcaagaggatgactttcttctattttcttccaccgttctagcttcttctcatcttcatgtattgagtggatatttcttcggcaagttaacgcaaatggaagaaacacacccctctccgctgctgatgtgctgctcctcctgcatatatatccgtatctggaaactcggccggccgttgttaccgttggcagtgaattggtcagtacattattgcaacttcggtaaaagaaaagagaagagagtaaaccaggaacccgagctctcgagtaccggcccaccgtatgaacacacggccggaaaaacatatcaagcttattggaaaatcgaacccctggttggtgctactgtttaaaataggaagtccttttttctcttccttttctaatcaaattttttccattttttgtcttcaaaagtttccttaacttatcgtagagaattggtttgttttttctccaaggaacctttaacctttttttttttttgaaggttaaacaaatcatcaaaggctttaccagcagattcatttttttaactagcggtagatgtataagaccacctccaacgagtgggacgatgaaagtctctaaaaaaccaaaaaataataatatttaaatcttataattatattctatttttttttaatacagactaccaataaaacgataaaggtatatttgtttgtagaactgttccttaaataagggcttttagaacatcattattgatgatctcttaagacaattcttatgttaagagacaggtcttataatggcttataactaacaaaagtctcttatttaagagactttaagacattttttttagttatgtataagacatatctcttaacataagagttatgttaagaaaccatcaataaggatggtcttagagcttctctccggtatctctaactttgaattatttttcttttcttatattgtgagaatagaaagacactgttggtggtgctctaaatcgtgttcaaatttcgaaatgtcttacattctttcattgtttgcttagatagggcattgaattaatcaaaaacccctagaggaaaccacaacatgattttttacttaaagattattagcgtgctccactagagacagataaactatatattcgtcccaagtcaattcgttttattcagtttttatacaaaagcaaacgattcttcagattaagttgaatcccaacctttttaaaaatcttgttgtattgcttttaaccttggacaggccataaacaatcctagtatctttgagcgtaccttcggacaaagcagcaaaggaagacaactccaaggcagacggtcaatcctattatctttgatcggataatcaagttgcggagggagactactcgctggcccaagccgattttatattgtgacgttccaagatctcaaatgttgcctttttagcagattcatagttgagtaccatcactttgtcattctccaagtccagcctcagatctttgctaaaacatccctctattagttcacgtaagtgtttcaaattctttactttcactccgtttactttttccacctgttcccaccacaaatatattttcttttagcgaaagacaaattaagaaatgattggtgtttgggattcatccaagaagtctcataaataaattacctgtaaatctttgaaattactgtatcctttgttaatgtcatctggcattacctaaaacataaaaagggaaatattatttgttttggattagaaatagtttacatgctcttagtctcattgttgacaaaatcaagggacggaaaagaactactactagcaaacaaatatcttatagtagctcaaataattatcatcattctttacaataaactaatattcagcttagaactgagcttaaaagaggatttagtattgtgaacaaagaaaagcaaacctgagagattatgacatgttgttcatcggtaattttgtagtacttatcatcaatgtacgatttagtgagaggcacaaaaacaaaaccaccgaatatgtaataacttggaaggttataatattgttgcacttgaatgtgtggtttcacctgacaacagtaaaataacatagttcaaacaagatgcgaactaatatagttatatagccaacaggttggaaaggagtcataaaattttcattacaaatgaggacttaccggctttaaactgatattgtactcatgctctttccccttccttagaacctttactaagatattttcatctggtttcttcatagaaataaaatgattgaaacttattcgtctcatttcggaaaggacctgcatcaaacatagtcacacttaatagtaaacatggaaaaatacattaagcgatgtaaaaaaaatatatagtttatattacatgttttatcatttcctactggaacaccatcaattgcgagaatgatgtcatcttttctcagaattttgtgagcccccgacgatgagtttattttgtttataagaattcctgtcgtttcagggctcatcttaaaatgattacgaatttgagcatttttcattgactgacatgataaaactagtgagccaaaaacagcgttgtgggagctttcttctgcaccagttatgaaatgtctaattattggggttgggattacaacactgcatgtgaaaaccaaagagagagagaacaaaacgtcaggcaaaagtgaaggttgtacctcttgatcacaaatgtaagcaaaactatatcaatgatttacagtttcaacttaccctgtacttttcttatctccaagaatttgaaatagtacaccaaggactttgtctcctgtaataaccgggccaccactatttccaccgtaggtagttgcgtcaatatgtattgtcagtagtttagtggaacttcgaaggtaatttccagttttaactccagttacaacaccttttgtaacgcatattgtttcaccagctacattgagcaaattatggaagcataataagagctagtttcattaattatcagcaaaaaaaattccgtaatttaaataaacatgacttgcaagcatgatgatttcttggagatcacattaattctcgctagtaaccaaagcagaataaaagtttcatatttttaacatagtttcttggtatattgtaatatgaattataagaccatatttataggaaactagggcagacatctatctctcttccattaccatgctttatactcatatgacagtttgaaacattgtcaagaataaataccttttggataaccaacaacatatacaatttcattgagaggcggtatgtctccgaactccaagggattcatacccttccaaaactcgtcgctatcgatctccaagatggccaaatcacactcatgtgcaatcttttgaacttttgctttgtatttgacttgagagccatgtcttttgacgtgcacgaatatgtgatcattcatcccctccaccacatgagcgttcgtaagaattttctttcccgcgattgcaaatcctaaaaacatcaatttaaagccaaagtaacgcatacaaaaaaacaaccttgatgtgagctttgagataagcagtcacataccagagcccccatatgattcttggttaagagtctgccaaggtttgactttgctatacttggtagagtcagtgaagacctctaccaccgactccaacatcaattcatcaacgggaggactttttcttattttcttccaccattcctcatccttcgacatggtatggatctttcttccgcgagttaatgcaaacggaagaacaatagtagcgatccggctagagattgttatcgtcgggagtagagctctcgagtaccgggacaccataccaacacacgaccggaaaagcatattgataattcatcttagtgaaaactcgaacctgtttgtgtttataataaattgccctttttccttttaattattttccatttttgcatgaaaacttgccttcatctataattagagtaaataactagagaaaattgatttcctttttctttccaaggaactttctttgaactgaaagaatatttatacatattctataaagtttatagctaacaaaaatgttggtagtactgttaaagatgttaaatacaatggtaatggtattacaatgtctttattaaaaaatggaacacaaaatagttcaagttaaagaaaagaaaaaaccattgaacttgaaggatgtggtcttgaataaacacaggaatgtctgttgaatttaggtatttacaagtataaattcaaacatctaagcccgtctagctcagttggtagagcgcaaggctcttaaccttgtggtcgtgggttcgaaccccacggtgggcgcattaatttttggcagttctcttatttttggcaataatcgtatgtttcaaatgagtagctagtggagaaacttaaataaataaatcaaaacagagccaacaacaaactttaacgtatccaaaacagaggagatggcttcaaaccaagttatgatgggttcttattagtcctaaaagagttattaaagtttttttagaactctaaaaagtttcgggcttcttaaaaataaaacacagaaatgataatgataaagattttctgaccaattgtccctctattaaaatcactatttgcttattctttaactatataatctgaaattaattaaaatcatttgatccaataatcatgataacaaaattgtgtcacttttctaatggagtataaaataaaataatagttgtttctcttctcctaagctactacaacgacaaagagaagatctcgttgactccccccccccccccacacaaaaaaaaaaaccaaaaaaatacagagctaatggttctgcttccatgggagctggaggaagatatactgtctcggcttccacctcgatctcttgttcaattcagatcggtttgcaaacgatggaatgctctttttgatgttaaaagtttcaacaaggaccagttcgctcgtgctcgtcctcagttcatcttcattaccgattccaagatttattcgatagagatcatcggtctcgacggcgttgatccaacgattaagttacatgtgctagactcctctggtatcccttaccgtgaatggaaatttgcttacttaaccatcactgcttgcgatggccgatgggttcttgttttgtaactcttggattagtcccaagggaacagctttttggaatccgtggttgaaacagattaaatggatcgagtacgagaataaaggtttcaatgtatgtggcgtaggatacgataatactaggcctgagaaggtttacaaaatcttggagtatttagagtgtcgccgtgaagagagctcgaacgcatgctaccagagagttgc

SEQ ID NO: 428 - DNA, 79459 bp, Arabidopsis thaliana
gatctacgagtgtgcctctcatgcgttcaagtttattgatacttctaacaaggtctggttcataagcgatgttcaacgatacagtgtgtgcttgaacggaaatctctattggctttcttttgatgactttcgcatcctatgctttgatttctcgagggagatagtcaaacccttttgtctccttccgtgtcggaagtttgataaatgcgatttacttgccctccaagttttcaagggagataggttatccttgttaaatcaatgttgtaagacaaggacgattgagatttgggttacgaagaagaagattgattctagtaacaacaatggatcagacgaagttgtgtggattagcttgttgactttgccaccaaataacttgccaaacttatttattgtgtgttatggcattagttacttcatctatgacaagaccaccttaatcatttattgtgaagacgagaacacttcagcggcttgcatctatatcatcaggggggatttgttcaagaagtttgaaattgattcctctgctttcttttgttatcactgtgtttatgctcccaattttatccctcttcctttaatgtaaaagttctgaataataataagatgctttttagtgtttcacattaagctctcaattcaacatttatttcactactagtttaaaccaattgacaaaacctgttcagtctatgttacaacttacaatccaagaaattctgagaggattaattcgacgtattccccattacgttttacattttaagatgtgtggaattagttatgaagggttcttattaaactttttagatttcttaaaaataaaaaactcttcattactaattatttaacatttcttaaaaataaatacacagaaatgataatgttaataattcccttatatcataaattccttatttgcttctttttttactattaaatctaaaatcaattaaaatcctttgattcaataatcatgataacaaaattttgtctttctaatggagtatgaaatataataatacatagttatttctcttctcgtaagagcatctccaaaggcaaaatcaaatcttcatatttaatttgaggtttcttgttctccaaaggcaacctcaaaaccttaaaatttgaggtttcattttttattcattttggtccttacaaatatttatgtcttacagatactcttactaatatattattctatcatattagtccttaaatttttatgtcttattttgatgtatggagaggaagttgtgtggattagcttgttgacttttccatcaagtaacttgccaaaattttgtggcattagttactttatctatgacaagaccaccctaattatgtgttgtggtgacgatgaaagtcgaacggcttgcatctatatttttgaggggagatttgttcaagaagattcaaattgactgggtttttgttttcccggtgttgttactgtgcttatcctcccaattttatcccgttcctttaggttcatattgcaagcctaataattttatcggattttcttgaatcttgttcatgtctctgttttcttaggtttattaccattgtaagatgataatatatagacttactatctcaaacattgatgatcaacacactttcacttcgaactaaccaaaatgtttgtaaccattgagtcaattttacaaatatacgtaagacatataaagttgtgaacaataaggtgcttatagtgtgtcacatgattaaagatcatcgtaggccacccacattatttcactagtagttagcccattgacaaaaccgattcagtctatgttagaacttaaaatccaaggtaataaaccaaaccaagtaaacacccaaaagcccaaaaaaataaaaaacagaacatatgactcaggctgagacaaactgatgaattctaggctcgcaactaagactactacaatgatatatatatacggactatacatgaaataatattataccagttccaaagaattgaaaaactgatgatcagttccaaagtctaaaagaagatcagtgagactaattacaattttaccaatccaacatttgtcgccatcatcatcaaaatcacacgaacgtagaagcttttgaggtacgttgatcggtacctagagtgattaccattatagtcacatcgtcatgatatctccttctcctaccagccggaacattcgtcaattcttccaaggtaaagcctacatcaaagtgttttcttttgtcatatagtagatcatgaagtctgcacacattttgtgaagtaaacattaacaaaaaagcatcttaccagcacgagcagcagctttagctacaagacgttcaagcagaaactttgctggatcaccagaaggattactagaaacgaaggaatggacgagcccaatcgcttcctcgttgctgaagaaatcaaacaaaccatcgcttgcaactataacaaagtgatctgattccgttatcttgtgaactctcatcgatggttccactgaaacataaggcgggctcaaaaggttacgaacgcggaggatccccatgagtgcatcatttagtttctcctgcaagttaatagagaagagctacttgatactttttctttcaagtataaaactcataacttaaaagaataatactaataccttcttcaagtaaccaactccgagagcacgagtaactttaagctttcctttgattttcccaccaataacgatcttaggatcatcaagatgctcacttaagagtctagcttcttcgacttcgttatcaactgtatgatcctctgtgagctgaacagcttgcagcttcttattaccattgtaggtcgctagaacagctctgctatcaccaagattaaggacgtatagatccttcccaaccaggagagtgaccaaaacacaagatccaacggatactaaatccggtctttcttccatttcttgctcaaccatccttaggaaatcggtttccgcctgaaaaagcgcacggttcaagcaatctagtactccttgcctgaacaaatcagtggaagagtaatctacattacttatatttgataacaattccaacttttcgccatcatcatcggactttgtttgcttcatttgacgatcaagcaactgaagatgaaacacaatggactcatataaagtacatgccaagaaatcagcagcatctcttccgttgaatccatcatagatagcgcaaaacaaccaaccattctcctcagagcaaacagcttgaactctatcttcccctgcagcaccacccgcaacttgaacttccatagcagagagaagaaacccttcattaacagaagaaggagaactcattgacgtcaagtaacaagattcaggctcaggaggactcggactagtagacgagctgcagcttagactcaccatacttccatggagagaaggagagagtatatcaagcttcgaaagcgcaggcgaagacggaactttcctgaaagatttcggagaatccagagacggcaatatctcagaaccaatgactccattgcagatattagtattggctaaagtggggtttccacttaaagcagctcctgataaacaagagaaactgctagtcttttgtagcctaaacccaccaagaacctcacgaccatcagcaattttatcttcagggattcctatcttcttattattgcattgataaccaaaacttatctcaatctcaccatacggatcagtcccttcctgcattttttttcttcactttcttgcaatgttctgaaacaacaaaaatccacaacaaaaccataaagtttagtcctttttttaacttgaacaatcctaatgaaatcttaagactaatacaaaaacctcacacttcaaaaaagttagctgctttaatgaccttagagacaaaatacgtggtgagagtctaagcacatatcgaaagtgaagatagatggggccaaggtaacgaacagttacataagttaaacgtgagagttaagaaaaaaatgatatttttcataggaggccattaaatgcagaccacagaagttgttgggaaatgtttcagatagaatgtttatacagagataaactaactaaaaacccagaaaacacagagaaacttatagatttggtatcatcaaagtattcaccgtgacatgtgttcatatctatatggattacaacaatatatggatatatcaaaaattccattgataagataaatcaaaactcgcaaaccaaattgaaaagattaaataaaacagattatcggaacgagacattggggatgttattgatgatgagagaaatgggtttaccttaaacgtatacggggatggagaaaaccaaagagaatcgaagattcgtagaactgagaagaagcgaagcgaatttagagaaaaaagaacaaatcagaggagacgacgacgacgaataaaaatgagtgagagaaagtgaaattggatggaggagaagagttaacgagtgaatgttttttgtttgctaattttggtagtgtttattatataatcgaaagccctctcctttataatgttttttcacacttttcttctctctgtctttttcgtttttgattcgttgctttttcagcttcttctttttttgtacatcttttaaattttttaccaaaaacaatgataatgcttagtttttttattagtatcttggttgaaactacagaggtcaatttgggtattctgaaattttcttgctaagatactttcagatatttttggtagaaaaattagaatcttttgttttgggtggtgttgcataagtagaagaaaaaatgtctatctacagagcaaaaattcataactcgtcagaaagaaatgatcaacaagatatttaattaaacgagtaaatagaaaaatctatcgacgaaagtgaaaaacgaagatagggtcaacaattcaaggcaataagtgtgtgtagttgacattttatcctgatgatgtcatcctcagatctctaccggtaatgttatattttattcatctctagctctattattttcttggactgctcaaagaaccaatataatacgattataatttggcaagaagggcttacaaggaacattaaatttacccatatcttcactatgaatctttttcagaaataatatgatttatttgtgatagatgtaatcgtgtaatatcttctgatcgaattcagagtggtaatttactatgcaatttattttttacggacaacaggataaaataacccaaaaatacatggtgacgttttacaaaatctgatcttttgagtactaggctagtactagatgtcgacgtagcgtaccatcatagttgccgcaaacagagacgtgaggaagtaaattaataagtagatacaaataaataatttaagctgtaagcaaaaaatcgagaatgtttaagagttaggttgcatgacgttaaagaagggagcagatctaacattttgcatctctcaccatatattatagagtttaataatcgaaagttgttaaatcatatcaagaagcaacacgaaaagtattaaacaatagctaaagacgcaatgaaaaacgtctatagttttgtaccatttttttttatctcgaatattgacttggtgaattgagctaataatctagcttatagctttcacacctgaaaaaatcaatttcgattttttgcatattcagaaggtcccataaaccgtgaccggtacagccttaaccggtgttattcatcaaaaactcaccgattgattcggtttggaaaaacaaaatttacgtttttaaaaccgttgatcgcatacatgaatgtttttgcctacctaaggttaattagtaagtatactaagtaaatcaaaccgatgcatgaataaaaatctaggaccaaatgaccggtacgattctacaataccaagagtcaatatattaatactaattaagaggctgagtggaagaaaatatcacatcaatatcatatatcatatacgacttatcaataatagagagagtcgtttaagagattgataaatacccacaaatactgatttgtggctgttgaggcacaggagaagctgcttgctgttgaagccaactgatgaaaacagtcgtcctcactatcattcccttcctgaaaatgacatttgatgacaattctataatttccatttagcttacgtaccggtttttggcagtttacaatgaataggatagatctcggtttgtctttatcaccgcgatttttcaataatcattacacaatttctgcaagctgttgtgttatgtgtatctaatgaaagctcctaagtctcttaaatcacataacctgggattattttctttgcggacatcttatcgagacagtactatgtatagacgagggactaattataaccaaggattgttcagggactgacagtaaaaactacggcggtttaagactaagaactaatgggactacttatatatatcgttatgaaataacggtatcaacacgaagtgagtgatgaggattaccttgacttattgtatatctaccgtatagaaactggaacccataagagtttcaagatgcaatggtgtagaaaactttcgtcattcctttctttgttctcatctgtgtgatcttgaaaaacaacaagggaagtgtacccagaaaaatgtaatttaagaaaacaaaagtaggaaactataaaaagaaaaaatttctacttgagactggtataatggttgtgtaccttcatgcttatgatatcggataaattggagacatgggttccaccacatggacacccggggctgtcacctaattttatgatccggggagtgctgccctgcaagggtgaatggctcagagacatcctatggtggaacgtaactgttggcaagtgaaatggctcagagacatgcgctttgctatccattttttattgcttaactgactattaaccagacactgcattatggtaagtaactaaggtgcttccaaaattttcactaacatagataccaaatagatgatatataactatttagacagagcaggaattgatacagaaaatggtttatctagcaatggttacaatttacttaacaaagccaaatataattacatcacttaaagaaaagccactgcctcaatgtgaattgacagcaaatttctgatataactaaagatcaacactgctgcttctacaagaactaccgtcatttaaggatatgtctatgaaaattataactctgtaagctgacttgaggtttatgagcaatggaagaaaaatcattagaaatcaaggaaagagtttctatttgcaaataccttggaaatataatcaggaagactgccaccacagagcacagatgcctcttcatagggcaatatagcagcataaaccttatacagggtataagaatcactattaagaagaataacaaaaaatcgaagaaatccaacaatggtaaagagactatgaggacttacctttcctcctttggatatcagttcgttagcttctgcctccaactctttctgcttcacctgaaactcctcctgtgggacgcttcctttgtattccacaaaaggactgaatcacattgtagttgatcagtttttatatatcactatttttaacgaaagttgcaaagaagcaagcagatgaaaaacccctttaatgagactcttacccgtcaggaaaatggtacccttttccaggctccaaatgtcctaacccaactttctgcatacacatatctagcaagtgtccagctgagtgcaacctgatgatgaacaaatattaacttcaagataaagtccaggcacaaactacgatagcaacgtaaaaactaaaaactgcacaactcagaaccatacgtctgaaattttgttccaaccatgccatgcataacaatgagaacaatcttcaacagcctatatctgaattctgaagaattccaccagcagattacaaaactgcatcactcgtactttacaataattaacacaaaaaaggaacagattcacttaaaatttgaagtatctataccctatgtgcagagaaaaaaagtgtttctgataacataataagaatgaatccaacatttgacatttcattcaaaactacaatcattcatctagcttccctctcgttgtaatcaaattcaatcaacagttacttgcctggaattgagtttacgccttgattcatcaacagttaagtaaacttctttccctttctcactatcaattccactttcaggattcgaaccttcgaaaactccgtaatggagaacctacgatttcaaaagcgaaaacacacacaccattcaaaatttcgaacattctagaatccatctgcactaatcactcaacgggaaaagatcaggatagagattcaaatatacaattccgtctttcgatcgaacatcttgaacggaaaatttcaaatccgaaccggagaaaacaattaaaccggtgtctgacggctggccaccaccttgtggatgaaacaccgttgattctagtattagagctatgcgtccatcttgcgcctgaatcagagagtgaaggattcaagcattgagaactgttaaaaaggagcttcgagaatggttactatgaagacgggaccttaaataaggagagaaatctggaatgagactgaagattgaacatgtctacatgataatcaagcttcgtcggaggaaaatccatggtgattccggtttccgacggattcgtcgcggtcaacagtcaacactaaagtaccaaactattcaaaacttttacgtttctacgtgtatttgtcaagttgactaaaagccgcttctccagatattttacgtcttgccatttattgttgggccttgattgtttgggcctttcaaatattatatttctttttttttgagttttaatagggggcccgttttaatagtctatttggactttctttttctctgtactggacaaaaagggtattacttttatatttttcattactaaatttcagtagatttaatatctttggttgagaacaaaattgttgtataaataataaattacttgtatcttgtattttgaagagtcattgaaatttatactccaaatcttagtattcataagaaggaaacgagtaaatcggtgtgaacctaaaattttgtagtcacacctaaaaacctaaaattgcaacgatttaaaaactataaaaccttcgcatataaatccaaataaaatgtcttaagaaaatgagttattttttttgaacatttagctaataaaattttcttcaacatatgctatacaaattatatattacttttttaaagaatagtttttttaaaaacgatttacatatctctttttgtatattgtagatcatgaataatatgaccattgattttctttatttttttagaagatgactttataatacttaaaacttttaagatctttttaaatataatttcacaaaatttacaatgtatttatatattttattgtagatcatgaataacataaccaatcttgcgttttttcttgactgtagaatgaccatctctgaaatttcaggcaatggtctgagatatagatttccagcctccttgtgtgaacactcaagcagaccattacactcaacacatcagctactaacatttgttgaaatttcatgtacatataaatgattcttggcgccttgattcatcaacatttttaaatataaacttctttccctttctcaatatcgattccaatttcaggattcgaaccttcgaaaacatcgtaatggagaacctacgatttcaatatgaaaaacacacacacatcattcaataattcagaacaacttagaaaccatcaaattgcaaacccgcttcggatcatgtcttaggaaaaaaataatccaaatagtgtccactctcatttcataattgttgctttgtgtcgttatgcctgtcatgatatggtttttaataatgtccattttgattttctttttggtttttataaattagttacaaacttataatgtccattttgatgaaattggaaatcacaaatatgaacaatacacaagagatgtacattaaactcccttcattaatatatgttggcattttaataggtagttttttttttcatttgaaatagtctcaaatcatggaaggagaccactcataattgtacaaaataaaagtaaatgcgttctatattactcttaagtcttatctacctttgtactatcgttttaatttcttgttagtatagtagtaccttgaaacataagcaaaaacataaacagaactttttattaattttttttttggtagaaaagaacactgtatttctacttacgattctaataaattataacaatttaaaacagtatactttccaaaataaattagcaaaatgtaaattattcatttatataacaaaagaaattttactaatttgtaaaattgtgtggatggttggtgaatatgattttagtatatcgtaaaagtgaccaacaaaatctttaagaaaaaaaagaaaaataagtagtggatgtctccatcaaaaacacttggcgcattaaaacatccttagatctgaagctaacaaaaggccacttgtaaagctgtctctttacgacaccaagtggtattattcgtaattacttccatctttcagtggcatttcattaagctccttctcttttaaaaaccttttcttttatctctctatctctttcttcatagttcgtgcacagagagagctaaagctacagtgtacagaagaaaatgagaggactctccagaaactccggcgcggcggcgatattcgcgattctactcattctcgccgttcataactggtccgtcgccgtatcttctcaatccaccgaattcgccggagatttccctccattcgaaacagagtgccgcggtacaattgccgagtgctctgtttccgccgccctcggagacggaggagatctattctacggcggaggagaaatgggagaggagttcgagatggactcagagatcaaccggcgcatattagctacgaggaggtacatcagctatggtgcgctgaggagaaacacaattccgtgctcacgtcgcggcgcatcttactacaattgtcgacgtggcgctcaggccaatccttactctcgtggctgcagcgccatcactcgctgccggcgctcatgaatctatcactgtcagtctcactgtaattcttttttcttttctttttctgatatataatttttcagaaatttctcttttcttttgttaccggtttatatttctaagttcattgcggattattagagtttcatacacatgtaaatgtttctgggaatttatctctgttattgatgtaagtttgtttacataaaccagaaaaaaaactatggaataaatacattataattaatagtatcatcactcataaacgaatttgttattgaagtaaatatatatgaaatggatttgttttcgtatttatggtccatggatgcatcatgcatgcatgtgccgaagaaataccagatgctagaaaaataaaataaggttttctaattcataaactataattataagtttccatatgaagaagtatgatcactaactaaataaaataataatttcgtacaaaccaaagttgtatattgagggcgaataaagaggcgataataggatttggttgggagccaactaaagccagctttcggcagagcaaccacacgtgtagggataatctgtaatattgattttattattatatgatacattttgcacacactatgaattaatacaccatcaatttcttctatatgaaaatttcttgtcacggggactcatacctataagccaaacacataagctcttcgtgattaacgaaattgaaaggttgctgtaggaaaaaaaattcaaagaaaaagaaaaaacgttacattaatttaaaagagaaacagatggttaaggacccatttttgagacattaaatatcacacaactaacaacaattcaattagagatacttttgatttattgcactcaaaatctaacgggtctaacacttcctcttgtcacattttgacacaacaatacaagaagataacaagttaaaatcaccaaaagtttggaccactacttccccatcactcaccgattgttatacattcagaattattatatgtaaatattgatgatccaataatgaggctcatctatacataattttatatggatgtaataagtctctatcgtgtgcatatgaacaagaaacgacaagcacatcatcttccgcatccttgtcacgcggacttagctttcccacacacttatacaatttctctcttacaaacagcattgtttacaattttatttcttttcgcagattcaatacacattggtcacatcaaatttctgcagctggcattgatatttttattgttattttgggatctgtgaactattaatagatttggatataagcaaatcctgtacctaccatctattcatatatcagctaaatacacgatgtgattccaatggagtatagatcaagcaaccgactctttggaccactagacttgtgtgagctatctcgagcggtagactcggaccggcccaatgctagtcaaacatacataaccgattcaaaataataaaccatgatgagtttttatatctcttagaagcacaaacttaatcctttaaaccaatcaaacatcaatcaattcatgtctctagaatttcatagtttactcgggcaaatgccgccaattaagcttgataataacttgtgtgtgtgaaacgttttaaacctgaataggaggcggaaggagaagaaaatgaagagaagatgcaaaaacatcaattataaaagtgtcattatgtttgttaacgattatactagtgtttaacaaaacaaaccaagaaacaagactaaaaccctccaagcaaaggaatgtagaagtgatctgtacttataaagagcaacctaacatagtagtgcattgattcctaaaaatctctttaagttgatcgagcagctcatttgctgcctcataacttgtcacctttcctagagggcttacgaggcggcgatacacggggaagatgaaaaacttttttcatccatctcctcgagaagcaacagggtctctccactctatttgttttacaagaaccatctcatcaaaccaagaaacatgtcgtttcaactcaaatagattgactatacgatcaggagtcaatccatctctaagcatgtctttatagtcataaaccattttaaaagtatctctaaagcatatatagtattatttgaccaaacaagaagtgaaaacaaccaaactttttgaaagaatattacttccggatcaaagccaggtcgacgagagttaacctgagtccttaaacattctctctagatttatctaaaggatacattattaagaatttattttgccaaaagaagctacaaaacaaagaaagggagattaatcaattatcagcaacaaagaagatggtttgtgaataaaaatactgaaatccaaataaaatttagcttcctcaacaaccaaacaagaagctaaaatgtaactaaaatcaaacttgtaattctgctggttcttctctttgagctcgaggaaccggtaccaaactgggaataaaggtccagtgtgaaggccaaagatccaccacagaatcaatttgagttttactgatcaacttattttctccgaaaacatagatccaagcccgaccagtttcgttgcacgagcacacgacgagccttttatcttcaataaagtaacttggctgagagtcgaatccatctactaaatccggcaagttaggacttgaaacttccatgaactttatccattccacatctctatcaagattattattaatcttgtacttgctcacccaaatctcaatcttctttgttgcatggcattgctttaacaatgaaaatcgatctccctcgaaaaccctaaggacgaaagcatccttaagaaagttcgacgtcccacatggtagatcacaaaacttcacgacgctttcgctcgaagaattgatttcaattaggtggtacacgagatcagtcgtttcaaaataagtaaccaaatacaaatttccattcaatgatacaccactaattttagtgtatatgttatgaacaatttgttttccctgactattatcaataggctcgcggtctttccacgcatcagaggcagagtcatggattgtcaacaatctctgggtgtggttttccttccgatcacaaaaagcaaagatcttgtaactccccttattgttgtatcctatgccataagactccattcgagtgtggtttgaaccctggtcgatccatgtactatgtctcagccacgggttccaaagcacaactcctttctccatgtcacatagtaataacttatcgcaatcaaccaattttttaggtatctcatgagattctaaaccgggaatatctaaggttaactcacgcacaactatcttgggatcgatgcttaccgaataaatcttggatttggttgctaagatgaatcgaaacgtcatcttgtggttattgatgaacgtcttatcgcggaagagagcgttccattgtttcgatacggttttgaagcgaagaagagattctggtgggacacgagagagtatctcttcaatcaactcccatggaagagataaagaaaactcccatgggcgcttctcctcatgagccattagggtcgtttgttttcagtcgaaactttctaattgactactttacttatataagcttatcccaattagggtttctagccgattgttcatttaagtgatatttccaaatacctcgtttgtgaataattaaaaaacaaaatctccaaatatctaaattttagaaaattcgtgtttattatttcattttttttttgttttacttttaatattttctgttcactttttatttcctaaagtttattatgtaaaacaatatcaagtttgaaatataaaacgccagaaactgctaccaaactgggattaaaggtacagtgtgaaggccaaggatcaactacataattaatctatatatgcccgaccatttttgtcgcaagcgcagccgacgagccttttatcttcgatgaagtaacttggccgagagtaggatatggtgtcaactaaattcggcaagttaggacttgacaaagtcatgaaattaatccaaaccacatcatcaccattctcatagttaatcttgttctcagtcacccaaatctcaagcttctttgttaccatgcattgctttagcaacgaaaaccgttctcctctaaagatcttaagggcaatagcatcgccctagacaatgcctcatgaaacatgggccttacagcaccgccaatggtaagaagatcttccaaggtttctacactgtgctatattcatggacatcatgtacgtgctcttaccattggaaagtgctctaaggcccatatttcatgaggcattgtctagggcgggccctgactttgaggctatggaaaatctcaacactctctactcaacgctgcttatcatggaagataaatccacgaatattacgcgagattagagagagagagatgaatatttgatacagagttaaaccttgcagcagctataatacagagtagttaattaagtaatataatacgatactgacctaataataaaataattgcggaaacaaatacaacaaatacaacatagctggtgaaagctatgccggtgagcttaattaattactatgtctcatagctggtacaaggtttcgctaatcaaaccatttagaaaaatatatttcgttttcttaatctatgatccataaaacaatgaaatcttattcagtttggtttgcaataaacgcgaacaataagtcaataaaaacgaaacttgtcattcttgttgctcttaggctaaaggaataggaaccaaactaggaacataaacaaggtgaaaaggccaaggctcaacctcaaaacccatttgaatcttcttgaacctatcccccttcacaatgtatatgcaaggcttaccactttcatcacaagtacacacgatgagcctcttgtcatcattgttatccatgaagtaactcggctgagaattagagtaaagatcttgtaatctcgggaagtttggtatcgacactgtcattaacagtctccacgacacaagctccttcctatctccactaatcttgttcttagtcacccaaatcttgatcttatttgttgtcgggcattgttccaacacagatagccgatctcccctaaaaacctcaaggatttgagtatcgccaaaatcgttcttacatggcaagagacaaaagggctcgaacatctccctcgaaaagtcaaagctttggataaaaccatcaccaccactttcacacctcacagcaatccaatacaaagttccattcaaagataaaacagtccggggagatcttaggtgccaatcaaataaaccaaacttaagatccttccacgcattagtttcaaactcaaataccgaaactctcgggttaattctgttgtaactaccgtttatttcactactgtaaccataaccaaaccctaagatcttgtaacacttctccggtctacgattatcataccctagtccatataaattgaatctactcctcttaggctcgatccatttagtttgttttctcaaccatggattccagacagcaacctcgtcaagcaaagcaggacataacaaaaaaccatcgcaataaaagaggtttcgatataccttaagcttcttattaggaccttgagtttctaggtttagctcacgcacctctaaggagtcatcgatattgatgcctattgaatagatcttggaatctttctcggtccgtaatatgaactgaggacggacgcaagccaagtgattgttgatgaatctctgatcgttgaaaagtgtgttccatcgtttgcaaactgttctaaagcgtgtgagagatagaggtggaacacgcaaaagtatctcatcctccaactccagtggaagcttcgtcggcatcgttattttctttcggccacagaagacgaaacctaatttctagcaaggtttaactttgcttcattgtatttagagataagttggagagtagacagtttttgccaaaataatttgagaaatgggtattttttttagaaataggtggaatgagtacttttatctctcctctgtaatagaactccccctctaatacagcttttagtaaaatacaattttaccctgttgttggtttgataaaataaactgggcctcattaaaaccagcccaataacatctccaattttgaattgctcatgggcttgacatctccaatatattatcattgtcaaataaaaggataaaccctacaatttcagaagcaaatctcagatacattgtcaaattcgtaacaatatggaaggtatgtttatcataaaactctttaaagtttctgaatttttaaaggtgtacgtaaagtattttggtgtacatactgtataccaatcagattttatatttatgatatctattaagtgtacatacacgtatgtagtctagtctacgtatatggtgtactaatgttggtatacgtggtgtactaatgttggtgtacgtatgtggtgtacttatgttagtctagacgcttgagatgtactaaatctggtgtacgtatgttgtttcccttattctagtgtacgtatgaggtatactaacgcatgtgtacttgtgtggtgtactattgctggtttacgtatgtgctgtacatattctagtttaaacatttttccattttttaaatgggttttctttgaatttgaatctctatctttgctttagagtgtagttttaaatttcattgcatttttaaatggatttttctttgggtttagtcatttatcttatctttaggtatagttttgaacttcattacatttagacatctatcttggctttagggtatagttttaaacttcattacattttttaaatgggttcccttagtttctcttattctaatatacgtatatggtgtactaatgttagtgtacatatgtggtgtactatgtagtgtactaatgttggtgtacgtatgtgctatacttatgatagtctagacatctgaggtgtaaattattttaattgggctacgaaatatagtatttgggcttcaaaaatattatttgatctattattctttaaattttggacccacacaaaattttctttttcacatcataagggtacaatagtatttgactcatcttttggactgtagccacattttttctatctcacatggtctctatctcacaagcccaataaaaactacctattcttcctatttctaaaaaatgtgtctacttctcaaattattttctaaaaagtgtctacttctctaataaacccttgtatactactagttgaaacaaaatttgagttattataattacttacttatatttttccattattaacacattgaatccgaaatttatttccataaagtaaggtttcacaattactcaccaaaaaaatctgagttattataattttcccctattattattctattacactttgagtccaaaatttataatattcttaattattgcaacaaataaaaactgagttattaatttacaaatatccttttcacatttattaatcaaaactcacccgggataaaaatatctctttcttcttttgtcagattttaattttggtgatacaatttaatttttgcattactataaaatctaaccaacatgtaaaaatgtcataattaaaagatagctagaggttttattcattacattcacacttgtgacttattaaatagctaaaggttttattcctcttatcaataaaaactctgggatattctacacaccaaaaaacagatattcgagatcttctagtgttagttgaatcgcagaacttttgccagtttttttcacccaatgcagatgcaacaatgttccttttacgttcctgaaataaaattaacaatagagtggagtgagtcaagtacactatacaaagaaaaagatcttgatagctttggcctttggaacaaaaaaaacaattaaatacatgaagagtcaaaattcgttcctcaacggtatttttgatggcaatacgagtgaccgtaacagctcgagtttgtccgatacgatgagctcgatcaatagcttgatcctctgttgttggattccaccataggtccagtagaatgacatgacttgcagctaccatattcaatccaaggtttccagctttaagagacatcaacatcgcacctgtttcataatcattacatttgtctttgagaaacgtaaaaatgagattctttgaatgcaaaacatataatatgtctggatcattgttgaattcttttacagctatgtctcttgctactagagacattgtaccatctaatcttctgaattttatgcggttttggacaaaagaatgctcaacaaagtcaagcataccagtccactgatactattgtctttattggtggagtgtctggactgccttgctctgcaagcgactgaagaatctctatcacagctcggattttcgatgaaataaactcgccttgatgcaactaaagcatttttatcttcaggatcatcataatcgttgatgcaacttctaactgcagattcagtgaaaacaacatcatgtttaagctggctgtggcaattaagtgcagggcacgtattgttatccccgttaatgtttacagacacacactcataacaaaacacatggccacacaaagtaacaacagggtcttttggtggatcctgcagagaacatcataagagtaaaaaaaagattattaattagaacataatgagagagcttgaagagacaaacaatgctcaatcattacaatgtacttacactacaaacagagcaggtggttgaggataatttcaagagatcgaggaacatgattagattctctctaggggctactcgaactccatctgacatttttcttgtagtatctgagtgactatatccgttaacaagttgtggatggttacaagcttggcgtagtcgcaaaagcatcaccaaaagataagccatgtgttcatgcaaagtcccatcagcagcatattcctatagaataagagtagaaaatgtcatataacaaggtagaaagtcaccatttattcacatatatatgataattatattattgaagaatcacctcaaacttccaacgtgaattcaattcaagcttcctgtagaaagaccattctactactgaaaggtcctttttgctcaaattaactttctttaaggtagatttattataggttgtccatcaagtaatgttcctaaatagcaaaacataaaagaaaattagcacaaactacaaaaggacatatatatatatatatatagtaagagcaaacgaatacctttggtgcggcgcaacattataccccttagaatagcttgaagcttcttgtaaccatgaagaggctttttatcaattggagctttgattctttggtgaaatgaattgcacatggcatatggatgatatctaagaaatctgaaatagctataaagatcgtctactttgttctttatcggcgttccagtcaaacaccatctccttttggctctaaggctaaaacaagcttttgcaattagggttctatggtttttaattgtatgagcttcatctaatactactctcaaccacctaactcttcctagtgcaccaacgtgaggctgaatcaaactcgatccgtcaaggctttctctgcctctcatactatcataacgattcagcatagggttttgtggaacttcatttgtaacaatggcgtaagttgtcatgaccacatcatatattgctatttctgttggatctttggttctgtgagatccatggtggactaaaacagagagtttgtgttcatcagaaaccttctctttaacttctcttgcccattgttttacaacacttgctggacaaacaatcaatgtaccaccagagttttgaccttttcgctttctctgctttgattgtgacttcaacttttgtaacaggataagagagatcgtcgagatcgttttaccaagtccctgcagtgccatataacaccacacataatttgttagatatcgaacatttcacctaattaaaaaatgtgataaacaccaatgttacctgatcatctgctaatatccctcccaaacagtgcctgcttcttttttctttcttacgcatccagttcaatgcaattttctgacaaacaataaagattttagtatatgaccaaattcaaaattaaggacaataaaaagcttttaagtgaaaacatgataatatattattacctgatgcctcataagaggaactgtaagaacaccaggaggtagatccttttcggtcttgggttgcttcagatcctgtaattaaactaagccaaattaataaatatcaggttgaatgttaatggaacaacagatacatacttaagtagtgttgaagtccattacttgtaatgcagcctgatagatgaccctctcgttaacagtggtcttctcttcttgtacttcttcatcactacctgaactcatgtccattgtatcatccatccttaaacctcttttcgatctcagaaccaagaatttgagttctaagaaaaagaattagctctgccacgcaaaagacattagtgttagttcctcttagttaatgaaacggttattttagcaaagaagactatatagctgtagctatatatagaaaaccagattaagcaacattatttatgaggtttagggtttatcgaaattatgcattcttaaaaattgaacaatcaaacattactaactttgaggtttagggtttataaaaccttattcacgaggaggtaaaagtaagaacagggcagaacaagaacagagaaagaatccgaatttattggaacgtaattagtataaagatgatacgagtctgaggataagaatcgcactgttgttagggttggcttggacagagaaataaatagacgatcgcaaggaacatattttaaagagaaacaaattaacatattcttctccatataccttcaatactacgaaactttattagtaaagtcggttggcccaataagattgctatatatatattacacacatactaatccaacggtccttatctgatttcaggagttaaattgtttttaacggctgtgatttcaagtaggaagctgaaaacagagtaagcaattctctttgccttctcgattacgtttttctcttccactgcaaaaccctaatttcatatcattaatcaaacatcgacccagctataacccggagtcttgagaagccctcttttcttctgtatcattctaattctagctgcatcttcccatctctcagcagctgagtaggtgttggatagaagaactaagctttctgttgtttcaccaagactctgcatctttttcgacacttcattcccaagttccgcattcttgtacgtccaacaagcagagagaagtgtacccaacacgcgaatatcgggctcaaatggcatcttgtttacaaaatcataagcttcatccaagtatccggcacgggctagaagatcagtcatgcaattgtaatggtctattcttgggatgacgttgaaatctcctcgagacatggagttgaacagttgtttcccttcatccactagtcctgaatggctacaagcagacaaaatagcaagaagagtcacctcgtctgggttcacacctgtttcctgcatactgttgaacagagaaagagcttctttgccaagaccatgaattccgaatccgaacagcattgtgttccacgaaactatatcccgcttatgcattgtgtcgaaaactctcttggctacatcaagttttccacactttgtgtacatatccatcagtgcattacaaatgcttgtgttaactgcatagccatgaacaacacaatacccgtggcaactagaaccgtgtcccaaagcagccaagtgagagcaagcggttaagacaccaagcaatgttgtaatatcaggacgaattccagatgttctcatctcatgaaatagacgaaaactctcttctgggcgacagttcactacacacccagtgatgagagaattatatgaaataacatctttcaagccaatctcactaaactgcctaaaagcatcacataagcttccatacttagcataaaatgaaattatggtgttttgaacagttaagtctaagatgaagcctgctttaaccgcgtaacaatgtacacatcgccctccacttagatctccaaaccttgcacaacccatcagaataagcccaatggcaactggcgtcaccattgccacattatcattaaccaacatctgaaaaaacacttctccagcttcctttatcatttcgttttctacgtagcctccaatcatagcactccaggttacctcattcttcttaaagtctaaatcgaaaactcttctcgcatagataatgcacttgctcttggcatatacatccaagatcccagtcttaacaactaaatcattgctaaaacccattcttgtgcaatacccatgaacagctttcccttccctcaatgcaccagcccttcctagtgcaggaaacatcccaacgatggtggatagattaggactcagaccatcgattctacgcatatccaaaaacaatccaatgacatcagttaaacagcaatgtaaagaaaacccagaaatcatagcattccaagcaaccatatctctcttaggcatttcgtcgaacacctttatagccatctcaagttccccacacttagcatagaaatcaaccagagcagtacatacatacatatcagttgcaaagtcgctacaattcacatgactatgtatcagcttaccatcgtcaattgctcgaagaccagcacatgctttcaaaacaaacgggtacgtatatttcgtgggtctaacaccagaattcagcatcttgtagtacaaatccaaagctttttccgcgaaatcattcgaagcataggctctgatcatcaaatcccaagcaataggattgatccttggatgaggaatttcatcgaacacatggcgtgcaagttccacttcattgcatgatgcgtaaagacgtgttaaattgacgagcactgtagaggaacttaacgtaagagagcgtttaagaagatgctgatgaatgacctgacctaagaccagattccttgagcgaatacaggtttcaagaagacttagaaacattgggataatggattttaagtttcagacatatgttacaaccaaacatcaaagacttaaaacaaaagtgaattccgacaactaaaaaaagaaaaacatgtttcaagaaaaaatcaaaacagttaaatgttactcatcagtgtccatattgcatttgctcaggggaataataagtaagaagcttcttgaacagaggaacaagtgcaaccacagcaagttgaagctgctcagagctgtttacgcggatgcttacttgccctgctcctctgttattcagattagcacgagcaatgagattagaggaacgtccaatgggtacttgagactgtatattccctccgatagcaagatcgccatgccaatccatcacagagagtccaagagttgataaaaaccgaccaagcggataatctttatctcgaaactgagcttctaaagtaccaccataagcaacatctccacgactagtcattgctccacctgacataaccatcctgaaccgtttattagcaatcaacttatcttcgacttttagtcccgcggaaactgaatcacctaagagcgtaacagagagaccagctgctgctttgtttttcctaaacttgttaaatcttgtttcacttcgaatagtgtacgctaattccttcccagcattttgcatgtcaaaacctagggaagttgatctaccttctccatgtttaaccgagctggccaattctagctgcacatgtgcatccttcttgtcctttgtcacttggccagagaaagatactggtattttgtctttaacaacaaatagtcgttccgcattcacaccttcataaccaatatcatgatcccacccatgagtttccagcactggcctaacaagccattgattggaggtatcaaggtaccggtaccgatgagtaggattgtcagagtcaaaagatgcaggtagagataaatctggcattggaactggaacagatgcaggttcacttctctcctcttccacattttcactatacccgttaggcatatctttaatctcagcagcaaatttcttcaacaacttacgtctctttctttcctctttcatctgtctcttcataaatagtttctcccgatactccatctcatcgagatattccttcttctgagatttgctaagcttagtcatctctgctttagtcaaccgcttaaagggaggaagctcatcatactctgattcttcctcagaatctgatgattcgtctaaatcatcttcatcgtcttcatcatcgtactgttgctcaggaagcttagcttgtggtcttgattgcagaagcgatgagaggagcaatggtagtggcggagccttggaccgagttgcaaattgtccccctggaatattatcttgtaatttcagaagagcatttgcttcggcaagaatcttggatgcaaatgagagtaataacaaatgaggcttccacacttggccattaggtaatactctctggcctgcccgatttgtcctgcaagcagagtggttctcaactaaagaaacagggttcatgagcctcatatctcccgctgcttggcgaatggcctgctggatgacatgagaacgttgtgtcacaaacatgtcatagctagaagcagtaccatttgggccatctggtggagccgaagcggcatgagtcaaacccacaatggcattaaaccatattgatggtccaaaaacatcagtgatggtgcgtaagagaggcatgtcaccagaatctctgctttgcatatccaacctatcaagatataacacaatgtcaggcggacttttcttgatgaatgccctaacagacttcaggatcttctcattcttgtgttgatctgaccaggatggtaagagaccgggagtgtcaattacccgtaccttaattccctgaacaaaaccctcaatatcctgaaccttctttgtccccacctggaatgcatcagtactaattttcagttcatcaaaaatagaattgatggttgcacttttaccaaccccacttttaccaagcaccataatcgtacaagaaaaatcaaggggatcttgtgcagctgcctcaagctgttctgccatggcactggcacgatcaaaactaaaggcaccaacacggcttccgtttctgcccctcaactgttcagccaatccaagcctgtacaaaacctgagcaacaacaacattatgtggagtttgccctaatctatgtgaaagcctcaaaaatttgaccctgataaactggagcttctcacgggtctcatcatgctcatctgtctctgcagtggtagagtcttcagcttgctgaggctgattgtgagacacatttccattgacacgaggctgttgtgtaacgcgtggtgcaggttccaaaagtggagcagcacgaccaagacctgctgggcgagcaggtggtaatgctgcagtatcacttctagactctgttggtgaaacagaacttaatacctcagattctctttccatatgttggctttccttaatctctggacctatatttacactgctatcttgctgctttacaatttccttattagattgaatatcatgtcctccattactgttttgactttcagtctctcccttctcctccgaactagatttttccaatggagataaggtcccagctgctacttcaatactatcattcaaggatttgtcacctgaaacaattttaacactattgaactcagcaccagtcttaccatttctttgttctgttaccatgccagctgatacatcaatttcttcctcccatttttcgtcgtcaataccattactccctgtttccacggaacaggcacttactgagataacttccgccaccagttctttattctcatcaggagagactactccattttctgaagaagaatgtgtatttccgttttccaaattcacatcctcagtagctaaattggaagtagctttctcactgttctcaaccacatccaagcttgatgccattttaccataagaaatatctgcatctgctacttccccgtgatcataatcattcattttgagagtcaccaaatcagaatcagcctctttcgtagttatacattgctcgttaacctcaccatggctctctccaatctccgaataattaacctttaaattttctactcctctctcatttctacttgtttcttccaaatcacacacttcatcattggaagctaaaggaaaatcctcttgcaacacatcggttttgagagattcaggttttagaccctcctgcgaaccaattgcttcctcaaagacctcttcttcattatccttcacttcatcagatcccaccaactcactaattctaccatcctctgcaagcttcttctcatccccatataacctggttacaatctcagccccatctcccatttctaggatcacccaaaatcacgaaacactgcaccaaccaaattttgtatcctcgttacttttaaatccacaagacactaaattaaatgggagtgaaactaatattttccaaatcgtaggtatattttgctcataggaattcagaaaatacaaagaagaatctattgatattgaggagaaaaagtgatggcgagaatctaacctggttagagaaggcaaaagtctggaaagaaaaaaaaacaacttcatgcgctttttttgtatttgtataaatcgccttttactcgcctgcgacagtgcgactacgacgggaaggagaaggagataagcgactttcatggacggtttaaatcggtttgggttttaacatcggacggtggaaaatggctcttatattgcaatcgtgaaaaaggcatgtcacgtgatcaatagtaaagtgtgggccaaggcctttttagttgggctgcataatcttgttggccattttatctttacgacaagagagaattgctttatttgttcttttggagctattcaactgtcttttcattggttgtcactatatagatggtatttgaagatcttattaattgttagaaatttgattttatatatggctcaccaaattttgaaacattttcagatgataaatggttttatactttttcagttgattgataaaagagtttgattcacattgacagtatccagctttctgggaggatagaggagaagagaaaaataagaaacacaaaaggtataactttataataaagattcaaaaataaaaggaaagaaatgcccaaattcacaaacatgaaggacatttctgtcattctttgtcatatataagaagagatcacccaaccaacctttcacacttaaacaacaccacacttttggttttccttcttctaccaactaccgaggaactctcttacggctcagtatttcttgttccttgagacggtgttggaaccgagcaagcctggcttgaagactgactagccctgctgctttccgggacaacacaaagctcagttgcgtcacatagttttctatcatgcttcccggttggtccacctccgctagaagtttcatttcctgataatgatataacagaaaagaaaattgaatgatgtgataacattctacaatcgttttttgtgcgctgcaatgatgtgatttacatacctcgcgaacaatctccattgtatcctcaatttcttttctgtgcgctgcaatcagagcttcttcttcctgaaaaaagtcatgtgatggttacgataagacataaacagaactaccgttacttgcaaatcaaattcacagcttcatctcatgttttaaagggataggtgagtactttacctcaagcagtgcatcgaggttttcatcaagcgaagggtcggtttcatattgccttgaagcggtttcatattgccttgaagcagtttcacttgcgttctgtctaaaatttgtcaaggtagggatatccgacgaactgacatctcttttagaccaattttgtggtctgtctggtttttcttcccgcaaccctttcccacgaggtggtgacactttctttactttctcttcacggtctgaagtttcttggggatatgaagaaatgttgtttctctgactagtggagccagcaaaagaactgttcggctctgatcttcccttgtccattgagaatgatgggattccactttcctctcgataatttgtaggctgtctgaagtcaatacccgacgtactgctgttgctgtccttctcgaccaccctcctcctggtttctggtacattcacttcctgtggaggctcaaagacatcttctacatcatttgggcccaacaaaggatccttattaaccggaggcattgaattcgcagtttgatctttcttgctatttccacttttagatagacttttgactctgtttattccatacataaccaacagaggttaatagacgatgaaattgagaatttgtttcacaagaggctatagtttgtacaaaacataccgatcagcatatcttagagtattgagggtatgttcacacgatcctgcatttggagagatgcaggaaatcatcaccgttcttgagtttccaacaaatgagtcacggagcacttccgttagtttgcttccacgaaatggtatatgtagctggtcattgtccagtgcacgtatacattccttaagagccaagagactcttgttgatttctgcgccttcaatcctaagaaaaatccacaatgaaaacaatgaagcatttagatctgaagtgtggtggtcctaaagtaaaaaggtagcagcaaagtgccactttatcaatgcccacaagtccaacagaggcataaattttaatctacacattagtggtaggtcaattctcaaactactcaatcacaggggcaaagagaatctttaccttgtctggcgatcattgtctgtggtgtctgcacctctttcactgccagcaaggtcaatgaaagaaatctttcccacaactttcccaggcaattcattactatcattattcctccgtctagtgtcttttacctcaacatgcttttttacaacaagctgtaggatggcatgcgatctagaagattcctcatttgctccagttgaacctgtgctcctttcggcatttcctttctcgataaaatcctttacaatttgtacatctgaaacttcatattcttgcaggccaacaatgcaaacttgctgtctaccatcttctcgcatgcaaagtttcctactcggcaataactgaatgatttagacaatggtaaacatgcatttgcgatagtagtagacaacaatggaaagtattgacactgataggatgaataagtgccaatgtttacgatatactgacatcgaaataacaattataagctagtatatgcctgaacaaagtatatgccaaaagaaaaggaaaacataaaacccctcaacaaagacgacatttataagaaatgagaaaaagaaagaacactaactttctctcactgagaagatcgaacagctttccaccatatatctcaaaatagctgagccacaatttaaacctctgattgctgtatactggttgacgcaacaacctcataagatcttcaactgctcgtataggtaatggtttcattgtaaatgtcttaccactacctgaataagcaaaacatcattagggccatgaaagcatgaagaaactattaatctattatcctctaaaaactggaatctgttagcaagagtataactatcagtgtatttcccaatgaacattaatgtcattgcatacctgtttggccatatgcaaagcatgtagctttagttctctggaaaataatgggaattattggctcaattgtggcccgatacacctattcaaggaaacaaacaaacatgttcaaagcagcataaagcttctgtatatataaaaagcttaatgtatccatacatcaatccaatctggattgggggaaaccacatgctatgatctagttaataggtcaatcaggtatgtcgaccttgacataaatcataaatctaccaaagctcaaggttgcatcacggacacctaataggattttctatggtttccaataagctcaattcttaacttacctcgtcatttgaaacatcctcatctagaacagcatcaaagcagaactcatgcttttccacataagcagtcaaatcaacctgcaccaacaagattacggttcattcaatattcgaaaagacaatattaaatgaaaagaatatatgacctttaatagcaggatgccatcgttcagttgttcaactgaatcatgtttgccattgttatctatgatgaagaatgcacacaaaccttcactctgggctcatggacagtcaaagaattatcagataccgtcacgacatcctcctcctttttagctgtttctttcttgtttaggggtcttttccttacctatagacaaaaaaaaaagtggtttcccaatcatccctagtcataatgaacgttgcttataaaacaatcaagtagtaaggaaacatgtcagttctcaagtgaatgacctaccactactttaatcttggctacactgttattttctttatcacttttaggcaataaacccaaaggttcagcttctgtctgttgccgctgttgacgattagctgccaaattatagtcttcttcaaattctttatttacactaggcatgaaaggtgacggctcaaagggttcggtaatcacatgctgcaaaatgaaaggaaagtcacgtatcataaaagttggtaactttcacatggataatcgctttctttatgaactagcaaatgcaacaagcagttatttagctcagatgcttttctaatgacaacaagaccaaaactgtcacatctcgctaaatccattcgagtgtcaagatcagaagttgcctacagaagtctcgcagatagattacatgtgcacaaagccaatggattaggtgggactcaatatggcaatgtaagattggcaagaacagtttgaaaactgggatgtaacacaagaacagacaatctgatgatgaaaatttatgatctttctgttatccatgggcactaatgagtaactatgaataagtctttgcactagttcttcttccaagcatacctcagatagaagctctgtatcatccattgcatgaagatccaataatcctgctccaaaatcacctctgaactcaggtgaaaaaaatccttccgaagagggcatagctgctgatgtgtgagcagttggtgtatatgattcagaagtcgactccccattaaaattgagatttctcattagttggaacagtctttgtttctcttcagcagtctgagctccataaccctagcagataccgcaaacaccacaaaggatgcttcaaatatcagaacccgttcatgcgaattatacaagagccaaggcaaaagtttctatagaaatttaccaatcgaagaagaaatcactaacaaccctgcagcaaacatctaacttaatcacattacataaatggccaaacaaattccaagctctccttgagatacgttatgactaatatccataacagggagaaacaatcctacattcctaatttcctactgcagcgtttttagtagtctaacaccaaatgtgcgcaggaattagcgaccgaaaactctaacaaaacttggctatctgcgtctaatacaaaatttgcatactttaccaagctagggcaaactccatcaagaaaactaaagggcatgcaaaatattggaagagtacagaaacaaagaatcagggaaagcaattacctgcatgagaaggtttgggaggtgacgctgatcattgcctgtagaagcaacaggagacgccaaatgctgcaaaccagcggattgaagccaccgtgccatgactgcatctcctgcgtcattagtgggtaaagccccatcgtaaagcgccgtcgcagccgcagcattgttttgctgcatttggccgcccatgaggcgctgtgatcttctttgaggagccaacttcggagatctgtaaaaacaactcttcatccatacaaaaaccagaatcacccatttgttacaaatcaaaaaattcctaatttcaacaatagaatgttagattcaaatcgaagagaaactcacaatgtggagagaattcggattcaacacagaacatgaaagcggaaatgtacagctcccgactttgcttcacctccttcaaaatctgaaattcaatcaataaattgcatccaataatcggagaagaagatcgatgttatccaaagtaatgattaccagaaggaaacgaagacacgcaacggtgttagataagagatctgagatctgagattttcacaatatacaatcagatccgacgagtgaagaaccctaatttacgcacatcgaatagcgttagagatagagagatagagagatagagagagagagcttctgttcaaaattttcgtcttcttccgtaagcgacgttaggcgcagagagatgagaaagagaggggcgttgaagaagatttgacaaagtataagacacttacacaataaattaaaaagtttgaggtgtttaaaagttttttaaaaaagtgacagttagatcaccctttaacttcagaaatattcaccgatttgtcctactttttaagattgtacagtctagtccaaaacatttgaaacaatcttctttgaacggtcttatatattctaaaagatagtgttgaaatattatttttttgctgagatcgtgacacaaggacatataccaacatggtgacataaaaatagaattgatgttctcatcttgaatcatacggtatgaatctcatacctttttgagcagattgcataaacattgattggtttattatatatgtagtataactaataatataaccttggtgggttgatcagttatgtgcattttcagattttagctactttatggtatttaaggatgttgttttggaccatctatggtaatagagatgaaatttgaaattgtccgaggaagatgacatgagtttttctcgacatgaaatccacaacttttggaattttagtacatgacaatgatctaatcttatatattcttatgtttgtttaaatttttatacggtttcaaattttgaattgtttagatgtgcgaatataagtgagtgtatatcaaaagtaccaatcttgtgtatgtatgtgtactgtttaaaccccaaaaaaaagtgttaatccaataaaatatacgaacgagaatatgcaaaagtagcgaagtggggctaatacagcttgtgggttcctttcttttgaatcaaaaagcttttgctttagcctaaagcattccgatctaaaggattcctgattttaagtaatcactatataaaccagtatgaaaggagcttttcctttatttatccttcctaaaaacattggtctctctagttttgtgtaagtttagatgatctacctcctttgtatggctacgtcaatatagtcatatagatagaagttgatactacttgttacataagaaatgtttaaatagtgtaggctaaaagcctaaaacgaaaggaacaacaaagtttgaagaaataatgacgataaatacataagatacaagagagttggagcaacgtcaaaccgaccaagaccaaatcacgtttccttttacgtgagacacaaatacgtaccaacgcattttggttgccctctcatccatacggacaccacacatacataaataaatagttcgaataataaaaccaacaaactaaaagaatagtaaagcataggataggttgtgttgtttgtcaaagtaaaagaatacacataatacattattattacggccacattgtgatttgtctcacaactaaaaccaagatgacagaactctagttagtatcgattccgcacgtgagatagaaatccttgataaggagcagaacatgcctatgatgatgtctcaagacatcatgtctgtacgaaactttttctttttaaagggataaaacaccattagactaaagtcaaaagaatcattctacagcatattccatgatttaaagttactaacagttagagtaacccactcgtttattcacgtccataagatctgaatccaaaattattagacatctactataaacatgcctcgagattcgggagtttaatttagaaaagcaaagctgaagagatatcacaccaaataacacaaaaagtaacgaccaaaattcaactaattgtaaatgataaaccgttttttgcggaataaataacttgagaatcttccaacacagaaaacaagaagagagaaaagtaaactggcaggtaattttaataggggacgacgacgaaacacaggacaatataaagaaacataaacttagagagtcgctgcgaccgaccacagtaacccaacgagagcttctctctcagcacttgacctccttcaaaccatgagcgaagtacaaaaatgttgggttagttgaaccctccttgtagtaagcaaagaccaaagtgctgtcatcatgcataccctccccaacaaagctgtaaaatcagacaacacaagcattgatgagatttcagatgaaatatatgtcatgtataacaagcaagatacgatagattggggtaacttacaattggaagtcactgagcctggggagcaaaaacttggtagctccctcaatacccttcttgaagacagcttgatcttcttcgctgagcttgggtgtcaaaagcttaatgtatttcttaatgtaagcgatgaatcccttcttgtcataagttggttgctcctgaagtctgaaggtgtcgacaatgtcaacaaccttttgagtagagtcatcaacaccttcatcctcaccaccttcttcagcagatggattggcaccaatgttaacatctacagctcccacagtaacccactggataacaaaatcaaaacccaattcagaacaggaaaacaaaaatttaacaaaatcaaaacaaaacttgaagtagaatcgatgacactgacctttccttctacttcccagaggattccattctcaatctccttgtaagggaaagagtcagacagaagctcatcacctgtaaatcaatagcccagactctttagtcattactcataagatcccaaacattaatcgatacaagcgaataaaccctaaaatccaatctacaacgaatcggtaagctcaattaaaggacgtttatatactaatgaatcacagatctaaccaaatcacataaactaatcccctaagatttgaattatcaatgcaaagagcagcaaatcaacgaaaaacctatgatgcgatgacagatctaacaattcgataacatgatttattccgatcggaagaaaaagatcgatagctacacagttcataccgagattaaggaattattgagcttaccggtgagaagatcttggtacaccaacatggtcgcttattgattgttttctctctccgatggatgcgaataaacgaaaatcgaaggttgcgggagagagacgcagcgacgaggggattctgaagtgaggtcctaagtttggtatttatagtcgaaactatagcgtagggttttcaggtaaatttacaattctcggtaaattacaattttgggctttaactgtttccaattttctattttttaccctttccttttttttaaataaaggaaataaatctgaaccgacgcttaatgagccgggtttggtccaacgggtggggattcgagtgttgggctacgtataaatagtgttcgggtcggataaaatcctatttccctctcttctcttccgtctttctcgttctgtttctgattgttcgtgtaaaaccctagaatgacgatgatagctttgaacagggaggtcgaaactcagtcactgaaaaaactcagtctaaaatctgttagacgagctcgtgaaattttctcccccgtccatggccaatttcctcagcctgatcctgaaaggttaatcaacagtttcgcttgcaatgtccacttttttttctcgaaatttctcagaatttttatgtgtattgacgatttcttcttcttgtctgtttttgttcttgtctcgcagcaaaagaattcggctctgccataaggtaagggggttttcgaatattttttaaattttatctttgatcgtgttgaaaattttgttcgcttcttctttgttttgagtttgataatggatagctttatagcaagcttcagagacgttgaacctgagaaaattttataaggtgtaaatcgaacagtcaatggcttatcacttttatagtttaccttttatctggagttagattcttctcatcagctactattgtttgagtttgctttctagcatattaccctcatctttatagtaagatgtttagtttgcatcaagcgttttagtgaacatcaagtagaatataaaagttaatgacttggacgttacttgtatagattcaagttgcatttggaggcgtagaacctgcaagtaagcctacacgtattgctgaccataacagtgaaaagacggctccattgaaagcccttgcgcttccaggtagttcttttatctgtttttcctgttgtgagacaaaactagtttcctattttctagtttccctgatatctatttatattagttgtgagtttcattcatatatgtctataattaggattggaaaacaagtttcagtaatgtatcctcttaagagtatcttttcaaacaaacttctgctgcactaaaaacgctgttagtgtaatcttttagcctttttcatgactattgtttctcgttctgaaagaccaaattattttctccgcaggtccaaaagggtccaaggaacttcgaaaaagcgcaacagagaaagctttagttgttggtccaactttaccgccaagagacttgtgagtatacattttcatttggaatgtgactagtccatatagttagtataaataatttacgacattctcaagaatgttattcctgttttgtctttgtgattgatgctctacttatcgtgctgattgatactgataattattgattcttgaattgaaggaacaatactggtaatccaggcaaaagcacggccattcttcctgcacctggatcattttccgaaaggtttgtgtcgcatccttatctacttttatggactctctataacgacactacatctagattgcgatacctaggtggtacataaagccgcactaaggtgaattggtggttcagagtcatgaaatttaaatttggccatatttatttaacctgaaatgcatctaacttgtatcaatgcttcagttattcattatttgtccatcatttcccctctatgtgttacagaaatctgtcaactgctgctttaatggagagaatgcctagtagatggccccgtccagagtggcatgcaccatggaagaattacagggtaagatctgtgttactgtaatatttctgcatcttatggatataacatttaagtgtgtaggtattcttaggccatttgttggcgtccagagagtactttatgttcttatgaattgatgcattttttggttgacaggtgctccagggacacttgggttgggtcagatctgttgcgtttgacccaagcaatgaatggttttgcactggttcagctgatcgtaccatcaaggtaacggatcaactctattgaaaatctaattcaatgccttttttcccattcttctgtaaccttttctggattctataatatgaattgtcatttgctaggtcccgttttttagttcttcatgcaacatttacctatatctcatgaattaatcttactgattgcttctgtggctcttgttcactagatatgggatgtagcgactggagttctgaaactcacacttactggacatatagggcaagtacgaggttagactactatttttttccccctcaatttgttagtttatcaatagctcttgtagaaaagtaccagtgtaaaagtttcaactctctaagtttatataattattgtttcacaggcctcgctgtaagcaatagacatacctatatgttttctgctggtgatgacaagcaagtcaaatgctgggaccttgagcagaataaggtttaaactcgatgatggatttcatctcatctgtatattaattactcttctcctgatctgaacttttcatgtccaatgtctttggaatttgtctttgataggttattcgatcttatcatggtcatttgcatggcgtttactgtttagctcttcatcctactcttgatgttgtactaaccggagggcgagactctgtctgcagggtatgacatttactgaaaagatgtatcctgtggttataaacatatgtatttttgatgtttgagttctctaactgttgtcaaaaattcttttctacttataggtatgggatatccgtacgaagatgcaaatttttgtactcccacatgacagcgatgttttttccgttttggcccgcccaactgtacgcctcatttcatcttctttttacttaatgtgcttgtggcgaagaagcacacactgctattttatgctcatatagtcgtatgcttttatttcaataactttggaacttactgtgtctgtgatgttgcaggatccacaagttattacagggtctcatgactcaaccatcaaattttgggacctccgatatggtatagttaacatttaacaatctcttggacttttgcttttcttcctccctagcttttcattgtatgcaggattgggctaacaaatatactataaacaggcaaatcgatggcaaccataacgaatcataagaagactgtccgagcaatggctctccatccgaaagagtaattgtcttgctttttcaaccttagagttttgcatgataatgcaccctgatttaatgtctctttctgtttcgttcaggaatgattttgtttctgcatcagctgacaacatcaagaagtttagccttcctaagggagagttttgccacaacatgctgtaagttctagagtccttgtagttatttgagtcttaatccactctcttacatcttccagtgcaatgaaaaagataatgtttcttaactaaactggaaattttagttttctgatgtgttttcatgttatctttctttttggagcagttctctacagagagacataattaacgcagtggctgtgaatgaggatggcgtaatggtcactggaggtattattttcattttcaaatcactctttgatacgggacgaaatactgatacttgtattcacatttcctccacatattatattacccgatttcattatttgaactaaaatgtccccgtctttgtgcaactgaaggtgataaaggtggcttatggttctgggactggaagagtggtcacaatttccaacgggcagaaactattgtacagcctggtatcttctgaacctatttcttgatcctttacccttgcgttgcttgaatggttaaaatatttaagtcttaaaggtttatgattattggttcgaaggaacaaaggaagctctcaattttcaagaagtgatagagttttttactctctagaattgctgcaagtagtaaatgtgtcttatctcatatgtgtcttatctcatttacatggttaggttcgctggagagtgaagcaggtatatatgcagcgtgttacgatcagacgggttcaaggctggtaacgtgtgagggagacaaaacaataaagatgtggaaggaagacgaggatgcaactcctgaaactcatcctctcaacttcaaacctcccaaagagatcagacgcttctgaggtttccctctcttacaagttacacctctctaatatcaaactcgaagccagaaaaaaaaaatcactaatctcactctggattaaaaaaaaccttggttatgctatataatttcttcttcaagatagatatggaaaaaaacagcattgtagtttcttattaattattgtagttttacatgaaaaaagacactattttcggaagggttttggacaagggcatttcgggttgattcagaaagtgattgtagccgagttaaagcatgacatgaacccaacaatggcaaaacatctttgtactgtgttcgtggtgtttgtcaaaagattattgagcaattaccattaccaagaggccaacttgatcgcaatacgactaatcgccttgtagatgcattctttactggtccccgtggagattagtagaattcattcataagatacattcacatttacatatgagataattctttgttatagctataaaaatgagcgatccatcttaaagcagaagatttaaaataggttccatggaccaatctataacacaagatgggtggtagattttctcttatctccttatatcaagagtctacttgtgtataagtttgatttgtttatatacaataatataattaaggaggaaaaactaagccaaatctataggagagcccccctatgatctggggtttaagagttaagaccactcaatgatgcaaattgtcggattgggactaagaaaaattgaactcaccatatcttttccttgacccaaaattttaggatacattcaaagacaaaagtgtagtccaatattttgtctttctttcttaagatgtctctttaccttgcgagttcggtctcttgaccaatttgtgttttttaaatcgacattttatatagttttgcattaaaatagcgtttcttatagtttaaactttaaaatcatgtttcacactcaactaaattctttagtttttgatattataaactcagatttttttcgttaacttaatgttgatcaatttagtagttaaaattatgttcttctctcaaaacttaatttgagaaaaccccgaaacacagtaaggaaatcatttcatcccatatctctaagttatcaattattacattgttatttggtatataaattcaagttttctttggtaaaacattatggaagacgcaagttgttataccaaaaaaaaatattttttctagctagtgatatgattatgaattttatgtgtgctaattagtaaagagggaatatattatattggctattgattacaccctttctgcgacaacatatattgggaatatctaaacacatactcgttgagttgtcgaagtttatatcaccacatcgtgcatgcagtactaaatttcaaagattatagcttaccgaaaatagcaattaaacgtgtgagatgatgtaggtatacattggtttttattaataaacgactaatcgtatgatatttcttcaaaaaaaaagttgcatggatattattggacaaattatataatgttagaatcatacacagttgaaactacattttaggacccgggtttacgatcaaacctagggacaattcaaattgtagaataaagtaaacgcattattagcgactttaaatatatagaaaagtgcaaaataaataggaggggcaagatcaataaaacttcttctataaatagagctgcatgggggaagacactttatcacatccaaaaccaaaagcaacacaaacacacacaccaaaaaaaaaaaaaaaagcatttacttttaactcaagcatggcaatgttaaagaacaaacacatgaccgtctcattgatcttggtgtgtctcgttgtggtgtctccaatggctgaggctcagcttggtcttggtggtagtggtggtcttggtggtcttattgggggtcttgttgggggtctcggtggtctggttggtggtcttgtagggggtattctcaatctcgtcaatatcaatggggttgtcttttgctctctcaatggtgctcccagtggcacttccactcctgctttcgctagtaagctttccattcttctactttcacctttgatcaatcatgcaaaaccagcccaacaaaaattgcttaggttctgttaaccaggcgggttttgttgtagattatgtcaaatatacaatcgtacaaatgatattatacaaaacaattgcttagaattctaaaaatgcacgaatttttttcttctattgttcctacacactcaaagttataaattcaaatggaagtatgagttaacctacagatacggactaagataaagattcacgaaataattaatatacagtttaataaatttctcaacgtatatatatatttactaattctaatactgcaaaccaacagatgcaggagttgagctccagtgcggaaggcaaaacagggtcgtttcaacagcgaccacgaatgctgccggattattctcgcttcctacggactcaattcagatgttactttccacacttctctctgattgtcgggtcgtcgtcacgacccctctctccacctgcaacgccaacctcccttccgttggcaacctcgtctcacggttagccatgatcggcaatagtctcaccggcctcctcaacatcatcagtatcatccctgccggctttggtcttcttaactgattccacactctatacatactctatgttcggttacagtgtgtttcccttttgttatatgttttgtaatcatgaccatttacgtttgcttgcgtatgcatgaataaggtctatatagggcttatgtctcaatcttcaatgtcttctgttgtcactttctttttccagggtttgcatgtctaatgcttttgttatatgatacaaacaatttccctttccaaatatatatgtcaattgcattaaatgaatggttggggtgagtgtacatgccaagaagtaaatgtcaacagaatatatgcaatgattattgagtgaacaacatgcattctatttaagtccatagactgatacaaatatatatatactaaacaacatagtctagttttgctccgattgatgtaaataacaaaaattctagctcccttttctttttaggatttagtttgcctaatgtgtaattggattagcttattaattaaaaaaaaagtatataatttgtaaacgataaatattaaacgctcaaaatacaatgattctttaaatttaaattttgaaactcttgcagaccaacttgacgcgccaagtctcacctccgtcttcactactgtccgcggttagtttttttgtgaactgacgtcaaaatctaacctcgtcggttgaagttagagccttctactaaattcagaactagaaagtctataatgaattttagcagagtagtaacaagaatatcttcgactttgaattaagaatctcaccccatttactttgcttcatgggatgagattcactagtataaagatgctttctcttgaaatctctcggagtctctgacaacaaaacttactaggaggttctctcttttgaatcccatccggataaactacacgttattcctctgagttgtctcattgtagctcatacgacttgttgttgtaaaggtttaaaaaagggcttggaaagtcctacgtgacgccatgcatggtgggtacagtaactatgacagtgatcttacatctttagacagaactcacagaagtgaccattacatagagaaaatgtggaaggagctagagagcttggacctgttttacaagtttagatgtctgttgtttcctctgggcaagaaacattggttttaaactgtagaagtttggaaaccggatgcttcgatggtggctggtgtttcccttcttcttcctaattccttggtctttgaagacccgcctttgggttgatttggttatataagaattaatttggatacattttaaacccccaaagaagagaagttttagatacatgcaatattcaaaatggtgagtattcttggtttttaattgaaacaaacatgttgatcataaaataaaattttgaaacaaacatcaaaaattcaaaagtatgaaacaccacctagctaattggcgagttttaggtatatgaactccttaatgtaatagtgtaggtatttaaaatgaaataaaataaaaagttgtaagaaaatttactgggctagttaggaatataatttctccttgagcccaagaatatttgtttgggctgatacaatgtaaaagatagggatccaaagagaatgagactacatggctgcatgagtagacgagatttgatttgggccaataacgggaatatcaagaagttgtaaacattgttacagacattattatccctgaatgttgcagtgaatctgtttcaaaatctatgagttcatgttcttcttcaatagctaggtcgactcgaaataattcataaaaacatttaaaatagaatcatgagtattatgcactatgtaactccggatcctttctatttttatggaatatttagatatggagtttttataaattaaaattgggaaacaaatattttgttaatactatatcaattgctggaaaagataaagctaaaactccgtttaattaaagacaaaataattgaataaatcatcattttctcgtattagtgcaaatctaaaaacctattagtttataaacatagaaaatctacaaaacgaaaaaaaaatatcatcgttgttatatttttttctataaaattagactaattaaacaaaatagagaaaaaagcatttcagtcattttataaaagaaaataaataaatataatgatgtgatactaattaataatttgactaattgttaaacttacactcgatcaatataagttttagccaaattgcattagttgatgcatgaactttacgaatattcgttgtatgtaaagatttgcacaacaatatagtatagattttatatttggatcgtaaccgtgtggcatagtaatatgactgtttttcttattggtggcgaatttcagttttcatgtaattaaactttggaacgtatggtgtaagcttccaaaacaattgattaaaattacaagagcccatgaagatcgaaatcactcttctccaatagccaaagcaaacgcctagaaaaataccctgcaaaattcaacaaaagtcgaaagaaaataagatactaagaatgaataacttaagtaagcatgacatgaattcaacaatgccaacacgtctgcttctatatttcagagaaatcttaatctggcctcaccactagaagcgacaacgaattcagaaatacacaattttcaccatttacttgagtttctaagttactacttactagttactactattaaaagttattgcgaaaagtttacctatagggcaacttgatcgagatacgactaatatatacaacttgatcaaagtcgaataatataaaaagatcccatggaccaatctgttacataagatggctgctgaattttttctttatccagagtctacttatttaaggttgatttgttttatatataagaaaatacataaggaggaaaaagggcatcaaaactatagtccaattgtttgatggagtattggtttcactgtatctttttcttgaacaaaaacttttaaaatgcatttgaagataaaattatattagtccaatatcgcgtctttctttctcaagccgtctctttaaccatcttgtgtcttgcgggttcgagctcttataagtgcatcaaacaaatttctttaagatttaacctcaaaatttatcattctactatgtctttttttagcattttcctattaatagtaaatagtactgaaactatataaaaaacatttggagacaatataaatagaaacggaaaacggcaaatgattaaaaatttaattacaagtacggtatggataattcttcaagttatcgattattgtatgtttattttggtatttgaacttcaagatatcttggtgaaataatatggaagacatcattgttttacctaatatatataattaattgtcttcaatgatataaattatatataatgtgtaggggaaaataacataaaatagaatgattgcacaccattgaaattacatcctaggatccgggttcactactaaaccctatggacgttttcacttaagtatataaaaacaataaggtgtataaaaaaagtaaacgaatcatctaaagatataactagagcaaagtaaataggaggggagatatctataaaacttgttctataaatagagctgcataagacagtactttatcacatccaaacccaaagcaacacaaacaaatatttgctatctactctatagtttcatatacaagtaatccaaaaaagatggcagttatcaagaaacacataaccttctcattggtcttgttgtgtctcattgtggtgtctccaatggctaacgctcagagtggtcttggtggtatcaatgtccccattatcaatggggttctcttttgcaccatcaatggcgcccctctcaatggcactccggccccggctttcgctagttagttgtccattcttaacctatactatatatacgaactaataaaaagattcacgaaatcatatttatcttaatgacgaatattcacaaaaagataatatttatgatctctttgttgacatactaatttaatggtgcaaataacagatgcggtcgtccagctccagtgtggaaacctaaacagagtcgtagcagaaacaattacgaacattgccggattattcacgttttctacaaacggaattcagatatcccttcccacactcctcaacgattgtcgtatcgtcgtcccaacccctcgctccagctgcgacgccaccctcccttccaccggacaactgatctcccagttaaatctcgtcggcagtatcgtctccggcctcctcaacatagtcgctatcctcccaaccggttttatccccacaatctaactaaaaccaaactataagcataattaatgttcggttacagtgtgtttcccttctctatatatgttttgtgtcatgaccatttacgtttgtttgcgtatgcatgaataaggtcaagtttctgtctctgtctttgaaataaagctcttgtaaaacttctgtttccagggtcttgcatgcatgtatagtgctgtaatgaaatgtaacaaataatttccctttctatccctagctatatatatatatatatatatataaatatatatattttttggtaaactgttaagtaagcgtccaatatatatttgcttttatttcacctttatttttattttacatcgagtttatcgagtttcgtatttattacacaagtaggaggaaaaaataaggacaagtttaattagtgatgtagcgtctatcttcctatttccttttacgtcttttccttttcaagttcgtctttgtttttgggctttcgtttttgttattaggttttctttaaactgtgtcggctatttgttgctttagcctcaagtttcaacaagggatttattcttaagttcgtataagtactcttaaacttgtaagagatacggtggttgttttgaataagaaaacagagaagcttttctctatctcaagtctttgaattctcctcttctcttgatctattgatactcgagaatactgagaactcttagctacggttgctaattccgtgatccatcgatactcggagtttctaacgtatttaccgctgtattaattagctagacttcaaaccgacattaactgtgttaagaaaaaaaaactgtaagtaatgcttttcgcagccgctttagagacatccctatctccttcgctaatttgcacacttcgtacgggcttctctcctctctctcttagatcctttcgttttctatcctaaattccaacagtattaatcctcatcacttttatggattttaatctccttgttgtttctgtaaattatcgactctttcttgtttattgattaccctatgtactagtgttgggaaataattaattaatctcctaatgatgtggatattaatttgatcttctcttctgctgtatttaagaaacctttttacgtttatatctttttttaaaagctgaattgcttattcattatcctctgaataataacaatatagctgacagtaattaacaaagcagtgtaatcggtgaaactatggctctaatggacgaagagatcaaacgactgttcctagtccagaggacattgatgcagatgctgaaggatcgtggctacttaatcgacggttctgaaattacaatgaccctagaagagtttattgagaaatatggcgacaatatgaaaaggagtctcttgttactctcaaagctaagaaaaatgatgacaatgataaggtaatgtataattaagtatgatgtctctcaatgtatttatacctataagaagatatggtttgcattgtataaaactgctaaaacgcgtaatttcgtgtgtttgatctcgtcttgagttgttttgtagctttatattttcttccccaatgcttccaaagttggaattacggagatgaagaaatacatagaccagttaaaatcggcaaacgttttcagagcaattttagtggtgcaagatataaaggcattttctcgccaggctctggtttttttaggtgcggtctatccaatatttcatattgaagttttccaggtaactaaaaaaacaaaacacattttgatttttgttctcttgatcatcacaaaagcctaaaccatgattgagtactgttggttcaggagaaggaattgatagtgaacgttaaggaacatgtttttgttcctgagcatcaagctcttactactgaagagaagcaaaagtttctagagagaaagagaaccaggtttgtagtttttttgcacatagaaataaagtattgttattagttttgggtgattaaagatttggaacctgttggtgttgttagcttccaaggattcacgtgactgatccaattgcgagatactttggactaaaacgtggcgaagtcgtcaagatctctcgactgagtgaaacatctggtcgttatattacttatcgctatgttatataaccaaaaccgttgacaatgatttatttatgaccttgtttgggaggcgttataatgatgtatgcatgattcaggcctagcattattccaataatggtcatatatctcgattaagaaaacatagtgtgaccaaaaagtaatcattgaataatgtttgcaatgtaaacttaaaactgtcatatccggagagaaaaaaaaaaagaaaagagaatttttttaatagctaggacacagtcaaaaaccaatactcaaccgaaaaaagaatcgaatatttattttgtttgtcaggataaattattttagaaattttgatgggtaaaagacgaggttaagcgaggagaggttgatttggtatgaggccttcttcatcttctacaattggttcggcatttctgtaataggcataaattaggagttgcattatcccaagaaagaatcccattccatttggcacctacacacacaaaatacaaattcgtttaaatattatgataaaaacaaaaaaaatctcgctttctttttaaaaacatttgataccaaaatgatacttactagtagaaacatatcgtgtaggagtaaagcgtagacaccccaaatcgcgccgttcagaaagaggaaaaatgacaaccaaaatggcataaactgcacacttctcgtcgtcacaaccgttttctgatatgatcaaaatgaattagataaacgcgtatacatcgaaatgaccatctaatagtgataatagatacaatgacattgatatttttttggataaaaacatgctgaaaaacactctccatacaatttctgtctcttttagtggtggttggtttacttattgctgaaaggaaatataacatttataatatataacagcccaagaccggtccatggtagcttaatgaagcaacgtccttgggccctcagtttaaatacaaaaccaataggctcatttagaagtttagtcgtttagtatgcaataattaatatttgcatatattgtaagagaaatgaataagctattttaaatttagttttctacgacaaccagccacaaaccttttgaaagcaagcaaagtagagttattggtatagcgtatatattattgtccttcgtagcaagtgtgtataagatattaagatagtgtgataaagagaaaaaagagagacttacaatagctgaaagaggagaaccatacatgataatgttgagagtagcacatatgaaacccattgaactagaacgcgagtttgcatctccaaacagagttcttgttcccgcaatcgcgataactgggaaacacacgttcaaagctagaaccacaacaactgttttcaactgaaaaataaaattgaaatcagaaatcaattagtttcaaatgaaacgcgttcaagctaagtattctagtctaatttatactattatagtattatatagcaagtagacataatctaaactaacttattgattaaacgtcataattaaaatctgctaatcagatctgaatctgagtcaccaatgttatctctaatataaatgatctggggccatcaattaaaaatgcatattcaaacaaatttttatatcatatcaatataatatatcatataaaaacacataataaaatctcactatcacatataatgcaaactgaaactatatatataatatgtataggtggaaagaaaacttacgaatctggatttggggacaaagaagaggaaaatgagaacgtagatggattcagcaagagcaccaaagccattgacagtagaaaccaagtattcaccaggtgtcactattccgtaatatgtccataacgacgagctcattaacgtgcaaatgtacggaaaacactcgtattcctccgtcgatctccgctgcactatcctccaaaacgtctccctaattatcattttaatgtttaacttaatttccccatttcttatagttcaatcaaatgttacaaattaatcaagatcatatgtagaaagagagagttaactcacacaggggagaggaagacaagcaccgatataacattccctgcaacgatcatatatataaaaataactcattttatagtataagttacataactttgtgggtatatgaaatatgtagatgataataaacacgtgcaaataaaatggtcatgttacctatgactccgacataaaaactcaagtctgccatctctgaggatgggtttctgaggaaagtagatagagaaagacttgaaataggatgagagagatagcaaattataaggacgctactttgtgtttgtccggtccacatatcgaaagacaaatatatatatgtgatttaattttggtaaaatattaatgaaatataaattctctttcaagacagcaaaatgaacagaacattaatgctagactaaaagagctcgtgtagcatgtgaatatttgattaggatgaaagtcgcgtcgtgcatagcttgttctcacttttcaggttgaataattctttttcttcttttgttcttaatttttaatgacctattggaattgaaaacagtgatttaataaagatttgaacagttgtagtatcacgagaacataattaacggacatcgaccggtaatgtgaactccactcttagaaaacttaaataaattaaactcatattaagaaaaaaaaacagcttgaactaaaataacacatacctctgacttcatgcttgaacatgtatatagtaatatatcaataagagacattattttgctaatcctaaacttaaaaaaaaaaatcaaagttaaacagaaataatagacatagaaattagatggataattctaaataaaataccacattttatggtttgttttctaaaactactagtatgatccaaaaactccaaaaatactataaagtttaagcttaagaatgagtataagagaggttcacaaaaaaaaaaaaagattcctacaggaaaaaaaaaatctaaaatagtaatcttgattggtgatatagaactatcaagtttctctatatggttagatcaaattttcgagacttgatccttaacatgttttcacaagttttggttatttgataattgctaatgtgagtcatgtagaaaaagttaaactctacatacatatgccctcatgccccttctatgtggtgattagcaaaatgttaattttttaattttaggcttaagtaatcagttttattgaaaatccacgtcatggtatcctactgtctaaaattcgtgaaacacgcggttgctaaattatttgcaataggtccaaatagtttaagtagttttccagttttggccagtaactttcaaagctttattttatgaccctttggctttgtccaaccggcctcgctagaaacccttccatttccatagttgcattatatgggccaataatgggccatatatctcgattatgaaaacataagtttcggaccaaatagttttaatcactgaatgttgtaatgttgtaatcactgaactcggtaagtaactcagtcaacaacaaatcttaaagagagaaaaagaagagtctttgtgattgttgacttgattgacataaaaatggcgacttcgatgattcagagattgttcaaacaaggcacaaagatcgtcggcgttggactcaattacgcttctcacgccaaagaacttggcaatgccctcccaaaggtaccaactttacttctatcttcttcacattcttttgttttcgaaagttgccgcgtcaattgaatcaggatcgttgatttgtaagaacacaaatgggtctcgatttaaaccctctgtctgtgtttgtgttgtgatttgctggaagtaggacccgattgtgttcttaaagccaacttcgtcgtacctggaaaacggtggaacaatagagatcccacatccactggattcacttcaccatgaggtggaacttgctgtagtaattggacagaaagcaagagatgtcccagaacggttagccatgaattacattggaggtatttttactagcctgcttcattttcttacaagtaacatcaaggatatgagatcgtagaataatgtgaacctttttgtatgtgatgttagttgtgttgtggtatgtagtcttttatgttagatagcgataagccaatgtttgtgagtttgttcttcatcttagtctttatatccctttttaatatgtaaggtgttcttgttttctaggatatgcgcttgctcttgatatgactgctagggaactccaagtttctgccatggtagagaaccacttgtctttgttatcaatggatttgtatgggtttgtacatatacatagttcccactaataataatcttagtgcatgctcgagctttgccatttactaattgatctgtcctgtgtcctttacggtctttataagctcgtaagccataatttggttgagtttcccctgtgggattatatcatatgtttgccaattgattccatgtttctatccatactttcctgtaaacagaaatcttaaatttgtgttgtgttttcatcaatgttttaatgcaattttttacttaagcatatatcatcatggggtgtttaaattctcgtcttcaggcatctggtctcccatgtacgcttgctaaaggacaggataccttcacccccatcagctccgttgtaagtcatgatctgacgcctgtttctcaaaatgctagtttcaccaaaccatgtgacgattagcattatagtttatgggaaatgtgttacgttgaatggatccaattattacgcttgtccgggatcacagtatacgcagctaaggtcatatagcagattgcttagtgttattgcgtccactgggatttatgtattactgagactggaatgcttgtcgtcaccagttgatatataaatatgcgtaacaaacatagcccattagctactgatagcaaacacactcttagcctcttatattaattttggtttgttttatcttgttatagctaccaaaggcaatggtgctggatcccaataacctggaactctggctaaaggtttggcttctcatgctctcttgtcataagctacgctgttcccttttagaatctcccataacaggtagatgatgagacaagacagaaaggttggacaaaggatatgatcttcaaggtcccatatctcatcagctacataagttctgtaatgacccttttcaaaggagatgtcatattgacaggtaaaatatttgttttcccatatattttgattagtctatagctgagataacattcaagatagtattgttaaaataaagttggtgaaatgtgtgtatataggtacaccagaaggtataggacctgtaaagataggtcagaagataaccgccggaatcaccggtctttctgaagttcagttcgacgtcggtaggcggctaaagccattgttgagatagtattttgtgaatcatttgttgtataaacttcattcataagagcatttttacttaatttctcttgctgacctttttgtaatgatacatgtttaagattcttcaatcaaaatataatctccacattaagcagagtttaagtatctaattgaattaatacaaattttataattaattaaacgattacaagtctacgcggcgagactcatgttcgtatctccgtcgctgttcttccacaagtatacgagagaagttaggttttcgtcttcttcaagctcacctccaccatttctctgctcttcttgttgtatagagttcgaattgcgcagtgaaatgactcagaagacatagattgtgaatgcgtagatccattgcgactgggtttgcgtcgatagtgaagggatttcatcttcatagtcatagacatcgtctacagataagtaaccctagaactgctgcttccttaagcctttgtggtttctgtttctggattcgagctttttctagttaccgaaagattttgagaaacggtcttcacaatcttcagtttaatgatgctcttgatttgttcactcgtatggttcactctcgtccccttccttcaattatcgatttcactagattattgagtgttattgcaaagatgaatagatatgatgttgtgatttctctctttgagcaaatgcaaatcctggggattccacctcttctttgtacttgcaatatcgttatgcattgtgtttgtctatcttctcagccttgtcgtgcttcgtgctttcttgggaagatgatgaaacttggttttgagcctgacttagtcacgtttacttctctgcttaatggttactgtcattggaatagaattgaggatgctatagctctgtttgatcagattttgggaatgggatttaaacctaatgttgtgacatacaccacattgattcgctgtctttgtaaaaaccgacatttgaatcacgcggtggagctttttaaccagatggggactaatgggagtagaccgaatgttgttacctacaacgctcttgttaccggtctttgcgagattggtagatggggtgatgctgcttggcttctgagggatatgatgaagaggagaattgaacctaatgtaatcactttcactgcgttgatcgatgcgtttgtgaaagtggggaagcttatggaggctaaagaactgtacaatgtgatgatccaaatgtctgtgtatcctgatgttttcacttacggttcactgatcaatgggctttgcatgtatggtctcttagatgaggctaggcaaatgttttatttgatggaaaggaatggttgctacccgaatgaagtgatttatactactctcatacatggattttgcaagtctaaaagggtagaggacgggatgaaaatcttctatgagatgtcgcagaaaggagtagttgcaaacacaatcacttacaccgttcttatccagggttattgtctagtgggcagacctgatgttgcccaagaagttttcaatcagatgagttctcgtcgtgcgcctccagatattaggacatacaacgttttgttagatggtctttgttgtaatgggaaagtagagaaggcattgatgatattcgaatacatgcggaagagagagatggatattaatattgttacatataccatcattattcaagggatgtgcaagcttggtaaggtggaagatgcttttgatttattttgtagccttttctccaaaggaatgaagcctaatgttataacctacaccacaatgatatcgggattttgtaggcgaggcttaattcatgaagctgattcgctgtttaagaaaatgaaagaagatgggttcttaccaaatgaaagtgtgtacaagtaggtgccagcgtaagcagaactcatgaggagttaaggttacttcgatgcttttgatctcaaacatatgacgacagtacagctgcagtttggggagaggaaacacaggttataatacatgttgcatattaggaaacttatatattgcattggataactgaaattttaacctccactctcttgttgtaaatggtaaatttgcaggtgcaacaaagagtgttgccatacctcgtcagctacataggttccgtaatgattcatttacaaggagatgtcattttgacaggtatttgtttgttgttgaagattctttccatcgttgagattccgcattgaaccagagttgtagattagattactgaagtcgaacatagtattcttaagaaagctgttgaatgtatagatagaagacctgtaatgattggttaggcggtattgcccttgttcagttcgatctatgtaggcgtctaaagccattgtgcgaaatagtgttgaactatcgttctggactatactgatacaaaagagttatactacaaaacagtgcaactggaacgagatatatgtaacatagaataatcattttataccagttgaggaaacattgtacttaattataactgggaatgtctaaaggtaacttatgaacttctatcgacggcacagtggtcagattaacttccaccgaacaagttttggattcggaaaaaacaatttgaactgtggacgacaagcacgagccaagtgatatttatttatttattttaccgactaaaaaaatctttgtagtaatttaaaattttcaatgcagaaaatattatgctaaattaaagtgaatatttgatactaactagttgacccgcaaatataatcttaactttatcatattgttgtgatactatttacatatcaaagtattaaatcccattttccctgtaatgagtatctatttatccctttatcataaaataataatccaaaatacgtgctctcttaatttatagaaaaataaaagttaataactatttagaaccttatggtaaaaaaaaatacaagtaaaagtatatctctaagcattttccctttgaaattttcaaactaattaaatagttaccaaaacaaaaagaagaagggcagaatagtcaaaagagaaaactcgcgcgtcaacgttggcgtcgtcttgccaaactttgccaataataataattagacttctgcactttctcacgaacctctctgtctcgtccattacttaaaaaccaaatctttcatcatcttccttcaccagttgactctctttcaatctatctctgaatctctcactctcctacccgaaaaccatgaactccaacgaccaggatccgattccgttcagacccgaagacaacaacttctccggttccaaaacctacgccatgagcggcaaaatcatgctaagtgcaatagtaatcctcttcttcgtcgtcattttaatggtcttcctccatctttacgctcgttggtatctcctccgtgctcgtagacgtcatctccgtcgtcgtagccgtaaccgtcgcgctacgatggttttcttcaccgctgatccttccaccgccgcaacttccgtcgtcgcttcacgtggacttgatccaaacgttattaaatctcttcctgttttcactttctccgacgagactcataaagatccgatcgaatgcgccgtttgtttatcggaattcgaagagagcgagacgggtcgggttttgcccaattgtcaacatacttttcatgttgattgtattgatatgtggtttcattctcattccacttgtcctctttgtcgatctctcgttgagtctctcgccgggattgaatcaacggcggcggcgagggagagggaagttgtgattgcggttgattctgatccggttttggtaattgaaccgagttctagctctggattgacggatgaaccacatggatctggatcttctcagatgctgagggaagattccgggagaaaaccggcggcgattgaggttccgaggaggacttttagcgagtttgaagatgagttgactcggagagactcgccggcgagtcagtcgtttaggtctccgatgagtcggatgttatctttcactcggatgttgagtagagatagaagaagcgcttcgtctcctatcgccggagctccgccgctatcgccgacgttaagctgccggatacagatgaccgagtcagatatcgaacggggaggagaagagagtaggtgacttgtcacgtgttggtgtctgattggtttaatgttaaccgggagtaaaaaaaggaattactacaagtcaacaggcttttgtctaggtgttgatttcggcgcccaaggacacgtggcgtaaactgagcttccaggaatcaatattcaccgtctattatgattagataggttagatagatttgtgtaacgatgtacaaagtcatctacaatattgaatctatttccatttattttaccatattctttttttttttataattttcgaagttctacaaactcttttatgtaaaacacaatccaatggtcataattgtgataaagactttgcataatttttcctttatttattaccgatttaatgtcttcactcttcactacttaattatgaacacaattcgttatttccctaacattaaacaagaatcgaacgtaaacacaattcacatattttattgcaagcattcttagtaatagtagtgatctaacgtaatgtgtcatcatgtttgatcggacagtctataatttgtctgataaattaagataaacatgcaacacaataagtagttgccaacgattccatgtgactccgtgctcaacacgactgcgacttccgagttttgactcttttagttctatcttattctttcacttcaaatctatatcattattcttttaagctttttgtccattcaattgtgtgctctgtttgatatataaaatgtattgaaatatcactctttctttctacgcgttagtggaccaagtcttatgcttcctaaccacaccacaacgtgatatactgatattttaagataccaactaattcttttttttttttttggcaaagtgataccaactaattcatgtatccaaatccaacaaaatgaagtaacaagttaccaactcgcactatctccaactccaatcatcaatttgttttatcatttgaaaaaaaaaacagaattttctgttaagacgtatgcgtgaacaatctcagtttttgatacaattttgaagacaaaaaaaatactatacataacccactagttacttaaaagttggtaaagctacatagaacgacgtcaaggaagggcaatttaggtagatgcatatgttgctaactcatacaagtagaagacaaaaatatcaagagagtacactttccaggaactttccattgtcaattagatgacgcaaaaagtcttttgttgatttcccaaagtcccaaaagtccaaaaacagtgtcgaaaaaaggaattaacatgtagatacagtcttagacttatttggaatgttcttgctttttatacttttatatgcaacgttttatgtttcttctttttttgtaccatgtatctacatttatctctatccttctttcttcaaaattattttcttcctgaaaattacttttcataagtccataaaagagtgatagagtaatgaaaataaatggacaagtggacaaatattagaaaagttgaaattgacataagataataagatagttagtggatgcaatcaaataagttgaaatggatcgaacaaggcagctacatacataacaatatgtggaatgacatcatatgaacaaaatattgtcaagttctcggttctcttaagataaagaagatcactttatgaacaattcaaaatttccacaagcactctttctaatatgttaaaagaccctctaaagtggaatttttcattgttattacaacatatgctacttcttctggcaatgccttcattataacttacacaaatgacagttacagagtttcataactgactgattaaaatcccatacctaactacacaatctaatttgagtagtcacaatttccccaaagatttttcgattgaagcaacttcagttacctcagttacatcgtcagatcgacctttccgtctcttcttactgtttggtgtgcatcttacaccaacaccgttgatctttgagatctttagcgagactttccgagtctggcttgagacagaacatgtgtttcgcttcttaggtggtggtgactcgtgagatttgcctttggttattggggacttagctcgtttttggggtaaatgtatccctcttttctcattcttcctgttatgaactttgagcaaccgaacactgaacggtttaaccgctgtataacacattggttcgtttgtggagttcccaggtttttccagatcaacgtctccattgttcacctgtgcaaatcataattttaaatgttgagctcttgttttattaacagaaataattgttttcctctgtgacttaccaactggagaagcgcagagaaggcccgagctacctcgtgcttttcttggtctttcataagatcagtaaaggtctcgacgtttccgctctcttcaacagtcagtttgttaataatcctatctccatattcttgaatgtcgaaaggagggtgtagctcctgaccatagaaaaacaaataccagtggatatatagacaatgcatgagttctctgacttcaagtaaatggtcacagaaactaggagaaagaatattacttgttcttctaggttttgctcaattttctgtttccacgttgaaacacgagcagccagatctgtttgcttctcacttttagctatgttagcgagaagagcatcctacaatataaagaaccaaacatttgagcttccataagaatatagagcaaaaacctaatgcggtctactgaaaattggaacaactgtacttccaacgtataaaatcaaaccaatggtagttaccaggtgtgagcggcagagatcttccaagctttcttgacaatttgattcgccgttttcaaatccatcgtagttgtgaaactcggcagctccaccatcattctgcattcaaattcaaatgagcggataagggtttcacatatttcgaccaaaatagatcaattagtgaaactactcaccatattgagaacatcttcatccatgaacggatgttctgcatcatcaccatcatgctccccaaaatcatggaagtcgccattattggcttcatcatggttatccttgtcattgtcattgtaattgccgttagcaccacaaggttggtttcctccattcacaagcatctctcgaagctgacatccaaactatcagtttttttggtttgttgcatttcaatattctataaaaggtatagagaaacacagaccttctcgtaataagggatgtcttgtgatgcttgctcgtctttactagcacaaccgtgcattttccaaatttcaataagctctgaactgatgggaccgtttggtctagcgagagggaacatggaagtcatatggtccttggtaatgctccatccaatcttttttaaaatttttactgctcatggaataaagtagaacatgaactagaagtaagatgcaaatcgaaagatatagcttcagatattaatcaagaaaacaatagccatttcccaaccttttttgaaaggcttcactttcaacttccctggttcatagggattcaatggcttccacggatcatcttcgtcagcatctgtatcactaaaatccatggctcctccatattcattatccatgtcaaaaccatgatcattgtcttcaaaaacaggaggctgagacccttggtcacaattttgatcattgggaccattcccacatattggggacaagtggacattggtgccctgattctttcccacagatgacttacgagcacttcctccagaacgtccaacagatgagtgaaagcttttacgaactgagctgcctctgtgggcactgttccttcctttaccaccatagttatcacctaaaaattcattcaccgctacagcatcacatgggtctaatagtataaaatcccggtagagatgtgtagttgccaactgcaagagatgaaagttaaaacggagttcaagccccaagctctttctgtttttcatactctaagaagtggaaaaacatgctataccagataggattccaattctcctccgtcaccactagtatccaaacagtcaccttcaagaacaactagattcgctggaggcttgacaaattgacttggacaagtatctccgccaaccgaactgtccaatctattctttgtgtccactatattatcaacaatagctggattagaaatctgctctctagagtggcacaaagataaaatgtcaaatttcagaaatttctctacctgggatgtcatctacattccagaagagatcattttcttcttcatcaacctgacgtgaggagcttgcctcattctcatttgatgtacctttagactgttcctggtctctgttagcaagaacaattgactaatcagagaacctttctccaagaattgcttaaggaaaaggaagcaaatttccaagtgagtaacaactagcaaggtgaccaaaactaaaatttatatgaaatcagaaagtgacagctttaaacacagcaccaaaataggaaaaagatacgttttttagattcaaccatggtataaattttcttcatttgtgaacacaaaacaaaacccatccacatagaaatagatggaatcaaagttagcccctaaaccctgagatgcttggagtatctaacacaagtactaatgttattattcttgttcaatttcactaaggaaaaaacagggaatctaaaaggacaaacctttgcttcgatagaaactccaacgtacgtagaactaaattatacaagtactcaactttcttgctgtaaacctgaaccgaaccctgaagcagcaaagcagctacaacaaaaatcgaaacccaattcttaattacccaaaaaatgaaatagcttgacatcaaacgagaaagttctgaaattgaagcaaaacccacacagaccttcagcgaaattcacaggaatttgcccatcttcttcatttccagtgatttctccggaacaaattttgaggaggtactcttctagcttctccgacaaatcaacttcccaattagccaccaaatccctctccggctgtactgtatgaatcctctcgccgcggacttccccgccaccgtgactggtcattctcggtgaagactcacggaatttaagcttctatatggagagattggataattcatatccctaatcccaaacccccaaaaagaaaaagctgaaaccctaaaaactctgaattgggattccaactataaagagaaatttcaatagaaatatctgattttgtggtgaaatttgagaaatttttctgggagacgaagggattgtgcgatgtaacacgaagatttcaagtgattagtgaagatagaaaggaactgtgagagagagagagagattgagagttttgggaaagagagatacgaattattttgacttctctagattttcccgcttctcatcaaatgcaaatagtgttactattgggcctaattaatttgggctgtattgagactttaacaggccttggacccattactaataagtcaaaaacttattaccaatcaaaccccacttatgtgggtacttttggtcggatgcggaagtatccgtcctgatgatgatgaagccagatagattttttctttttcagatggagtaaattaacacagtcgggaagcaatcggtggaaaaggaaacagctttggaaggttgattccattacagattcgattcgaaactatggttcagatttccgatcttccacgggatttgacagaggaggtgctctctaggattccggtgacatctatgagagcagtgagatttacttgcaaaaagtggaacaccttatcgaaagatcggagctttacaaagaagcacctgcgtggagcaagagcagcagcaaagaagaagcagacgaaggagtttcaggtgatcatgatgattcaatttagggtttatttatacagcgtcaacctccttaatccatcaatagagcgtataggtaaacttattagcctagacgttgaagatcatgtcgacatatctaaaatctttcactgcggcggtttattgttatgtatcaccaaagacatatctaggcttgtggtttggaacccttattctgggcaaacaaggtggatcaaacctagaaattcttaccacagattggacaggtacgctttaggatacgaagagaagaacaagtcgtgtcgttgctacaaaatcttgagatttatggatgattacgaggatgacagggcactgcgcctaattcgtgagtttgaaatctacgacttaaactctgattcatggaaggttgttaatgtcactcccgactgggatgtagagttttatcaccgtggcctgtctctcaaggggaatacttactggtttgctcaagagaagcttccaccattaccacgcggaagagtgataacaatatcagatatggctgatttcttactctgttttgattttacaagggagagatttggaccgcgcctgcctctgcctttccactcttttgttgaagatactgtgactctatccagtgttagagataagaaacttgcagtgttatttcagccatgtagtgcatctaccgtgaagatatggattagtcgcaagattgagcccaatgcagtgtcgtggaggaaggttttcttagcggttgatatgaaatcactcactggttttcagtttgacattaacgctgcaagtttctttgttgacgagaagaaaaaggtcgccatggttctggataaagacaggttcagttataaatttactcgcaacatagcttacatcattgggaagaaggggtacttcgaaaaagtggatcttggagaatctacagtttcaagttgtgcctcacttgtgtgctcttacgttccaagctcagtgcaaatctagcaagcttcaccacgaggcaaccaatcgattcaattgttttcttttcttatgtatctgatttgtcttggagattttttatctttgtctagttgttgtgcccagaactctaagttccgccacatagtttttccagactaataacttgttagaggacagagctaagcatacctgacctgaacacaaaattataggggaatgaaattggtttctacctctgcatgtctcaccatgaaaagctcatcatcgtagatcatcaggtctgctttagctgagggatggacttgtgttttgctggtatgacatgtttgaacattaatttggagataacccttgtgtgacatggcctggaaagggttattattaaaaagccaacttggtaaaaatgaaaagagtttttacatctccaaattcaactctttacttgcaagaaaaaaatctgttggtcaagatggaatctttcccttcacttttggaataccggatgcacaaaaagtcaaaaaccattagcatgagcttctatattatcatctccggcagattcatcatcactactgtgactctcatcatcactactgccgtcatcatcattactactgccgtcatcatcactagagtcattatcactgttgccaagattttgcgagtcttcagtgtcctcaccactgttgtgaccgtaatcattgtcgtcactcatatgatagcgtctgtagtgtaccacccggtacgtcccatagctacattaacacaagtaagtcaacaaacgttcactaaaacaatttaatgaaacaaaaaagaaaagaaagaaaagatattacttacagttgttcacatttgtagactcgtctttcataggtgctgctgactccctcgttaatgggaactaaaaagcactggtcaactctataccgtatgtcgaagtctccatgcattttgttaaaattggttaagtcccagactgtagtatctagcacatcttgctcatcaacatcaaaaagaaataacccttcttcagggaatgggacgggtacagtagaggtaagtaaatcttcacgtttgccgagtatgttccttaaatcctcatggtccaaccactctgttctggagcgtatcaagacatcctcaagatctgaagaaattggcgagaaaagagagatagtaaggctattcagatatttacattcgcagacctcaagcttaatgatctcacattaaacaatcagctaattacagagatgtaaaacaaatcaaattacgggaaaaagaacagatccagcataatttccacacaacttgtcaaacaatgaaagaagaaaaggaagaagaacctggatcatctatcacgtcctgaagattattagccatgattccgacgtagcacgaaacctgattatatacgagccctgaacccgccaaactctgcacaagcccgaagaaaacagcgttaatgatcgtagaaattgattcacccgaaacttgaggatatctacacacagcatagcaaatacacaagttaccttgaagcaaacacgagggacttaatcgctgaaccccatggatctgtaacttctgcaattccgtcgccgattttagattctaaccgattagaacctcgattcaatgaatgaaatcgtcaattgaatactctctcctctctcaatctctctgtgaatcgatatgagaaaagaagaaacggaaaagaaactaaattcctctctactgtatctgtaacccaagaataccaaaggaaatagttaactcttaatcccatttctcacacaggcgctttatatatagaggtttaacactcgacgactctaaattgatttcagttacaaacggttggaataactaactaactctcggataagatttcttctcttctctgaacccagctgcttcagcttcaactaaacatctcgataacttgatattgaagaagaagaagacataaacgacgccgtcgcccttgtgttttggttttctccaattaacccttaaccagctcaatttccggtttactcattaaattcaaaccgagtctaattaaaccctgtttcacatcagcttcatatattatattttacccatattttaaactactttatctttttatatacaaatcaatgaaatttttttattcgtactttctcttttgtatatacaaacaaaagctttaaaaaaaaaaataccaattaaaattttactacaataactttctttttgcaaaacaattcactaaatgcgcacaaaaaaaaatgtaatggtaaaatttggggatgaattgaatgaaaacttaaaaaagaggggcatttttgtgaagttccattttgttttctccccttcgttggctctggagtctggacaacaacgctaaaggagaaatctctagatcgcttgtggattcgaagaatctctcacggtcggttcttgacgacggatcaagctctattcctctagtatcatctaatccatcgagcaattctcattttgatcttccgttttcatcatcttctggaatcaattttgctcttgttaaatctgaaagttctgaggataaaatcatgaattccaacttcgggaagagatcatccggatcgaccaatagctttgatttcgatctggggcttggatcgagccaaggtagacctctgaatggtcagaagagccaaacatcttcttattcgagctcgaattcgcagccgagacctgcgtggcagcctggtaagccgtcgtggacgcatcaacctgcaccgaagcagagtacgatccgatctgagatcggaagtggaccgacttcaatggtgggtgatattcatggtaagacgtgggggtcagcttcgggatcgggttcgggtattgggattgtgaataaggatcctagtttgtttggagatttggttggttctgcgataggtcaaggtaaatctagtagaaacgtgccgttgaagaatgcaccgcctgtttcggcttcaggttcgagtaagagtccttattctatggggaatttgggtgattcgttgcctaaatctggtaattcgatgaaaactggtggtggtatgggttatagcagtaatccgagtggtttttctggtggttacacgagctccggtggttttaatgctaatcttggaggtccttcaatgaaaaatatggctgggggcaatctaaatgggtctggtcttccttcgaatagtgatccatttggttctttggttggtttcggatcaaaatcatcaggaagcaaaccaggaaaggttaacaacaatgcacagaatgatacttttgggaattttcaaggagtgtcgaaccttaacagtggcggttctacgggaacaactactcaaatcaacgactttgggggtttccaggcttcgaaatcaaacacattctcatcaggaggtagcttcaatgcttcaaacgttgattttggtgtgcaaccaagtggtccacaatcttcgagtgcaaacgatgatccattaggaatgttctctaattccaaaccctcagctgcaccacctacgccacagaccgaagattggggatttgaaagttttgacggtggggctggttccaccaccgagcttgatggtttgccaccgcctccaccgggtgtatcagctacatcagctaagaacaagggcattgataaccagagacaaggtcagtatgctgatgccataaagtggctctcttgggctgtgattcttatggatagagctggtgatgaagctggatcagccgaggttctttcaacaagggcttcgtgttacaaagaagttggagagtataagaaagctgtagccgactgcacaaaggtatgttaagaaaggcacatttttctttggatgcatcatggaccatggttcatatcattctcatctcagatccttagtttacgaagtctctagttgtattggaatcagtttaaggactcttgatgaaattgatactgataagagttttcaggtatatgaaacttgacaatatgagatttaggttcttatggaatcttaagatagattacgagttagaaatactgtgcacgtatagaaagttttagtgtcttgctttgtaggaaaatataccacaactaaacagttcttgggatcgcgtcatcgtagctagttgattggttgttatgctccatagatggtttcttgtagactcagaacaaaaccaacatcttcgaaacttgttctgattgtcagttatgcttcacagatgttttttgttcactttgaaaacgtgattgcaggtacttgatcacgacaagaagaatgtgaccattctggttcaacgagcactgttatacgagagcatggagaaatacaaactcggagctgaagacctaaggatggttctaaagattgatcccgggaatagaatcgctagaagtactgttcaccgcctaaccaaaatggctggttgatccttcatatatacggatactactcaaagaaaaaaaacaaaaaaccctcaaatatctataatccttcacattgctttgctcaataccgtttcctctctcatccatggaccatgcgtgtgtgtattttttttctgagatttattggttcgtctataatgcggcagcttcttgtagtaagtgggtcatgagtgtatttttttggatggtgcatttatatgttgttgattttcttacacactaattttttttgagtttatcatgaaatgtttgatcatcgatgtcatatgaaatgccaaagatgaccgtaaatttcgcatcgtaactcgcaaagatgaaccttactttgagacgctgcctgcgtgatggacgtgagacgcataacgcatactattaaattaccagacgctcgtggacacaacacttcaataccgaaaactaaactaatcacattgtgatacgttttgtattcagagagccaaaaaaaggcttacaattttgtcgttatgtggattagccttcaatttgttgtaaccgtcatgtatcaaggaacataaaactattagaattattattctaatataaagtaattcatttcactcacactttattaccataaaacatttattttgcgcctataaaggcatttcagctccaccgtaggaaactttctcttgaaagaaacccacagcaacaaacagagaaaatgtgtggcggtgctattatttccgattatgcccctctcgtcaccaaggccaagggccgtaaactcacggctgaggaactctggtcagagctcgatgcttccgccgccgacgacttctggggtttctattccacctccaaactccatcccaccaaccaaggtatgtactctcctattaatcataaacaaaaatacaaaatcattcaaaaacacaaacatatagttttttctaacctttttagcaaaaaggtaaaataatatttctggaacttacggaagatgataaaaaaaaaatatttgtggttttggtaatgtaatttatcaggattatttaattatctgtgtggggttaaaattgtaaattttgaactttggggaatccggtgaaaattttgaagttaacgtgaaagaggaggcagtgaagaaggagcaggcaacagagccggggaaacggaggaagaggaagaatgtttatagagggatacgtaagcgtccatggggaaaatgggcggctgagattcgagatccacgaaaaggtgttagagtttggcttggtacgttcaacacggcggaggaagctgccatggcttatgatgttgcggccaagcagatccgtggtgataaagccaagctcaacttcccagatctgcaccatcctcctcctcctaattatactcctccgccgtcatcgccacgatcaaccgatcagcctccggcgaagaaggtctgcgttgtctctcagagtgagagcgagttaagtcagccgagtttcccggtggagtgtataggatttggaaatggggacgagtttcagaacctgagttacggatttgagccggattatgatctgaaacagcagatatcgagcttggaatcgttccttgagctggacggtaacacggcggagcaaccgagtcagcttgatgagtccgtttccgaggtggatatgtggatgcttgatgatgtcattgcgtcgtatgagtaaaagaaaaaaaataagtttaaaaaaagttaaataaagtctgtaatatatatgtaaccgccgttacttttaaaaggtttttaccgtcgcattggactgctgatgatgtctgttgtgtaatgtgtagaatgtgaccaaatggacgttatattacggtttgtggtattattagtttcttagatggaaaaacttacatgtgtaaataagatttgtaatgtaagacgaagtacttataacttcttaactgttttgtggtagtcctgattcctgaaactaatgggaattagtttgtatatcaaacaggggttcctaacttgttattattaggttaggtggaataattctagggtttttattgacaaaaattaacaaatagtggtttttatggaaaaaggtgatggtaccagtatagtgggaatacacagaagaatttgcagcctttctcaattcttatacgtataattctcgtatgtctatgaaaagggttatacgtatgatgatttatgagtagtgagtacatacatctttttcactactttacatgtaatatttatggaaaaggtctgatccgtttgctctatcgagaattggaattgtgagatatcttgattttaacagtttcaagattaatgaagaacaaaaacaatggcaacaacttacaaattaacattcggaagaaagaaaaaaacttacaagtgagatcaaatttggatttagtattttagatgtaagttacaaatatttcataaactaataatctattaaaaaaaaattattcattgtattttactttataccgtaacctaaacaataaaatacaaatttataattgaaggattttaattgtttaaattactctttctaccatatttgtttttatttctttaaacttactctttctaccatgccatttaattatttttgattgcaaatattgtacgtacctttcaactgtgaactagtattatccttatccctatcgtttcccaaatttcgtcttacgtatagtattaatacatgcatgtgattaaatagaagataagaagatgttgatgtgttgagacttaagactttgatgcatgaacctctaaagcctagttggtaacttggtataataagatttgaagtgggtccataaaatgttttgaagattgacagaatctatttgtttcgcgatattgtctatttctttgacgttttagagaatcattagtaatttaattagtaataaactaataactaagcggcatcttttcgatgtgataaccaaaatcatataatgatgcgtgtcttagactcttcgatacatatgtagataagatagcctaataaatctcgattggtttctaaaatttgtgtttacttcatgttataaatagtaaacacaatactaatcgaatcatgatattcacggttacgacaatgagttgacaatcagatatacttcaaaagaattgtggttaatactaactaatataacttgttcgctcaatctatatatataaatatataatcaaccttcaatattatgaaaccagatgcttatatatatctacttcgtaacatttaatcatttatcatgcattcaggctgatcgtttacggtttacccaaattcaatatatggaaaaggtgatggcatagtgacgttattcaaatagagtaagtgaacttaagttagttctcttgcatagaaattcgagcatgacattatgtttgaattttaattaaaacaaactcttatgcaagaaattcgttgtgttatgttatgtcgtcaagaaatcgtagccgacagtataccatctctgtgtggttacttttctcaagcatccccaaactttattcttttcgatcccccacttggaattatccaaaatgattcgcatttatttgacttgcaatcaaataatgtaatccgtgtgcgtattgtatatatattttttcattgtcaatgcaaacgttattgttattcatcagttttcataaatgaaacaataatgggccaaagtaggcccatttataaagcgaacgggtcgaattatcaaaacatttctgtgtaagtgggtcttaacgaaattggagtggaactgaaattagacccaaaaaccctaaagaattgatatgtcttcgatttataagtaggtcatttttttttgccttaacaaaaaagccctaaacggagagaggcggagaggagaaggaagacggcgtgaagcaatggtgtcgctgaagatccagaagcggctcgccgcatccgtaatgaaatgcgggaaaggaaaagtttggctcgaccccaatgaatcgggcgatatctctatggccaattccagtaagctttcaatttttaatctcccaccaatcactttatctctatttgttttatagattgtgttttacagaaactctgttttagggagtgattagaaacgtatagatcattttctgaactaggttaagtactgagtcatatgtatgaatgcatttctaagtgttgaggccttatgtagtagtaagattattccttaagcttcgtagaaactgtatgggaatggattttgtaatttctctataagaaattaagttttcagatggtgtctatctgtttacaagcatagagtagccatctagattcatgcatttgtctaacagtggtgttgatattattcttaatacattattggattatgtgaaacagggcagaacattaggaagcttgtgaaggatggtttcattatcaggaagcctactaagatccactcacgttctcgggctagggctttgaacgaggccaagcgaaagggtcgtcactctggatacggtaaaaggccaaatgagcttttcctgcttgaaattccttttgattattgctggtttagtgaacattgtcttttgtatcacttcaatgttttttaggtaagagaaagggtacaagagaggcaaggctaccaaccaagattctttggatgaggagaatgagggtgttgaggcgtttcttgagcaagtaccgtgagtcaaagaagattgataggcacatgtaccatgacatgtacatgaaagtgaagggtaatgttttcaagaacaagcgtgtgcttatggagagcatccacaagatgaaggctgagaaggctagagagaagactctcgctgaccagtttgaggccaagcgtattaagaacaaggctagcagggagagaaagtttgccagaagagaggagagattagctcaggtgagaagaaatttacaggccatttatggctctctgtcattttagttttggcgttccctcattaataatactgttggcaattttagggacctggaggtggagagacaacgactcctgctggcgcacctcaacaaccagagtaagaaactttgttctttgtctctttcctttgtccggttttggggattgaagtttcttagatttatgttgggattttgttgtgttttcagggtaaccaagaagaagtcgaagaagtgatttggtgttgaacttttttgcaattgaatctttgagtttacctgtagaagaagcgtcttttttttatcttttatatgattttgtcggagattcttttcttcaaaaatatttcttatgttatggatctcattgcttattatgaatttctcagttttgtttctctttaccttttctctttcaatagtttctgattccattgtcttaaaacatcaaagaagttgagtagtatcacacttcccaattttggagttacttgttcaaccatgtatttaacaaatatgtaaatcccaatttgattaacttgagagtttagtattggttttgacaacaacaaaaatgatttctaatgaactgtctacatgtaattcaaaacaaggtgtagaatgtattaaattcaaaagatttttattgaataaaggtggggtaagctttttgttttcccccaataattaatcttgtatagctttgattctatgaatacgtggggtaagattggtggccaaaaaaataaacacagtagctaaccattgatttgagatttgattcataaatatctatatcaaaatttcttaataaaattttagatgatctcaaacaaagctatataataagataatttgattatgttttctacatagtataagatcactgatttgattaataaatgttaagaaaataatatatagccggatccggtatcggagtaaaccgggagagagaggtcaaagtcgacgtagacgtagacatagttcatgttgttcactttgctttcttcgtgcacctgtatatcaaaaaccaacaccgtgtgtattcctctctctctctctctctccccgacttttgaattttccctcagatttgtcttcctttgtaatccattttcgctctggatcgatcttcctacgatttggtcttcagattgatcggtttctcatcggaattcccgggggggagtataagcataacgaaaaggatcaaactcaggatcaacgcgacgggagaattggagattttttgtttgctagatcttgaattgagcgatcgaattgggtaattggaggtttgaagagatcagagaaatggcatctgagcagttgatgtctcccgccagtggtggtggacgctactttcagatgcagcctgagcaatttccttcgatggtctcttcgctcttctctttcgcgccggctcctacgcaggagactaatcgtatttttgaagaattaccaaaagcagtgatcgtctctgtctctcgccctgatgccggcgatattagccctgtactcttgtcttacaccattgagtgccaatacaagcaggcgagtccatctcttctctttagtaggtcttactaatatcgtcgcataatagatgcttggatcagaatcacttaagaggagatgggtatcaactgtaaattgtcatgtctgactattgatcgaagtagttcttttggatacctagcttgaatctgataccactgatcgatgttatatgtcctttggaagcccggaacagagacatatttatcaatatttatatgtttcaccttagtttagtggaaaggctgcttattatagtggagctttcgacttttgaatacttgagtcctaactttagcgcttttatgtaacagttcaagtggcagcttgtgaagaaagcatctcaagtcttttatttgcattttgcattgaagaaacgtgcttttattgaagaaattcacgagaagcaggaacaggtttgtggtgacttgatatatcaaggaattttcttctactagtttgtgattccctttgagtgaatattttaaaggtttttccttggtctgttgaattgagtttgatgtggttttctttcgaatatcacattaaaggttaaagaatggcttcaaaatctaggaataggggatcatccacccgttgtgcaagatgaagatgctgatgaagttccgctacatcaagatgaaagtgccaaaaataggtcacacttgctggcatttttttttgcttggataagttgctgatgtgagtctatactcttccaacagatgccatcattttctgacaagtagactgttttgttcagagatgttccttcgagcgctgctttgccagtcattcgtcctttgggaagacagcagtccatatcagttagaggaaagcatgcaatgcaagaatatctgaatcattttctggggaatcttgatatcgtcaattcacgggaggtatatttgtaaaatctatttcacttggttgttcaactactttaaaattgttaatacctagttatgtcaagggttgttttctcttctattctagctagaaatcttagtacagcaagtgactatgcgaaaatttccatgcttttcaaacttgtattcctgtacacattgatcgtcattccatttccgaggctatatgcatgcatagttaaatgctaaatgcctaatataggtttgcaggtttttggaggtttcgatgttgtcattctcaccagagtatgggcccaaattgaaagaagactatatcatggtaaaacatctaccgaagttttcaaagagtgatgatgattctaatagatgttgtgggtgctgttggttctgttgctgcaacgataattggcaaaaggtatgaaaattctcattttcttgctcatactcgcgtactatgtattttgctatgaaaaattggtttacctctggagttaactctgggatgacgtgtatgctttgtttatgtgttcttttgttattcttgtccgctctcctactcttgctttgtctctgaactcgttgaatgccatgaatagcttatgtatcagaagaaacaaaattcatctttagtagttcttttgtaatgatttttttttgttactactctcactggagaggtgttctgaaacaaacttatctgaatgcttcaccaccgttgggagatattaagttgatgaagtaaattgtttttctaactctactttagatccatatgttcttcaatgtatgtgccatcgaatactgttgtctccttttataacttctgtctttgcttctgatcagacattctaaattaatgtgacgacaagatggtatctaaggtttctttttctccagtacaggtgtggggggtactaaagccaggttttctcgccttattggaagatc

SEQ ID NO: 429 - DNA, 92620 bp, Arabidopsis thaliana
aagctttgatcaatcaaaagaacaaaacttaatactctgttctgcattttgcactcatgttctgtttctcttccgtctgcatcaaagaggcaacccgtggcaaagatcgggttctttctcagacatttccaaatgaaacgaacccacttttccggtttctaagccttcataggatattcacactctcgaggattcaatttctatgaggctgacacggtttctctcgagagtccactttttcttaggtcaagttcttcaacaagacgcttagtatatgaatctggaacacatccatgtctttcgattgaactgaacatctctcttgcttcactctctcttccagattcacttagagctttgatgagagtgctatatgtaaagttatctggtttcaaaccaattctcagcattgttttaagcaattcctcagccttcttaacctttctcatcttgcaaaaactctgaatagtcgcattgtacgcataaaggtctggacttaacccgttttccttcatcttcgcaaacagcttcactgatctatcggtatctccggtggaacaacaggagcgaatcaagatattgtatgtgatctcgtttggctcaataccccattccaacatctccttgaaacagtcaaatgcatctttaatttcttttgctctgcaaagacagtttatgatcaaactgaaagtgatcacgtctggtttgaaaccatgtacaagaagcttctctagcacgccgtgaaccttctttacatcacccctcacgctataaccgctcagaaaggtattgaaagttacgagattcggagaaatacctctatcctgcatctctgttaagaacatagctgcattctctatgcgtcgagccttgcagagacagtcaattaccgcattataactatatacacttgatagaagcccgtcaacacccatttgtttcagataccggtcaccttcagagaacctctgagcattcaacagagcttgaactaacacaagataaccattgaatcctggcttaactccacggctgacaaaaccgtcaaatatcctacaagtctcaacaagatcatgcccttttaggagacaactcatcgcagcattgaatgttgagctatccggaatataacctctctcacctatcttcctcaagaattgaccagtctctttagccattgagttgtttgaaagacaatacaacacagcatcgtaaccaactctttgcaagtttgagtctttctccataaacccaaccaaaacctcaaacgctttacacggcggcaagcaacggaaaatcccgtgtacgaaagttctgattgtagcttcattaggattcaactttctcacccgcatcatctccaattgcttcaacgcctcatcaaccctccctgctatcaaaaacccgtcgatcaaaatcgtgtatgtgaacacattgggtctattcccttcctgttccatctgtttaaccaatcgaatagcttcatcaaccacacccttcttgcaaacaccatgtataagtatattataggtaaaccgatccggtttacagccatcactacgcatctgctgaaacttgaggtaagccaaatcaagtgaattagacttcaccaacgcatcaatcacagcattataaagccttgtacttggtttcattccaagaaaagatatctgagcaaaaacatcattacagtacttagctaaacctaatcttccccagcttccgatcaaaacacacatcaattcatcactaatccgataccctgaatctctaatctctttaagcaattccatagacaacaataaggggcctttacgaaaaagtgcgttccctagaacactcttcagagactgatccttagcgtaaaccgggtcgaagttggagacccagaggtaaaatcgcagggagtgtaatgggttgtcttgattctgcaaaacgctgatgacgaatcgagtgttgagaccaattcgatgagtggtgaattcttgattcagtatcaaaaaccaatcttttctctctatgacttgcgaaatgtaacgctggttcagaggattggtgggtttacctgaagagtttagggtttttgagagcttagggtttacggatgtggaagcgtttagtgatttggaagctgctgccgccgtcgctattctagatgctgaagaagcaaagcctctcatgtcgtgaccagaacggagctgagtgcaagtgaaacattgatttggtctctaacctcaagacgatgtttcctaaacgacgctgtttaatacaccaatatcaatatgtgttcgaatttaataattttttttttagtttcagaataaattaagaaaaagtcatgaccaaaaagatcatctcctttgaaacaaacaaaaacaaaagaattttggttgatcctaatgactcttccattgccaccatgaaaatgagggttttcattatagtttatccatctcttgattactatgaattttaattttcttgtaataattatatttctaagtgataattttctaatttctatcttaaattgtagcattgactaaatatttccatcttcatcttcaaaaatatattatgataatattaagttattgctaatgagagatgtaataaaaagagttgtgatgaagtcattattatgctatttatgtatgattaataatatgttataaaaattactattgcaatatatatagttttcttatatcattgcatttatttataagaataagatacaaatcaagtccaataacttagagaaaataaaggcaacgctagaatcatcaattttgagagaaaatggatttataagtttgtattacttttgacaacaacatttcactggacatggaatacaaggagaaccacactgtccacctttttgaaagccagctctaagacagtccttattacattcatcattccagtaatcttcggaacacctaatattgcagttgtcaaaagagaagccttcgatccttgcatctacacaagtccacatatatatcaaacatcatcaataccaacatgtgtaaattttatatcattccaataaaaaatagttatataacatgtccaaataaaagtttttaacgaaacttttgaattcatgtataatatatatataaacaaaaacgtgatcataacgaattccaaatatttagatatatagcctttgaaatgatcactactaaattgcaaaatagctaaaccaaactttgaaaatacctgaagccaaaacgttgttgttaggcaacgaaactgcaagtattattacaaggaaacatgtcaccaaagttttcgtactacccataataaatttttctatgaactcttttgaggtattcaaatgtttttattgtttaggatcttaaggattgactatttatatataacttttggtcttcagtttgttttattacaattaattgatgatccatttttgtttctcaaagttttttatttttggcaaaaaaaatcatttacatttatgaatatataattatttacaattaataatcctaaatgagaacttaaaaattgaaaaaagtgtgtgacacttgtgaatatggtcaaaggtaatttgttggatatgttgtcattatgttcaatcaatatctcaagttaaatgcgagattttaatttcataattcaatattggaaattttttttttataattaggtatattataaattttaactgatttcaaaattgatattgacaaaacaaattgaaaggaaaattaaatattatctgtaaagtcattattgtttttgttaataaatattttttagtttcataataaattaggaaaaagtcatgatgaccaaaaagatcaataagttgaaagttgataaatgtcttgttttttttttaatcatcttctttgaaacaaacaacaatggcaaaacaagatcccactagcagcaacacgatgctaccactcgtaggatctgagtttgttcgtccacagccgttagatctaacgataaccggagatacagtgaaggacgcaaccgggaacaaagtgttcaaagtcaaaacgcctctctttggtctccacaacaaaagaatcttggttgatcctaatgactctcccattgtcaccatgaaaatgaaggttttcattatagttacttgttattacctcttgatttttgtttagttaatcggtcggatttttctgagttgaattttcttggtttatgccttggatttgaatgtgtaaaaaaggtgacaagtaagcacgatcgatggcaagtgtatagaggaagtgatttagatgataagatcttcacggttaaaagatcttcgactgttcaattgaagacaagagttgaagtattcttgaaacataaccagaccagagaatcgtcttgtgatttcacaattaaaggtcggtttatgaaacgtgcatgtactatctatgtcgcagactctaccaaaatcatcgctcaggtataaacaaacaaataaataagtaatgcgataaaaataactcgaatagattacttacacatatattatacaggtatatgaaggacatgagagattagtggctacaatttatcctaatgtcgactatgcttttattgttacacttatctttatatttgacctcattaatatggggactgggatctgataatagtttgagccttgaaggcaagtgttgactttttataccttgtttattgtatgtgtatgactcatgtgtgttttgccaatgtttgttacgtgaaagcaccattgttttgagttgcttaatgtgagaaaagctgttgcaagagtgtgtaaatctttctgtggacttaattaagtatggttgtttataccattgctattagtatgtcaatctttatcgctgttattaatcaagagtaaacgatttataaacacaatgaaagcgttgaaaataaagagaatattttctgttatcatttgaaagtttacacacaaggcaaagttccgcaaaaacatacaacacattattttcaaaatgttgttcttaaagctttatcacttcctataacctgcttcttggtactggtcccatctctttggccttggtcctcagaatatgcttctgaatttttccagttgctgtctttggtaacggcccaaacaccactgactttgggacccaatatgccggaagcttctcccggcagaatttcattatatcctgagccaacttattctggtcatgcttctcgtaatcgctcttaagtgtcacaaacgcacacggagattcttgccaccgctcgtctggcctggccacaacagaggcttcaagaaccgcggggtgatggtacactacgttttcgacttcgacactgctgatattctcgcccccagagattataacgtcctttgacctgtccttgatctcgatatagttgtctgggtgtttcactgcaatatcccccgagtggaaccacccaccagcaaatgtctctttgttcgcttccggattctttagatagcctttcatcaccatattccctcggaaaacaatttctcctgcggtttttccatctgcaggaacaggttttccggtctgagtgtcaatgacatcaagctgctccatgccagtatagcggacaccttggcgagcattgagcttggcctgcgtctcaggagggagggaatcccactcgggtttccaagcgcatacggtggaaggaccataagtctcggaaagcccataggtgtgagcgactcggaagcccttctggttcatggagaagagaacagaaggtggaggagcagctcctgctgtcatgacatggactgtatggggaagaggaaggatagtgtcttctttaggagcattgacaatagcgttgaggaccacaggagctgcacagaaatgagttaccttgtatttggctatcattgaatacacttccttcgccgtaacctgaaaccaaaatttaatcagctcttcttctgatttatgtgaacttcttttcttaagtgaaaagtaactctctcaagtactacctgacggagacagatgcttgtaccagagagcacagcaagggaccaagggaaacaccaaccgttgcaatgaaacatagggagagtccacaagtaaacagcaccatcttgcatcccccaaatgagaggattgctcaaagccattatatacgcacctcgatgatgaagcaccactcctttcggactagcagttgttcccgaggtataaccaagagcgatgctctgccactcatcagctggtggctgccacggataatttggatctccggttgcaagaaaatcctcatattctatagctcccttcgacaaagcccggttaagtgactcaggagcacaggtgtgatcaccaatgacgattaaaagcgggcgtttgaagctacttccagctttctcctccataagtctcaaagaatcctcagccagagtaaagaactcctgatccaccattataacagagctctgcgagtgactaagaagaaaagcgactgttggggcattgagacggatgttgacacaattcagaacagctccacacattggtactccgaaatgagcttcgtacattgctgggatgttaggtgcaataatagccacctgaaacaataataacatttctggtctagtgaaattactcagattgcaagaagaccaaacaaccaaaccaaaacattgttaattaaaaaaagtcaacaaacatcaacatcaccagtgcatcgatcaacaagaatcatgcgagagcaattagtttcagaaacattatggttaatatgtgattaatacataatcatgatgattccctaaaacagattctttatgaaatcgattataatctctggtaagtggttgattacgaaaaatctataagcaattccaaaatctctggtaagtgattgttcaaaattttggaaatgaacattttagctagagtcgaaatgataatttggaagataaatgaaagattaggaagagaaaaagcgaataccgttgaaccgggaccgattgatcgatcggcgagagcggaggcgagtcggcgacaccggtcataagtctggcgccacgtgtactctcgcgatccgtgaatcacagattttctggtcggatgaaccacggcagccctatcaaggaaccaaagcggagtcaacgccgtgtagttggccggaatcttgggaagatcatcgatgtcacgccacttcgttgccgccatatctgactctctcgatttgtttaggttgtgtttattcaaatctggagcagtgagtggagaatccaatcacaaagtcacaaacacgttgttgaagtcgtaaaggttggaggaaagcttatatggagtgtgtgtgtatcgccgttttgggtgaggtgtaatcgacacgtggcgtcttctggtttttccggttagcggaccggaaattatctcaaattaatttgaaccgaacatttttgtgaggtcgtcgatgcaatttgaggatcatgctctgactgttactacaaatctacaatattgttcgactaaatgggaaagattacattttgtcattttctattcgattatttcaacatacccaaagaagaataaagagtagttcattttgttttgaaataaattttgttggccattataggaaaacaatggcaacagaatcacgttattcttgataatattgttagccattgaagaataacaatggcaacagtatcatgttttacacgtcattgataattaaagaatttcttgccaattttggcactacacaccaagaaaacattttttctataaccttatcccaatcacattattaaaatcacttaagatctctactagatttgacctgactagatctgaccgttcgtgagaaagctacttaaaataaaataaagaaagaatgacgtacgtagaccaaactactgttatttcttgaatccatttacatggcgtttctatacttctatcttatcgacctaacttaattgcttcgaatggtagtcacattcctttggccggccagttgctggagcctggaagtagctattcacagtattagcttgtttgtgttttttttttatcaaaccgataatctcattaactcaaattctatcaaaagaggaaggattacatccaaactagaagaaattacaaccaacataaaaacaattatacgaagtaattaagacaaccaaacgatgactaaactagagataaatagacgataacaatcataaacatagaccataaaaaattgcaagacaacaatctcaaaatcttttagatctttgtcttcttggtgtgcatgcaatatatatttatattttttgaaaagaaaatggtgtggaaaatattgcaatcgttcgtacgtatatttttacaaaatattaaaaccaagcccatgcaaaacacatatacaccaaagtcaactttctttttcaaaagtcaccgaaccagaggttataaaactttcactcaagaagaggaaccagaactcggaggagcagaggaggaagaagaaaaaggttcttgatctgcgcatgacagcttctcgtgaggaccagcttcttctcgtccaacacctatcagatcaagataatacaaataatgagaaacaatgttgttcatctcatcgttatcgaatccgctgttgcagatttgatcgccgtaaagaacgtttatggtggctccaaaccccggagttcgttttgcagcagtgtcattctttgttggcttccattttccgacgaaaacatcgtgcgccgacggtaaatgcttcttcggtggcgtcatccaccgccaaatcgccgcttgaaacgctaacgtagcattgttctcgagatactctggatgactcagtagatccactttcaaagcctccccggtttgaccataattgtaattcctaaaccagaccaatgataatgaaatttaaaccgagaaactttaaattagaattaaccggaactgtttaatctaaacaacgtaccagtaaaccggtaaagctcctcgaccgtggtacgagacaccaggagtacaaggatatgtcaatttgtagtaatcatcgcaataaagctgatcaggactcatctccttgttgtaacacaatccccaagctaatggtccgcctgttgcaaccccgtacccgcctttaaaccgaataatcgtaacggttattagtgatttcaattcccggttaataataaataaaccggtttggatcgctctaaaattaaacttacatgaggttttgctcccaacgtggccaagaaacgcagcgacttccttcatcccttgaagtttctcaccagcagtaccgaaaccaagaggctggtactcggcagccgcagtaatgaatgatcggtaatcccaaaagccgacggcgtgagccactggactgttacgcttagagaatagattctcgaattgatatgtctcaaaaaaatcggagattgtatggttgcaacaatactcggaccatcctttgcattcccatcctttgtcgcataattttttacctttcacaatcttcaccagaggctttctcgttgaactcgaaggctcggaatcttcagcgttgacaagggttccggtttgaaacacaaccaatgcaaccgtgagaagcaatagggagaatagcggtttcgaaaccatggttgatttttttttgtctttttcttcgtctatcaatgtgaccattgtatgtataactttatatacaaacatatatgtatagagtagtgtcgtgttcgttttaggaggaattaagttttcggaatttggtggtaggagaagagttgcttttcgtgagtttttttttgcttggttttgaagtttcttagagtggaagttacatgttaagaaaattggtcgaagcatgtacacgtagaactgtaaatgttttaaacttcatttttctaacaaaatggttaatctattttaccaaaataaaataaaaatggttaatctattgcaacacctttacaattagatttttttttggtttaggggacggattataactaatgattgggaaacaagtttgagatagaaattggaaatcgtttattggagcggttttgttgctgctagaatactttggaactaatttaaccatatattttttcttttccaggctatgaatgtcaatatatttagatattgaaaatgtttggccaatcttgaccttgacaaaaaggaataaaaacaaagaatcaaatatttgggacgtcacttcgaatgagttcatgttatccgcagttgcatcagattgctcaagtcatttcaataacttaaccattatttttatattttttgtcaaccaataatttaaacattaattaacccaaaaaataaatacttggaactaataagtggtaagtaaatggctcatataccagtttgtttagaccctcatagcaaaatatatattggggttaatttgctaaataaaatctttagaaacgtggtagcgagtcgcaccgagccttttctagtcttatgctttaacggaaccgatagtttaccaatggttcagttatgataaggaaacacctacggacataccaattatgatgcatgtgttatatatatatatatatatatattttttttttacggggggaacttaataaatgtttaatttatttttcttttgtaaataaatgatacaggaaagaccaacggacatgccatctgcgggaaaaaaagaagaagatgcattatatggatggcaagtctggcacacgaacggcacaaaatgtccggagggatcaattccaattcgaaggctgatttcccttgggaacgagactatcatcacttctaacgccggggatagagtcaccggtggacacgaggtacgtatttgtttgtgttttaactaaatatttgccattaaggcagtttaacaataaatctattcatctaatgtgaaccaaacataaatctgaccatgaatgtcgatgcatatggaaatataggtttaagaatgatttttgaacacgcccaaatattttcccataggattatttgttccatctttggttggacttctcattttgttgggcttaagcaacaaatcattcgattgtttttggatatcatgcgacaatgaatgtgtggcagccaaatgtagaagtatttaacgagttcagcttgggtcaactctggctagtctcaggttcatacaacgacagtaatatcaatagcatcgaggcgggctttagtagttcgatctctccatcttcatcttcatcttcgtattcaaaatatctcataataataataatgaattttggctagtaaggttataaacataggaggaagtccatcattattatgctatttatgtttgattaagaatttaagaatatgttttataatatactcgatttcaaggagaaaaccacttatgataataaatagttttttttttttttttttttttttttttttttattttatttttataaacataagagacaaatcaagtccacgagcttagagaaaataaatgcatgagtctatattacttttggcaacaacatttgagagtgtctttacgagaacgagaagcacactgtccacagtcattcatacattctttccctttttgtttgtatttgcaaatttataaatacagtttaagtatgttgacctattgttttctctaaaatttattagagcccggatagagatatgatcgaccacatcaagaaataagatcaagtagattttttgcgtatatttggcttatgttttgcttatgttttgcttagtatttatttttggtcaattgtttttaaaaaactgttattatcttttaatgtcatatatttatcttttgcaactacatatagaacatcatattaccatatctcactaatcaaatacatctacttccggaggcacccaagtcgatctcaccattaagatgtagaaggttagattatttgtattatttttgttttattgtataaatgtttcctaataaataaatatacagaaatgaaggatcaaaagctcgagagttggtggatgggtatcgtattgtcgtccttgaacattgcgtcctctagcagaccatatattatccaaccgtttttttcactattcaaactgattatgcaatgaaagtggagtgggacggcgagatcatgagcatgaatacttttggcctgcacacgaaaatgcaaataggatccgactattttcatgacagtgttttggaaatccgcttacatgtgtaacatagaaatttcactgtccaaaaatgatttccaaccacttacgaaatagtagtaagaggaagtcaccccgattattacagccccaagaagtcgaacaatattcctgaacttgggacacatttttattggggattcttttttttttatcggaagcatgagctagcagcttaacccgcgacatgtgaccgttgctcatcttacatgggactcgactctcctatatctaagtttcggcttggtgttcttacttgtttatttttttaaaaaagaagaggaagttcttcactattatattaatgtcattatgatcaatctatatcttacgttacatgcaaaattttcttacatatttgaatgttggaaatatttatttagagttaggtgtatggtagaagttttatttgatttcaaaactgaaataaaaactacatttaaaatatgtaaaattattaactctttgtgctagtggttgtctaacctaattagattggttggtgcattgtctatttggtccgaccgatataggagaccggtcttttcatttcattagtttcctcctgagtcctgagagatatcacatactaattgtcaaatttaataaagtagtgagactgtttttttttctcccataaagaaaagaagaagatagtactaataagtaataactaataaatagaggtgagacgaaaaaagagaataggaccccagaataaatgatgaaccataattatgaagccacgtatgtaacagtccacgtctgttcgtacacccgccgcggataatgaatgatcgcttaaaagctctggtctggacgctctttactttccccctttatcaaccacttttctggtaacatgtttacattttggagttgcttactttgccactcgtttttctttttttttggtcacaactttgccactcgcttctttatgtttcttaaaatgtttttttcttaagtaccaattgttattatacctatatttaggcatgccatagtcaaagatatagttaattcatgatattaaataaggtttattagtggtttaggtttaacgcttagttcgattattgatttagatcttttgttactagaacactaatcttaaacaatcaattaaaacacacaaaccagaaagccttatgaatgaagattcatgaatggtacatgttattcataggtccaatttgataaattagaaagattaaggtagttttggagaataaaagtaggtaggggagcaaaactgcaaattcataaaagtatatcatcgttgaaaattcaacttttccaaaagaaactctcaataaatcctctaaaaaaaattaacggaacattccgtttctttttaatcactctcatcgtttcagagaccatcgaagctcgatttcattgtttctctcagaacgatatctatttgagcagataaaaatcataacttttgactttgttattcagtttcttagtgttcttcgtctgctttttggtcaaagcttggaaaaacgagtgtgaaatcacgatggacggcgacggtttaggcagactaatcggctcggagattcatggattccataccttacaaggtaagacctagctctagatttctggatttatttttttttttttaattattattattgtttttgattcgctggttcgtttgtttctttcagtgtcttgtttgttgtttgctgaagctgtagtagttgagcgtttttttaaatatataaaaactcgggtttggagtttattacactttgtattgtgacgtggccgtttttgttcctttgctgtgccattgaagctgaatttgcagttactgtgaaattgaggtttatatgtggatttagtatatgattcagaaggtttagtgtgggaagctaacgacttttggtatctgtcgagtttgaatttggtaaaattcgaggttttttttgaagcaagtgtgaaattatgtgttacgtctgaataagtttactgatgttgtaatttttaagaacaaagctagaaacatatttgtatatgatgattgatggatatattaaatttgtactaaactctgctttgagtgtgtatatgttcatctttgtctgatgtttcttgatatattttctggttgtgtgttttgcagatcttgatgtacagacaatgttggaggaagcaaaaagcaggtggctacggccaaacgagatccatgcaatcctctataacccgaaatacttcactatcaatgtcaagccagtgaacttacccaatagtaatcattatgttctacacctaacaatagccactcggtgttttatgatgtttcttcaagtttccatgtaatcttatgtttccgttattttgaaggtggcagaattatattattcgaccgtaagatgttgaggaacttcagaaaggatggtcataactggaaaaagaaaaaggatggaaggacagtcaaagaggctcatgaacacctgaaagtgagttctttttgtaggttttatctttaaaggttacatcatgagttttgttttttttggtcagctaatttatgtcctctgaatgatgtaaggttggtaacgaggaaaggattcatgtatactatgcgcatggtgaagataacactacctttgttcgaagatgttattggttactggataagtatgtagtaagcaaagatcactgacttgtctactttatgttctttgaaaacttgactagaggcctctttcttctatgtttcttctgagggttatgtaagtaaaccatctcttcttttatgtcagggctcgagagaacatcgtccttgtacattaccgtgatacacaggaggtttgttttcctttctacatgttctcaattcttacttgtgtttctgatgttagaaagttatgaatggatcagggtgattgatttctttgctttccatgtttggatgctctctttctctatagagtagtaatggtctccgattgataggctttatggtgggttaaactgatattttcaggcagctacaacatcgggggactcaatctctagtccaatctccgtctcggaacaaacattccctaatcgcgtggcagctgaagatattgatacagttgttagaaatcatgatattagccttcatgatatcaatacgcttgattgggatgagctgctagtaccaaccgatcttaataaccaatctgcaccaaccgtaggttaggaattgacaatatcagttggtgtagttaaagaaactatgggatgatgttgaaaataaatctttctttttatctgtgatcagataatctttcatatttcacagaaccgctccaaaatgctgcaaatggcactgcagagcatgggaatgcgacagtggctgatggatctcttgatgctttgcttaacgatggtccacaaagtcgagagagttttggaaggtggatgaattcatttatcagcgaatctaatggctcactggaggatccttcctttgaacccatggttatgcctaggcaggatccattagctcctcaagctgtatttcattctcactctaacatacctgagcaagtgtttaacataaccgatgtttcacctgcttgggcctattcttccgagaaaactaaggtatgtgctatcatatgaataaaataattggtttggattacaaaatggaaaagcataactttctcatatactgattttgcagattctggtaactgggttcttgcatgacagttatcaacatctcgaaagatcaaacctttattgcgtttgcggtgacttttgtgtccctgcggaatatctccaggctggagtctaccgttgcatcatacctccacactcgcctggtatggtaaacctctatcttagtgcagatggacacaaaccaatcagccaatgtttcagattcgaacaccgtgcagtcccagttcttgataagaccgtccctgaagacaatcaagattccaaatgggaagagtttgagttccaagttcgactttctcatcttctgtttacgtcttccaacaaactcaacgttctctccagcaaaatctcacctcataacctgcgagatgctaaaaaactcgctagcaaaacaaatcatctcttaaacagttgggcttatctagtcaagtccatccaggggaataaggtatcgtttgatcaagcgaaagatcatctcttcgagctttctctgaagaacaggcttaaggaatggcttatggagaaagtgcttgaaggtcgcaacacattggattatgattctaaaggcctcggcgtgatccacctctgtgccagtcttggatacacttggtcagtccagctgttctcattgtcaggcttatcgttgaatttccgtgataaacaagggtggactgctcttcattgggcagcatactacggaagggagaaaatggtggctgctcttctctctgctggggcaagaccgaacctggtgacagactcgacgaaggataatcttggtggatgcatggcagctgatttggcacagcaaaacggatatgacggtttagctgcttatcttgctgagaaatgtttggttgctcagtttagagacatgaaaattgctggaaacatcactggcgatctggaggcttgcaaggcagagatgttgaaccaaggcactctaccggaagatgagcagagtctcaaggatgctcttgcagcatacagaacagctgcagaagcagcggctcggattcaaggtgcgtttagggaaaaagcgctaaaggcagcacggtcaagcgtgattcagtttgctaacaaagaagaagaggccaagagcataatcgcggcgatgaagattcagaatgcgttccggaaatatgatacacgtaggaagatagaagccgcttaccggattcaatgcaggttccaaacttggaaaatacgaagagagtatctgaacatgcggcgccaagcaattaggatccaggtatgaagtgaaccacacaagattcagcagccaagattataagtttgctctgaacttggctattcataatcatcacttttgtctaaattccacaaactataggagactgaaagttcacacctttatcatatcgtctgtctgaattttgcaacacatgagtgtatttcctcctattttgcaggctgctttcaggggattacaagcaaggaggcagtacaagaagatattgtggtcggtaggagtattggagaaggcagttttgaggtggagacaaaagagaaaagggtttagaggactccaggttgcagcagaggaggattctcctggtgaggcacaggaagatttctacaagacaagccagagacaagcagaggagaggctcgagagatctgtagtgcgagtacaagccatgttcaggtctaagaaggctcaacaggattacagaaggatgaaactcactcatgaagaagctcaggtgaatcatctgacatttttgaatctcagttttggaaaaaaaaactctaaccggagataagttcatacttgaattaacgagtcttgttatggtgtgacacagttggagtacggttgcctggaagatatttgatacatcaaaatggctatggagaggtgagtcaaagagagtttggtgttgattgttaaacatggatggtaattgatctgtaaattatgtgaatgggaaaggctactctcgatctttctgcaactggtttagaataaagtatacataacgagacctaatctctgttgtatgaaaaagagagacagaattaacaaataggtattgtagttatttgtctatttctgtaactgggttcctatgtgactttggtgtaatctagacttgtatatttgtagaataaaattgcaagtaaccagagaaatatcttatgaacatttgtacattaaactaggttcatcttgtttgtttgtttgacaaaaaaaaaaactaggttcatctgtcacttcacgtctgaatctgattgataataatggacagacaagtgattttactagtaaaaagagaagaatcatccaaaatcgttcacatcaaacaaacatacaataaccaaaaccacaatctccactaattgaaaccatggaacaattaaacaaatataagtgaaagcagagacaagactccaacagaaatattctcaaagaaagaagaaggccttgtagatatatctttcaagtctttacttacggaaggttgtttctcatcatctcctcctcttcttcttccttttcgatcttcctggttcgtgtttagctttatctttgcatctccctaaagtacaatcacaaattttctttcttcaagatgtttctccccaccccaataagtttttggtttcttattatacaaccactttttcacttactgtccttgtcgtagcatgactttcaacctgaaaaattgaacttatagtgtaagattcttttgctttttagtagaggacttaaatctattgattgcagttaagaataaaggggctctctgatcaatggcatgaggagactgttttgctttaccttggctgctttgaacagttcgtcgaggacctcagagagtgttggatgtgcatgaactgccaattttatgtcctgcagagataccattaaaacatgcaggggatcaagaaacagatacaaataatgcgtttagtagtttcagcaggaactatgtatatgacttgatttcgctgtaggatattatcaatatcaaaggctacgagctagattcaatagtaatcactaatcaatgaaatcctacctgaatacgcgttcctagagcaatcgcattagaagcttcatggataaggtcagctgcatgcagtccaaatatatgaactcctaagatttcaccattgtcaggtcggtatatcatctgcataatgaaaagcaatgagatctctatgttctttcatgagacataaataaatcaacaacttttgcttctcccaccttagctattccttctccttcattttcagctagggcctttgtgttagccttgaaacttgtcttgacaacactaactttaaatccttccttctcgcctttttcttttgcttgaggctagcaataatgtcaaaacataaggagttacagtaagcatattttgctcatagcattcttctttttgaccctcttctgtacacaagtactaggatataaaactacctctgttaatcccaccatgctgatttcaggatgagtaaagcaagcagctgggatgctaagatgattaagcacatgatctctgccgctgacttgctcgaccactagccacagagtaagagctcagagtttaatacaaggctcaagaagaaaaaagggaaaatattattgcattgttagtagcctcctactgataagccatttaccagaaattccttgggcactggctgcatgtgcaagcatcaatttaccattggcatcaccaatgcagtacaagttcggaacctatcacaagtagaaatgaatttagcatatagaaagaattgctgacaaggaaaaggtatgtatatgcaaataaaaccgaccagagtcccctttccatcgatcacacgcattcgctcatcaactggtatgaaacctctctgcgtcacaacattgacctgcattgagatgacagcttcaaggttaattttctgacaactaaacattctctggtaaccaaaatgacaatactaaaaggtgggatttagtgtcatttcatacattttccaagccaagtccattggtgaatggagctctcccagtagcaataagagcagcatctacctggagaaggaaaacaaaattacactttcagcgcagaaaatcacatggtacaatgaaaagaaaccaaaagacatgactatttatattctatcttgagacgaaaggccacaataaattcagaaaatgagaagctttactaatccacctatgcataatgtgtatacttacatttctgtgggaagagtaacaatgtggttaatactgcagcgaaaagcaaaaaagtgaaaaacaagacttctaaggacccactaccaacggcacaaatcttcccaattcaggcatgagacatcagatcatgttaaggacccagtaactgttaaatattctctttgtgagacatcagatcatgttatcttttaaattccatttggttacctccaaagtatccttaggttccttggttttggcatcaataagctcaatcagaactggtttcccatcccttgccggagtaatctgaataagaatagatttaagtttaacagatgaatacatggacacactgtatagagaaagagaagcagtatttgcaatgcatgatataacaggctcactttgcttgcaaagactccagtatgatagtcaatctttcttggatttatcaaaaccctctgagctagcttactgatctcaggatcaaatccaggcattagctgatccagtgcttctataaaagttacctgcacaaaaggtttccgttttcgatcagtaactacaatttaaatcgaaaaaccaacagattggtaccttaaaatcttattttctactatttacacaaaaacaagctcaatacaggaagagaccaaacaaagaactagaaaattggagaacattgctaattgcagttattacaatctcaagtacaaggacacaacatcacaaagtcgtactaaagtaatatcattagtacagaaacatcatgttacctcacttccaagagctgtgtaaacatcactgaactcaagaccaatataaccacttcctacaattgcaatccactcagggacagactctaatttcaaagcatggtcactggtgatcacagtctttcctgcagcgccaaaatgtaaacattcaaggaataatcaagtctgcatgctcccttaacaactctacgtccaaaacaagaaacgtaccatcaacttcaattcctttagggacaaacggcacagatccagtggcaatgattatatcttttgcagtaataatattgtccttcccatatttaaccttttgtggaccctgcagaaatacaaaatattgatatgagttaggatcatcgtttaagaaaagtttgtatcatgttcctgtctacagttagtaaacgtgaaagaatagaacgtactactgagtactgaccagaacactgccaaatccagtcaatatgtcaacaccaattgccttcattgaattggtcagattgtttcgtattttggtagccagattattagcatgatctgccacaccctgacgatcatatccagcagctgaaacctgtttcccaaaggaaaaccaaaaaccataagatagtgaaaggtaatgagtaattcctgaactagctcgatcttctacaaccatttcacaccaaagacaaagcttgcaactttaaacagagaacatgagttgatatttacctggagaccaaaggacttcatgtgatgttcgttctgaagttcccgcattcgaccactaacagcaagaagagctttagaaggcacacatcctctgttaacacaagtccctccaacaacatctccttcaataatggctgttttaagtccctaacacaaacaaaatcaccaatgtttccataataagcagagcaaatcttttactttcatcaaatcaggttatataagaaacttcaaaccttttcaacggcgtgcaaagcagctccgtggccaccaactccagctccgatgatgatcaaatcgtaatcgaaagatttcggtggagcgccattaccattacttgaagcagaagcggagacttggaatgacttcctacttagaaattggattcggttactgcgaatagccaactgattcgacgttgagaaaccaaacgcttcccgccggagtccgcagaaccggagacttctgggcgtagagaaaacagaaccagatgatccgagcacgtggtttggtcttgtaaacgacgtctgggagaacgaaagcgccatagctgattgcattctaagagacacagacagagagagagaaaacgaggaagacgcagctgacaaatctaccggcggagacagagtgagtgtaaatagccaacaaacggaggcggagttttcaaagcccgctttgtttgtttgttttgttttgtttaaccacttttttttgtacacgaggcatttacgacttttctttcattttttctaacctggtttaagtcttaaaaagcccattgggtcaatagacctcgtagcccatttttggctgtgaatatatatttaaattaatttttggattttgtaacaaacttaaaaacaaatcgcttaaaaaactagtttctctagattttaggaactttttggatagtgaagttgattttcaaaattaaaatgctttatgaaatacctcgtagccacttcacgctcataagatcgtgtaatttgtttcattagggttatgttattacttgctcgacagttctagtagtgaattaaaagtagccagcaagatgttgatttcgatgaagaatgtggaactcgcatgggaactcattaaccactactgccaagaaggctcgctgcagcgtcgtccaatcaacgaattctttgactttacaaaatatagccgtggtaatttatataatccatcacctgaaaaacaagcaaggtaattaattatatctatgcataaatattcatgaaacaaattgcttgcttttttccttaatggtttttaattttatttttcatgttgtcctggtgcagccgtgggccgaggttgacgcatattggaaattaccttctttagttaaggacatgtatgtatgataaggaagggacaatcttacatggacttttccctgagatttgacgtgcatggttgttacacgatcgttctatgcttctatggcgttttgaagaaaggtaaattatataaaacagttcacaacttcaagtacgttttcgtaattttttgctttgtattcaccaaccagtaatggacgaattctggagcacaaaagcgaggacgaccaccctattttagttgttggtctagtgaaacgtagatcagattttgttgaagccagcgccgcgcaatatcttttggtgctagcaactcatcttgagacttgagttacttttttttggagtgtatttctgctctaaaaatggtgtagatcctcttgctcaagtagccaaagaagcatgataaagtcatttggtaaatggtaacatgtttatgatcattatgcttaaattctctgtgtttcaagaaaatgcaattgtgttaacttgattttttctatattaacttcggtatataccgaataaaaggctccaaaaaatcgattttaaagatcaaatgttttattttattttattaatttatttgttagataaataaaggtagctacacagagcagtaatgttaaaaaaaattcaaatattttgagaatcccaaggaggacaaagatcaaacattccagtctttttgttcagtttgcaaggtccttcttcacgtatcttccattcgcatcttttgcatccaaacattgcagattcttggtctctttcttgtatgtatatacggaaataacgaaacactagtctccaagcaaaagtgcaaatgaatttagtatctccagaaacactgggtgtaaattcaaatgatcacgatccaccagctagcatacgtcggagtccaaaatcaacgtcttttgatgcacaatggtatgccattggccaataacctgaaagagcgttatgtatcaccactgttgtatttgggttctcaacacttggtggtgaagccatggggttttgagcgagggacattgttacacttgcacacataacgataatgagagctacaagttctgctagagcacccatgttgtttttgttttttgttttccttgcaatatgaaagtatattgaatatggactctttccacttagtactttattgtatttataataccaaactttattgattatgtttccctaacaagcttctttgttttgttgactcagttacataggttatatgttttgaataatatgagtcaaagtaaaacttaattaggtataaaaggaaatctcatcttggtaaaaagacagctatatcttattatataaagtatggatttcaaagttgctaactcatataattgttacacatgtcaagtcaaacgatcagatgtttacatgtgtcattcaaaatttaacttttttattctctaaaaaaaattgaaaattttaaaaagtaaacaaatttacatatactaatttatacgtctatatatttataaacaattaacatttattcaacaaaaggaaaattaacaaatttgtctttaactcatctaatcataagtgaaaaatataacattttgagaaaaatagcttagcttataggatttaacttttcaattattttcatttattaattttaactcatttaatattaatttgcatgatgtaaaattaacttacgagattacggcatatacaaaaaatatattttcaacaatgtttggtttctaaatatttttgtggattgttttttttaattaattattagccctatgcgtttgggtattcgggtcgggtatttcgggttcgggttttcgggtttagaagtttaggacccgttcgggtaatttaagattttgggtcgggttcggtttgggttcgggtttgggttcgagtttatttatatattgaaatatgaaattttgtgtgcaaatttattaaattacttgaaaatttcaaaaattcccaaaacaacacgagtagttttgcttgaatatatctaaaaatacacaaaaatcactaaaatatccaaaaaaatcctaatattttttatatataagtataaatataactaatatatacttatatttgagatatgtttggatacctattcgggttcgggttcaaatttttcgggttttgaagtttagacccgttcgagtatttgaaaatttcgggtacacccgcctaaataggcgggcctagtaatatatgtagtcaataatctatttataacttaggtatataaggaaagctatatatttctcaccattaaagtcacatattaattttggtaaatataaagctatatatagtcaataaaaattatatattgaaggaaatctcatcacgattatataattggtcttgagtcagttaaataaccgtacctcttaactaacagtattttcatctaaacatgaaatactaatttttatttttattagaaaaatagaagtagacatacatgctaattatttttaaagcgattgagaattccaaggaagacaaacatcaaacatattactgttcttgttcaatttgcaaggtccatctttgcgtatcttccattcgcatcttctacatccaaactcggcgaattctctgtctctactctgtttgtagatatcgaaccaatgcaactccttatcccatataaaaccgcaaaaaaacaaagttcctccaaaaacactcggtctaaattcaaatgaccaagttccatttaccgccatattccggtctccaagatcatcattttttgatttacaatggtatctcaatggcagatgacccccaagatcattgtatatcaccactgttgttcttgggttgtcgaaaccggatgttggagttggagggatgctatccttttggcctcgagatattgttacactaacacacatagtcactaagaaagccacaagttctactagagatcccatttttttttttttgttgcaatatgaaattattgtatatggatgaatgactctttcactcgatatatactgtgttaccagtttattacatttccgtaacatgttttttgttcttcatatgtggtcaaataaaaacttaaatgtcatggttgatgtatatgtagtcaactatggtgttaagcccaataagctttataaaagcccaataacattttcaaaagcccgagaaaacccgtgaaactacgtccgatccgaagatcgatcacgcgactctgttatttagaacgacgatcgcattatttttctcctaataaacaaaacgagcccgccagatttctctgagacagtgattcagttttggttttggaacctaattctctctcaagagattcagctaagatgagtactatgaaattttgccgcgaatggtaagagctctcttatgctaattctgttcctagtttctggaattgcacctctctgctcgtctaggttttttcaaagtttcgaaatttgcatgaattttttagtttttgttgtttacttttgatgtatttcttccgtggttgaaccatctatggttgataaggtgacaattcgctaaaagtgagtaccttttttcgaattttgtttttgggtcctttcttaattgcattgttgtttctgtttgattttggttcagtaataacattctgtatcctaaggaggacaaagaacagaagatcctcctctatgcttgccgtaattgtgatcaccaggtatagcttttggtcattttgtaccttttttttgtgtggaaaaagggtttttagtgttcaatgtagtgcacaaaattgcgagtgggacttagtttcattgcaattaagagactttaatgaaactgtttcctgcttttatctctcttttaatgctcctagtttccttagttttaccaacctctctatttactaactccttcaattaaggcttagcaagttcttatggtttatctttctagtgttgtgtttatgagatctatatgaatacttgaagggcctcttttagcttattgatttacacaaactgagtagttatttgcaattttttaagctgcattatcaatcttgttgttacaaattgacagattagattagatcatgtaaatgggtttgttgtcctcatctcagaatttatactttttgtggcactgacttgcaggaggtagctgataacagctgtgtgtacagaaacgaggttcatcactctgtaagtgagcgaactcagatcttaacagacgtggcttctgaccctactcttccccgaaccaaggctgtgcgttgctctaagtgtcagcatagggaggccgttttcttccaggtataactctcttaagctccattatttatttaactacttggttatgctgtatcttcactgtttgcttccccaaaacattatgctcaaattctgtacaccgcttgaggatttaatgtagctatcattgaatgtgcaggctacggctagaggtgaagaaggaatgacactgttctttgtctgttgcaacccgaattgtggtcatcgctggagagaataaagagcttttcggtttcaattggtgagttcttaagagttttaggagttgatgtagttaccagtaagtgtaatatgtggaatgacgggaacaaccttctgccccagtcagagacaaatccgtattcatgtaatctgttatgaaaccataatctcaacttgtgtttcaccaaacataaagattggaacttgtttctctttggcatttagaggaaatgagaaattcaaacccaaacattagctactgtcctccacggctcatctcccagaaggcaacctctagttcaagaactcgtacaagtacatcttcagcttcaccgagcacctcaccggaggcattctccagacaacgttcggcaatgttcttgacagacgaacaatactgtttaaacccgtcattcccccaacgatgacaagcaccggtaagctccaccggagttttgttcccgtcttctaaacaatgagcaaagctctcttgatacactgcttcaattgcccagaaagctgtcataatcaccggatacttcacctcactgctcatcagatcttccaaaaacctgaattaaccagaaactccggtttatttgctggttcctaatttcattttcgagtgtgagaaatctattcaatcagcatatatgaaatcaataacctgccatattcttgattagctctttgaggcacaacggtcgagaaatcaacatcccatttcgatccttctcttttaaaccattctatttcatcattcaacgatgctataccaccaagcaccacttccatatcggaactctcgccggaatctttgcaagctctgatcaacacactcgctacaaacggcacaaacctcctcacgaacagataatcttgcccctacaaggaaacaacgtcgtttaaaagtcatcgagtgagatttcatattttgccttgttttcatcagtaattactaattacagtaccagccaagttctgaaggacgagagatcaacggatccgtcacggatcgagacgacaaaagcatgacgtgtagccgccgtatagatcgaacggtgcttatcaatccatgtgtcgatcacccctctcttctccattgaaattgcttcttcttcctttctctcaagactcaagactcaagactcttcttcttcaccgattcactgtcaacgctttgattttctgttgtctgtgacgtgcacgtttcattgggctttaaattaatgggccaaggcctattaaagtctcgccacgatagcttaatgattctcccaaatcgacggctgtaaagaggcgcttaaatttctcagattacgtgacagtttctgaaccgttgagatgtttggatgactaaagtttattaattacgtggcacttactcagaagctctctcacgtcacgtatccgtcgttaaagagtgtgacgtggaaaatgttttggaattaattttgtgtgtttgtattatatcaccgtactaattagctcatctcccgaagccatgtggtaattctaattttgtgtatttattattttctgttaagacgaatcggacagagagaactccggcggcggattgcacttccggcaagatctcgtggggataaataagatggcggatgagaggtataatcggaagaatccggcggtgaagaggattttgcaggaggttaaggagatgcaagctaatccgtctgatgattttatgtctcttcctcttgaggtaacatctccgattctagctttttagatcgggaattttgattcgaatctatatttgaaatttccttttttgagaaaatccccttgtcttatgttgttgtgttatgttgtgttgtgttgtaattgtgtatctgttctgagtgatggtgtttgattttaggcgatcatgattagggaggatcgatatatcttcttgtatacactgaatttactaagtctctctactttcaacactcgtgcaacagataaagtttggatttttgtgtttttattggaataactgagtcaagtggggaagattacgaacgattccttgatccactcagctgtcatactagttcttcgtttctaatttttttaactgtgaagactttttccaacatgtcatggtccaaatagattgcgcgcgatgttatagctgttttttacaagttcttgtgtgataccaaatagtttacatgattactcttatctatcttttaacttcaggagaatatctttgagtggcaattcgccatccgaggtcctggtgatactgaattcgagggcgggatttatcatgggagaattcagttgcctgcagattatccattcaaacctccttcattcatgttattgaccgtaaggatcttactcttatttcatatataaaaacacacagatgttgcaagttccataagagagtatgtatctaaagaatctctgtacttttgtttcagcctaacgggcgctttgaaactaacaccaagatttgcttgagcatttcaaactaccaccctgagcattggcaaccttcatggagtggtaaagtcatggatctcaagagaccttatctcttgacttttatgttgtttcctaaaagattactcagacacttgtaatttacatgaggttgaactatatcagctcttttgtattatgattgagctttgtttcttttcagttcggactgctttggtggctctcattgcatttatgcccacaagtcccaatggagcactgggctcagtagattatccaaaggatgagagacgtacactagccattaaatcacgtgagacaccacctaagtatggctctcctgaacggcaaaaaattattgatgaggtatagttccccactagaatacccttgggtgttgaaccactatgcataatatcctgatgaaaatatatgaatttagctagatgcttgctgaacctgtagagtatgtgccataccattgcattgcatcattataaaccataggactagctggtggtcaaaacgggatcgcaatatattatatattaggcttgcatatctctagcggttatgatttaatgtttgctctaagagtatctgctttgttttaactgcaatcacagctgttattattctctccatacagtaaaatttgctgctcaagtcctaacacaccattttactgattattgtcgtttttaaaaagtagtcagttgcacaaatataaaaaaaaagacaatagtagtgttaacaatctccttttggtctaaactctcgtccctttcttcatgatttttgttatgactttagtttcatacctctgattcatcttcaattttggaaaaaacttttagtaaccatgaccttttaacaagcgcagattcatcagtacatccttagcaaagcaaccgtggttccaaaacctcttcctctggaatgtagccaagcaccttccatcgtatcagaagctcactcccaagttgagccacaggaagcgataactgtagtagaagagcggtccatcgctacaacagacaccatagttgatgatcaaatcatagaagagacagctgaagcagtcaatacagcagctagtgtggttcccgctgcagcacctttaccagcggttgaagttgtggtcaaagcttctgtaagtggtgagcaaaggatggccagaagagcggctcagaagccagtcgatgacagactcttcacgtgggcggcggttgggctcacaatcgctatcatggttcttcttctgaagaagttcataaaatcaaatggttacagtactgggtttatggatgatcagtcttgaactctgatgaaagtcaatgctgcgtttaagaaatggggttgtgttgtttaatattttataaatataattaaagtgcataatggcgtaaataatttctgtgtgacattgtcttgcaacttagttgatagattggattatagcttgtgaccaagttaacaatatgtattttggaattgaacactgacgaccgttttatcaatacattgatgctttgttaatagaattgttgattacctccactatgttcataactatttcccgttttgagtacatgatgtctaaaatgtatccaaatttttaaatcaatagatttcatggtcaagtttaacaatttgatcatatatgtatgtatatgaacacacatgtagtgagtcgtgtggtttatatatttgtgtgtattttcattataaattacagaaacatattagttttggggtatcttctgcacacattagtttggtgtgatctcatcttgtaccttatttttttacttttcagtttagaaaaggttatcaactttgacctttgactgccatataacgttaaaaagagaaaaagttaccgaaggttcaaattaataaatgaagttgatcgtaatgaaaataatatttttttaaaaaagaagggatggtggcaaaagaagctaagttaaaagtctatcagtccttattgctcagggatcctcaggtactaaaactagcaaacactgcttttgcgtgtctttgaagtcagatttttaacagcaattgtttcatctgcctattactataaaataaaaaaacactttgatttatgggaacgtgactgctttttccactattataaccttgactcgtttttaatgaaaagaagcatacatatttggatactcacttttgcccatttataacaccagagagagagatatagggatagggcgagagagagttatactaaagaaacttgaaggagaggaggttctgagtgagatagaagaaggaagagagagagagatgggtaagagtagtaacatagtttttgatcggattaaagaagaacggcagatgttgagctttttcaagatttttcagagggcagatctatcctctgactgcatggtaacgttgttcttgatatctttgtttgaaaagtgggaatctttttcttctttttgttgaatgggtttcaagtctacggcttattcatcttttggttctctttgttttaaagattgcaactgtttttcctctgaatcttttacgttctctgtctttgaaacgttgaatctgttgtttccctggtgttttaagggtctcagcttctcgagggttgaatctttaggttctgtgtgttttaaaagttagatcttgtaaaaaaaataaaaaaagttagatcttgttagcttttggctgtctttgtttaatgaaaggttgaatctgttaaatctctgaatatttacgttctctgactttgaaacgttgaatctgttgtttctctgctctcaagactcttaacagtttaatctttgagttctctgtgttttaaaagttaaatcttataatctttgtttaaatggtagagtcttttggttgtctttgtttaataaaaggttaatctctgactctttacgttctatatgtttgaaacgttgaatctgttctttctctgggtttttatgggtctcaacggttgaatgttaggttctctgtatttgaaaagttagatctttcagctttggctagaaggtagaatcttttggttgtctttgtttaataaaagtttaaattctgaatcttcacgttctctgtctttgaaacgttgaatctgttgtttctctggtgtttttaacactcttcattgtttgttccaaccagagagcgcttccttacagcttcataagcaaagtctctgagaaagacttctcttacaagatggttataagagcgcaatggggaaagacatgggatgtagaagtctccaagaacccgacatactactacattgagacgcgtggatgggatctgtttgtgagtgacaatgctttaggacaaaacgagttcattaccttcactcacagaggaaatatggtctttcatgtcaacatctacgagcagaatggcttagagatgcgtaaacctcgaaaattccagacgatgggtccttctagtaagcttttgtgcttttaatgctttctttaaaacagagaatatgaagttgaagaagactaattattttactcttgatgattgatgaaaacaggtgggatcaagaaagaagaaggagagaacagcctcatagatgtgaagaaggaagaggaaagtgatgaatctccgggacgagctgagttcctagttagaaagaagaagactgaggattccaaatcatcaaagaagaagatgacgagaaacaaagtgaagaagaagagcaagagcaagagcaagcaagtgctggatggtgttccagagttcaaaatcaccataaggaaatcatacctcaagttcctggtaagattcaaaccataagacagaaccaaaacaagaacacatctctgtatattggtgataatgattttctggtttttatgtatcaggcaataccaaaacattttgtggatgatcatatcccgaataagtctaagattttcacgattcgtcacccgaatggtggttcatggaaggtgctttgcttggtgagggagattcggacaatcttctcaggtggatactcgaaattggcaagagagttccctttgatggttggtgacaaatgcacctttaagcttatcaaacccttcgagtttgtccttcttacctccaagaagaacagagagaagatggatcagtgcatgatcgattgaggaatgaatgttaagtgtcttgctttctttctctatggagacattttatgtatgttttgcgtgcttattaatttcgctgaaactctttagcttgtatttcctgtagaactacttatgtcctgaacttcgttgtaagattgttatgctaacaaaactatctatgttgttgttacttgtcaagtttaattcctcttctcttcaaccataaaaacaaatggacaaatcataagttaaaaacacattgatatgagtggagtttggtccaaaaatcaaaagagtctgtatttattagaaggtggagtgttgtttatccatacagatgaacaaaacaccagtcacacaacagttaacaatagaaattccgaccacaaaaacacaaattatagaatacacggtggtgttatttagagttctccgagcaaactcagatgtgagccttgacaacggtcacagggcatgcaacgttgttgacaacatggttgcttacacttcccataatcatcctcttaagaccaccaaggcctctgttacccatcacaaggcttgagagaggaatctgttcagctgctgcacaaatcttctcacgaggatctccccaatatatcttcatcactactgtaatctgcacatgtttcacaacagttgaattttggttaaatacagaaccaaacaattgtggtaaagaaagtcacattcatatggattgacaatgttcacttattagtcacaactaacaaggcaacataaagctttcaatgaacttctgaataaaactatgatagatgtaatgtaacatattcaatgtcagtaccgttacaggttattcaatagagtatagtcccaccaatcctcagattaatttgtctagaacaccagagatagaccattattttgtacaagttatcggtactcttcagtgatgcatattcataaactatccgcaactggaagatcaccatctttgggaatcataatcttaatactctgattcaggtattgttatgtgaacattagtaaactaaaactgttgtaagcataaaagtgtttccagttgcagagaggttttatggattattctttcattaaaagggaaagaagaagtagcttaccgttttcttcctagcggcagtattgacaatgtcaagggtttcagcatctggcttcaatgcatactttttcatcacagcagcgtcagagaattcactcataggaataaaagctgaaaagttacaaacacaaaaccagagtcaaacaacaacgagatcattagtaggaattcaaaccataaacttgggaaagaattaagatgatcatgagcaaaacacgatcaactactacttcaaatagattctttccaaatttaaacaagcaaatcatacagaaccaattatagatcaaacgatgcataagtaagtcaggttccttcaacaaaggtatgcaagatcagacaaaaccggaaaatcataagttaaatcatcagcgatcacacccaatttctatatcacgtttccaggaaaacaatataaaggtgaaaaggaatttgagagagagagagagagagagattaagaaggtacgtgatccaacggtctcccagagctgcatctcgccttcctcgtaattcatatcgtgagcaatagtgattaggatcagatgatctccgtcgcgaaccacgttatcgatcgcccagctcagagccttcttactgcagtccgagaaatccaccgccactccgatccttcgtccaccactctccgccataactctctctgtaggtatacttttttctctgaaagctgattctctcactcaaagacaaatgggttctgatgtggaagaagggactatgtattactaaggagattgaaatggatcaacgattaataattattagttattcgctgtaatgctgtctaacgatacagaaacatcatggccgttgaatggagtccacgaccgatcgcagccttacgattaaaatagctcaaaaaaacagtgggtggaaaatatcttcacggaggcaaatgtaacggacaagataagggcggggtctgggcccaccaagtttttcaacactgtccaaaaagacaaacagacattcacgttcttaattcaaatagtctctccactagtttagtattttaaagacggtcagagtctgttttttcaactaatcatgacaagtaaaggaaaattcatggtagcttcaaatcttgagagctcgtgtgatttcccagcaagtgtcgtccgtttcatgaccggaacccaaattccggctaccgctgtttgctaaaatcactagaaaccattcgttctccaatgaagacggatacattagctgatcatcctgaaccaccaataattttacattgcttcttttattcattcattttaccgccatatattagctactattataaccaaatatatataataacagattgctttgttacctctgggaggtcacagaattcatcaggagatatttgaagtatagctgatgcagactgaccagtacaccacgcgtatagtttggtttcctcgtctgcaagtgttatcgttatgtggaatgttctcactacttctgtgttactgttgcagcttactcggcagaaactacaatgcaggttcgctccataagatgatgatgattcttcatctatgaaatggccgcaaaggctatgagctagtctagtgttgatgttatggcattggtcgatctcatccagcttaacccgacaaatctgtccaataaagaaaaataaacgaattatccagacgtgcaaaggaaacgccacataaagctctgtgaatcatttagagagcaagacgaacatttattgcaggttttctctgttttgatatttgggagagagtggagatcaggtgaatacaagaagaggtcagaaatgcaggcaagcagctaaggtttacgaatgtagctttctcgtctttctcatgccataacatctcaatgctgctcaacccaaaaacaagaactccattaatgtttaagctaaagcaataaaccaatacctactgttacttattgataagtattcagttcatgtttgagctaaatcagtttcccaatagcgatggatccgtagtatatctatcagtttcaaagcaagagaaacggcttaccagttctcttttgtgattttgcaggataacccagacacgtacacgacatgaccaagccctaaccttcccaacgacctggaaaccatatattatatatggttcaaatttctgttaaacagaatgttaaagccttcaaatttctgttcagatgtcgtttcgagattcatgaaacacgcttataccagtaattggtaaaatggagcttagcccatattgctccagttgtgtcctcgatcttcaaagaaaagaccactcctgtggcgtttggatcacatgaaatgtctgttacaaccccataaagactgatgccagtcgttttgtcacgaatgtccgttatcatcgtctgcagaacttcaaccaaggagaggaatattagcagatgcagctaagacatagattttcaaataatagccagagcaggctttacgtataatctcctaggcttacaaggctgtaaatttccaacagagatgatattgtgcgccatataaaagcaaaactgtaagacttatgaatgcattttggtgctatgataagaaaaaccaataaatggtatgcatatgaataggatctgtagcgatatgaacctagattcagtgtgaacctattaacacggaagtgatgaagaacctccctattgcctgatttctaaacacggaattgattaagaacctatgaacctagattcagtgtgaactttacaaatatcaattaccataaccatcaattaacatcatgcttgaataaatggtatcttaacttctactcacccgaaaaggataattactgaagtctacagacccatcggcatcacgaggcaatgtcacctgtgaaactccgactgaaccaagcagtttagatccttgacactgatgttgtgacaacgctacacaaacctgaagaaaaaaaaaacaaatcaatgcaaaaatctgaacagaaaaaggaagcaacataaaaaaaacttcatttacccgttcctcttgtaaggttgatggcactagatagagatgtgttgcgctaccgtattcaaggcagaactcataatttccttccattgcactctcttcgagactagaaatataaggcctctcaatcccaagcacacttcccacactgaaaatgaatctataagaaggggttggtcgaaaaatttaaaggtagaagcacccagccaggagcttacctcagaaggtttgccacaatgacttgctctccccacaagataaattttaacctatcgccatcaccatctacaagtgaaatttgccttctacgtgcagtactaaacgtgagttcagattccagaggacctatagattcaattctgctctcaaacaaagaggggaacatgaaatattactttagaagttaagtcatggtaaccactcaatttctcaaaacatatacttttgttatggggtactttacgcatatttctacaattttactataaaatcacaacacttggagttatactaggcattacttccaaaaggttttgatctgataaaaataatcactgtattagtatttgaagtttcttgaatgtgtttgcaactaggaatgtgaatagtaagttacttttaccaagattggtagtaagattgtttacccacatattctcttacctagcatacagagagtaagaagctccatcgttgaaagcatcaagagaaacagatgagaaagtatcggaacaaaattgagctgctatgaggattgcatcatcatcttggtcctgtggtatttgaaagtcaggtaaagactaaaccactctttttcatataaacttcgcatgaaaactgagatgtgttaggactaactacaagcaaattcaatactgcagttctaatttctctttcaaaagattgtcagaaaccaaacctcatctagcaatacgacaagatactcagttggaagtaaccgtggagtgccaaatccttctctcgcggtacgaaggtagcatccagtgatcaaaacttctctgcctttccgaagaatcccatttggtgtttccaccaactcataatacctagacaagagacattagatccttaagaaactctatacagacatcataaacttatgacaagcagtcaaactcatctcaatccgagatgatgataattcacctctaccgaataagcatacctccgatgtagatagagatcaatggtgttggagctccaaaagtcccctagtgtaagcatgaatatgtttgtacctgaaatagaatttatgttttaaatggataaccaccaacttggcatcgtacggcaggggaaatgaatgtgctgccagaatttgtaagataccaggaagaacatcggcattgataataacagcttccaaaacgctgttcatggacaaaaagttcttctcataaatggagtcaattgtaacggtattagcgagtcttcttcttctgtgacccttcttcaactgatctataagttccggcttcttctttgacattcctggtttgttttgctcatgccatgcctacaacaaaaacattcagagaaacatccagaatcgactacagaatgtaaattaacaaattcaaagctatatctcatataataataacacattgatcaatctcattggccaagagaattcccaaaaacaaactgaaagaaacgttacaatgttactcatcaaatcaaagcatcccacatactataacttccccaccgataaaaacatttcaaaatcgaagtatgagagagattagcagcacctgagagagatcggacaagagaatcgcggcagtgacaccgctagaataagcagtacaggttttcagaatacgcgaggcgacccagccccaacccggaccactagcctcagtcatggcttcgccgggacccctcttactctcttccttctcatcttcgtcgtcttccggtgaaatcacagttctggcgtagtccaggaaagccagaaatggatcttctacttcttcctggtcaccaatttcaatgagcgatgctccgtttgtatcccccatcagagctcggataccaattcaaaaccctagatttgacgttactgaaattgccggggtttatcaggaggaattcagggcatttgtgctttcgcggggaatttttaaaagaattaaaatcaattcggtgctcaattaataacgcgccggcaaattcctcaattaagatatgcgttaatctaattgattttcctttttcatcaaaaggccctaactttcaggtctttacacattccccactatatttatcttgtgatcaattgttttcattctcccgtataaatgtaaattttgaaacaaaaatcaaaggataacagagtaaaatagtgttggctctgtttctacatcacccatttggggtttcaaagtcacagtccaaacttcttaggcctgagatatcttacgccaaacttcttatgcgattcgttttgaagatgtaactggtccatacttcaaaggataacagagttaaaatagtgttggctctgttttccgaaccagtttcgacaaccaccactatcacctggttttctcttattacctgcaatagttcatctttaacagaaaatatagggagatactgtcgttgctccctcacagcttctcctttcttcatattgtgtacaaatttagcctcacctttaaaatctagaagcccgaattggaacaggagaagatgcagcgatatcccatggagaagcagaagacatagttgaacgttctgctcggcgagacaacgactctggtgagaaaattttatcaccgccggtgaggttatgggactcgctttccaaatcttttatagtgagaatgagaatctcccaaaacctttctaaaattataacaattgctaattctttaaattatacatcgacccttcatctttacaccgcctcaataaatatccctcttattttttcaagcaccatttattcttcctctagtgaatctctctaacctcttagaatcaagattaacgtccagcttcaaaggatccaacgacagcttcgagcgtaaaaatacatcgaggttaaacccgctcccagtttcaatgtcctcgcgtcccgcagagctctcgggttgctgattggattggctatctttggttctattcatgtttctaagagtagtagttaatctgttgttgtcattgttctgaccaaagttcaagagccttttaacggtgtctaaagccgggtcaataatatccaagaatcctgtgacccacgaagcatcatcaacaacctctgtgcgctgttttgcaatgaagtaaagattaatatataaactctacaagaagaacctgctataatatcaagaatgtgtacaagagcttacttgttgaaaatagaggttacggatttcttcagcacgttcggtgtctccttgatcttcctcaagttgtgcccatgtcatccatgtaacgtagctttgtgagttaatgttcaatgaagatctgaataatcttcttgctgctgataagtttcctgctctctgctcgagaactccccacgcctgtagagacaaagaatttgtttcagcatcctccaataatatgctaatgatttagcaaacttgccagctaatttatgattcaaatgtttttggctagcaagtcttattccctcgtttttacaatgtttatgttcattcgctgagaggacagcgagaagaatttattagttatacctgtagacagcgagaagcactttcggtatttgcatcaatggagagagctctttggtaaagttctctagctgttgttgtgtttccttctttccattccatccaaccccaagcctaaaccggaatacactttcaccaatcatttcccctttcatacacgattgtaaagactcttgaattcgctagccagatagaactgggtaaaactaaagtctgctaagtgttaatttacaagataaaccaataaaacgggcgtaaagaactattagcaaaatctaaagctcaaactttaaggaaaacgtataaacaaaacctatttgagcagatcaatcatgtaaagagcaaccaaactgaatcttgtatacttacaatccaaacaggttgatgtctaggatcgagctctgatgctctccttagtaaagcccgggcaagattagcagatgaatgtttgtactccagtaagccaagggactgaaggagaacagggtctctaggatttagcgcatgacctatcttcaggagctttcttccacgctcaacattacctactccagcttcaaacaccccccatacgtgccacgcaaatctattcttggggcttgcctggacagctttctgtgaaaaaataaaatacgctttcatatgtagctcgatcgcttaacaggcagtaagtcattcctgggatgaatatacagcctccactgctttgacctcattgtgaatgacaaatataaaaaaggatgtagcagttagtagttacctcaaaaagctttctagcagctgggtatctttcctgctgtatttccaactgtgcccatgcctgttcataaattgaacatttagtaagaaaagggaagctcattcataactacaagcagccttttagaaactaaattatgtgactgatgaggaaaatacagggggggccagaatgtggttccatgaaaatggcagtagctccagtagcattctctttttacacaattatctaagaggattaatcacaggatgcagctttatggaatggcattgtcctagttggctagttctcatcgtaaacatgctgatgatacaaaacacttaccaaccaactggcacaactccttgaattgcatatagtcgcctgcttgaacaggtaccttgcctgttcataccggccagctttggcctccaacaaggcaagtgtttggtagatatactcgtttctgccacaaaacttgaggcctttggctagaagattccttgctttacttatatttccttgttttatctccaggtttgcccatccatgccaggctgctacatgcttcttgtcagccaccgtggctgcatcaaacaactccctggctcttcttacatttcccaacctgttttccaggacagcccaacactgtttcaaagtagacaggtacaagatatgcatgagaaacaaaaagttggcttcaagtgtttccttcaaaactcatgtcaaaatcaaattaaaagccaagcagcacctgccaaatgtatgaattctctccttgtgtagattgacaccctttttcatacaggattcgagcttcagctaacttggattgtttgcttagtatcttccccaatgccacgtacggtctcccatcctccggccagtaagctatgcacttaaaacccaacaacacaggattagattcagtaccatgttcaacttgctacatctatctctctttttcaaagtctagcgatcattcatcaagaagctaactatcaacgaatcattagaaacctgagagccattctctaatttcatactatactacacattgattgttggaacaatcagaattgcataatcatacactgaatgatcacgaccaaacagcagaagacagcgatgttacttaccttctctagaatcttctcggcgtctttgtatctgaaatttctcgccaaaacctttgctttgtacagagacaagtccaaattcaccgcaagcggtctctcttgagctcttgcagcagcagcggctgaagatgacgacgacgattccgatctctccggctcaaatatcggcatcttcttagctatattactcagaccagcatcgatcctcgctggatacttttttccctcttcctcactagattccttatcggaattctccaacaacggccgtcgaactactaatactccctcctccgtgttagattcctctccctcgccattggcagattccttttgcggcgaaaatacacctgaagaagacctgtcgacgactgcatacagatacgtgttcttagatgagaaagtaggatgactgagaaacgattgaccggagattccatgagttccgatgtggattttcgtcggtgacttacagagattctcaggaatttgaggagtgagaaacgatagcgagaatgaagaagtattggccggagaaggagatgaagacgaagaattcggcacgaagaagaagtgcattgtttaaaaaagctttaactgataaaaccgtttgtgagctttttcatggaggagagacggagaagctaggcgggctcggggaagaagaatgatggtcatgaaaagtacgatgttacccttatattaatctcagcttttatgtatattgtaatgttacgttaagggtgatttggtaatacatcggagaatacgactgtgcaataaccggccacgttgctaaagtttttggatggcttagctgaattggatttcagtgacacgtggtaatatcttattggtttgatgctctgagggagattcttagccaaaaaatcagtagaactctggtatggataggtgcatgattaagttcgtagtcatccaatcacaagaggttggaaataaatttttctttttcttcaattttagtttagctataatttttctattgttatagttggaaaatagtaagaaaatttccaccagaagactgcatataacgatgaaaaaacatgacaaatatggtactattgaactatattagataactttttgcgtttaggaccagaaaaaaaacaccatgctttggtggcttggtgcaaagcctttgcgtatcaaaggaagctaaggcttccagagctataaaagttgtcaaaaaccagctatgtgatattcaacaaaacggaatgcaaatggatcatgtatagtacaatgcgtggattatgcaaattaatgattgatacgtacgtatcaatctggaccgaaataaaacttctttttttttttacgaccgaacataacttacgtatctaatatgtttgatatgcaaagcagcccaaacaagaccgtatataaaatatacacagttatttctagcaaaacttgtggccttagcttggcagccccggaaaaatatgtaagtattatcggaaaagaattgttacgttactcgaagccgaccgtatgtatttcttatgaaaatctgtcggaaaacataaacgttgacttgtgatttaaatacggtctacatgattctgtacacaaaaaatgatctagatgataacataagaaaaaacaaaaacaaggacgaataagaagaaatgtaaatatatataaatgataaattttgataagaacgttaacctattctttgtatttaatatctgtcaatccagttacaatgaattaaaaccttaacctgataagactggaattacaattctccatttttatcacacaagaacagagcacacaaggcctaattctcctcacaacaacaatgatcacgcatgataaatctctatccttcatttctatctctatttaaactcgatctttattcttctctttagctcttcactcgtgcctaattccctctcacatgtgctcttatcacatttattacaggacgactatggtcaatttattttacaaacttttattatggattccaaatttcattaaaagtcacagtataccaatatgtttttacatttttattgtattcctatgcataagtcaaataaggatgatattctcgtagacacttatagtagaggctagagcaaataatgaaaatgatagtggggattttgcattgaatgtggctaccaaatccaaagtagttgagaagctctaaatgtagaacaaagtacgatatatattcttaaatgtaattacacatcctcaccgatcccactgtgtttcctcatagttttatcgaactagtaattgtttgtattttctctgcacgttcttattatacaaaagtccttagttcatcaattcaattggttagaaaacacattagagtatatattatatatgagagagtgtcgctataacttatacgctgtattgtcagtacgtaaactaggtgaacatggaattaaatcaaggatgacaggttatgataggaataggagattaatattaaaagagacaattggtatcactcattaattgcttcgtagaaaatttgagcatgagagattgacatgagaacatgcggagaaacgcggtgtgaaaaagagcttgaagctctctcaaccatatctcataaatgttcgttgtacttgctatatatagtgttattggcttagtcaattgagctataacaattgtatagtgaataacacgatactccaacacttactaaaagatatggggaaagtatcgtttgggtttttgggtttgatgcttgtagtggtggtgattggggttgtggagtgtaggagatttgagaaggagacgttaggaggtggtggtggtggtggacttggcggtggctttggtggtgggaaaggttttgggggaggaattggtgccgggggaggttttggtggtggtgcaggaggaggtgccggtggtggtttaggaggaggcgccggtggaggaggaggtattggtggtggtgcaggaggaggtgccggtggtggtttaggaggaggtgctggtggaggactcggaggaggtcatggtggaggtattggtggtggtgctggaggaggtgctggtggaggactaggaggaggccacggtgggggtattggtggtggtgccggaggaggttctggtggaggacttggaggaggtattggtggtggtgccggtggtggtgccggaggaggtggaggacttggaggaggtcatggtggaggtattggtggtggtgctggaggaggtgctggtggaggactgggaggaggccacggtgggggtattggtggtggtgccggaggaggttctggtggaggacttggaggaggtattggtggtggcgcaggaggaggtgccggtggaggtatgcatgaccaaaatctaactgtaaccatataaaatggtttataactataacctttaaccacaaaaaaaaattagttacgtttaaaaaatatatactaccgtaagtgtatcaaaaccgtacagttaagtagttaaccgtatagttaaaatcttaaaaatataatcgtaaatgtgcagttactagatctaaattcagtccactaatctttttccataaatcaaatcataaatagtttatataattattatttttattcttacaattgtattttaatgttcaccatatcttttctttagtgttgtttttgtttgaaacatgtattgttaataactcaatcactataattataaccattaatttaattatttattggtttatttaagaaaactaaatagttgatttactatagatattttaagcacattaatacatatcgttaataattcaatcattataatcacgtaaaataaatattatttgaaatatcattatttatttatttattataaaggttaaaaatataatattttctacttcatatattaattttatcataactatcaaataactgtaaccatattaactgtatatatagtttttaaagttataattaaagaaaattataactataataggttgttaataaacaaaaatcgtaataaccgtaaatgtggttatgtctaggtggaggtgctggtgggggcggtggtcttggaggaggacatggtggcggttttgggggtggtgccggtggtggattaggtggcggtgccggcggaggtaccggaggaggatttggtgggggtgctggcggtggtgctggtgggggtgccgggggaggattcggcggtggtgctggtggaggtgccgggggaggattcggcggtggtgcaggaggaggtgctggtggaggagctggcggaggatttggtggtggtgcaggcggaggtcacggtggaggtgttggtggtggatttggtggaggttctggaggaggatttggtggaggtgctggtggaggagccggcggaggtgctggtggaggatttggtggtggtggtggtgcaggtggtggatttggcggtggattttaaattctagtaattgttcatacaaaatctattcttggcttgaactaagctagtgcaagttacttatgtaccaagtcatatgaaaagaaaagtatatcaaatttatatatccttaattttgcattagtatgtctgaaaccccataatttttttaatcagttcccaatatttcactttcgtcttgctaaacttattcgggaaaatattttaaatttataggatttaaatttaggttacatatattattaagatggaaacaatcttatataatgtttgcaaacaacataagagtttccaatcactctaagaacattttagagtagaagtacacaaaaaaaaaagagagaaaactatttcgtatagtataccgtcgaagaaaggatgaagtactcttctttcttcatatgttttttttccaagccacaccaaaacgcgaaatgtcaaaagccaaacgcgacagcataaggaactctaaaacttttcctgaagccaaacagggagccaagaagtgccatcaataaaatcaatggacaagaaagactcaacttcttgtttggtaagatctttggcccagtcagatctcttttgcctctcagctcctggtccatgacatttatactccccatggtatagattcctgattgatcaaacctcaagagcattagtttatctattaataagtcgtctaaattaggttcaaaaagttaattaatagaggactaactgggtcgagccatggtaactccagtttgtccaaccatcaggcacaacggtcttggacaagtaagtcttggcaaagatgactcgagaataaggtcctttggctcggcccaagtaaacctcatcaattccgtacactttgcctcttatgaacacgtaacccgttttttcctctgcgctttccctatggtgtgctgtgattgacccatacggtttcaccctcttgtctgatatcacaaatatctcacaattctgtaacaatatttgggattagttttctttgatgctatggtttagataatgtgtataaagaggaaaaacgtacgttgaaaatggaagttgcgcgaccgaagatgaagtctatggagccttggatgtaacactcatggtagtaatgtctacctttgttatcaaacaaagtgttgtgtaagctgtagaacgcacaatggtaaaacgctactttgtcagcagccacaaacgctgccaccgattggttctcagatgtgaatgccattccgacaggtgcatcattctatatgtgcatcacaccaagtcattagttgacgtaattaaaaggaaaacaaatttgaatatctacaattgttatacgtactcggatgctgataccaaaagcgacaaagtgattagcctcgactttgaaagtagctgaagcaacattgtcgaccgaactttgcgaagattcgatcaccgtttttccttttccattacccctcatgaatatgaacggcttgttctccggaatgtgcactctctccctatataaatcaacaaattcaaaatcataaatgtactatatatttaggtaaagccataattgtataagcaatatataatcgaaacttgtcttcaatgacaagagctagtaattagtttactaaaacatagtaatgtatatagattacggctttgttatatatatagcatggtttaggcatatcgatacttttaaaatttaaatggttaaacctcttaaaagtatacgtacttgtagattcctttacggacatggacaataatccaattagagttaccaacagggacagcatcgatggctttctgaaccgaagtgtagtctcctttgccttcgatatctacaattatcgatctatttgtcgcgattttttcagtcaaaagtggggcgtcgaatttcgtcttttgcattgctgatgcgtccgaaccccatatggacattacaactagggttaggacaaggatcattcttgttcgatgacccattattttttttattttttcttggggtttctacttttcttttggaatggggttatgagaaagagattatattggtgaagggagaggtttaatttaagaaaacaggtttttaaatttagggtgctttgttgtgtttgtttagttttgggaggtaagggattttggaggaagaaatggtttttacttggaatgttttgttttttatttttagacatttattaaggattaatggacgataaatactttgaagtatatttctatctttggtaactaattacaaaaacaaattgtgaatgttgtgtaaatgatacactgtataagccgcttattcattaatcaacggtaatcaaagaagtaccttagtcgggggccattagaatctcgtgaagcccaatccaccaatagaacgtcaattattgtcataattaatttcttataccctacaaaaacattactgaaaatcaaaatcttgattaaaaaaattcaatggatttatgcattctccataatatacgataaaagttgtctcaaaacttcaatttgggagtgatatatcatcttatatgattcaatctgtatatggttcacaacttcttctctcatgttttttctttttattggttcacaacttcacattcgatgtacgtattactagttttcaacgtattaatgtaattaagttagcaaaatatttattgtgtttagctgtaataagggtaggaccaatatattcgtttatagaaaggctatattttgtccttaacgaatccacaaacctcaaacttgacgaggaacataggaaaagaaacctataactttgatcagtttgatgctactttattagtatccaacaaaaaaaaaaaaactatgcttgtggaagtttaccagttaccactacactctacactctagttgacattaaattaaattaaagtaatttttcgtattatagttaaattactgctgcatatattttcacaagaaagctttacgttttcttaccaacaaaaaaaagctttacgtttactaatatcaccacatttattactcttaacggagactctagctcctcaacttgtggacctttgtatgttattgcggatctaaaagaacacagagaattaagagaaagcaatagagagagttttaggatgacgaagggaaatagtgaagtcacagtgttgattccacatttggaaaacagctagggacattaatttcaccgcaaattcgtattaatgacttccaccaatattactcactggagtctctagaatctctactcgtctttttctactaaccctacacctttgggtcattgggtgtatatatttcttctgttggactctgttttctcaatatattgataactatattccaattatttatatcttatagcctatagactatagataatgcttatctgattttttattttattttctgaaatatgaaccctccattgacgattgtaacaatgaatgtttttttttgggtctagctaggccaatttctttttgctattttctcacgttttaggccaatgattgatgataaaaaaaaatatatatatatatatatatattcacgtttcacttaaattttagaatattttttcttttctacttcttttaattcaatttaaccaagcattcacatcatcatatatatatatatatatatatatatatgtatgttgttgaaatatttaatcaagcattattagtttatgataaattaaaatgcagaaaattgaaatgttattttatagtataagaacagtaattaaaagagaaggctaaaaaatccaaaatttgataatacattaatagacatcatgtggatagataatatatgtgtgtagtatatggatgcaaacgtgaaaatcaacctaactgtttcacattatccatgcatgttgcttttacccattctctgtcttgtcttctccatcaactgttacctataaccatttattgaaccaaaccggtccaccggttcgctacttttatgtaagcaaatgcgtgatttcaattcccatgtaccgcaactatactgaaacaaaacaaaacacgaattttttttggctatttctctacaatataattgaaaacatatactttatccaacatcatattaatacagatatattcggttcagaaactgttaaccaactttaaccggaaatatagtagtctttaaattagtattggttgactttttaataactaatgtcacatctctttagcaaaattttataaataacgcatataacattagccacattagtaaacctagcaatctggtttcgtttcgtataatgagtcgagaggatgactaaactcaacccaaaaaaatcaataacctatcggttaaaactaggtgggatctcaaaccaatttcatgttttaaaaattcttttcggttgggattattaatgtcacgaattcacggggactttcttcagcttcctatttatacatacacttccaattgcaaatacacaagtcatcttctctctctttttttagtgtgtgcaaagtcatcttctcttttaatatttacctaaaattccaaacaaaagagaaagttatgaaaccaaagagcaaagttgcagaatctacagctgcatcatgttttctcgtcatgagcttgttatgcagctgcattattggtgaccaaatggagactaataatgaaggcttgtcttacagttactacgagaaaacttgtcccaaagtcgaagagatagtgagatcttcactttcatcaatgtttatacttgatcctacttctcctgcagccttgctaaggcttatgtttcatgactgccaagttcaggttctctacctatagccaaatccatctctcattctctctctctataagaaaattctcaatttttgtttccaactcaatatagggttaatttggtttgaaaagtgtttatatatttcgggattcgaatttatacattttgtgaataaacatatccattaattagatatgattactccgtcaatacatacgacaaattggacgttccgcgttcgtacatgttatgtggtacgttttttctaacatgagctttcgtttttttttttttaataaataaacaaaagcttgagacgttttatatataatttaaaatttttggtaactacgtaatttctcttgcacgtgatcgataaatttagaagacaacaagatgcggaaatttttaatattaagaaagtaaacaacatgcggaaaatttgcgaagaccactttaattagttaaaaaatgttacgccccattgtagaatatatatatatatatatatgtatgtatgacgaatgaagtaattttgtttcatttatcagcgcccatcatgtcatttacaacatgggatataatggttttgtgactaaattcataggcatgtttttttatataataatgttgttatttaacttaaatttataggcatttgccaaaataaaattataagctaaatagcaacattattattttgttttatttggtttgataaatatagcaaaactaatttcattattctgacacgtatgaaaaacagatataatggtcgaggatatattggagatgatcacatgttgttaatctgagttatacaatttatggatgaaaataatagattagactaggcacttgaccaaaaaaaaaaaaaaagagagactaagcacatgcatgaaaatattcactgttttttctgatatagataagtcacaaaatttcgtttccatactctttgaaagagatggagaaaaactcgaatttgttcttcgtatttattccatctcatcatcatcattaattgttgggaacatgttacatgtaacagggatgtgacgcatcaatcctactcgagccaattagagaccaacagttcaccgagcttgattcagccaagaacttcggaatcagaaagagggacctggttggctctatcaaaacctcactagagcttgagtgtcccaagcaagtctcatgctctgacgtcatcatcctcgccgccagagacgccgtggctctcacgggaggcccactcatctccgtgccattaggacgaaaagactccctctccactccaagcaaacacgtggcagactctgagcttcctccctccactgctgacgttgacactaccttaagcctattcgctaacaaaggcatgaccatcgaagagtccgtggccatcatgggtatataaacattatttatatcttatatcttatgcatatttaattcatagaataagatttcttcgatctcttgtaggtgcacatacgataggagtcacacattgcaacaacgtattatcgcgtttcgataacgcaaacgcgacaagcgagaacatggatccacgttttcaaacgttcttgcgtgttgcttgtccagagttttctccaacttctcaagctgcggaagccacatttgtccccaacgatcaaacttcggtgatcttcgatacagcttattacgatgatgccatcgcgggacgtggcaatcttaggattgactcggagattggagctgatccacgtacacgtccatttgtggaagcgtttgcagctgatcaagaccgtttcttcaacgccttctcttccgcgtttgtaaaattgtcgtcttacaaagtgttaaccgggaatgaaggagtaattagaagcgtgtgtgacaaggttgattgatgtatatttataattatcaaatgttaaaaatattaaaaaatataattagtataaaattaaaatagcttgaagcatagtaaccggacatagtaaaaccgggttacaaaagaattaaccataaacaatttaccgttctcaaacactccttgcccaaaattcattggagaatcaattttcaccccatcgatcagaatcattcgaaatgattaatatcattgacgcactacgatggtggaccttacgtccttgccacagtataacaaattttgattttaacaaatggtttaatgtcttttaatgaaatgctactttttgttccccagcaaaaaaaaacaaatgtaatatgcaaatctgattttatacaaagaaggcccaatttttatatttgcttaaaagacgctacaacagttcaaagccggtaacattgaattcaatcctcttgctgcctaatatatagtgcttcactggttcgttgtgttttctgtaagtccatcttaccgtcttaattttttttaaagcctcagatgtatgtcaataatgctgtaatttttttcttttaaaactacaggattttttcttcttgtttaagttgtagtgttgaagttttagttatatgaaaactagacattatcgacagaaacttcaaaaacaaaaacacaaaagataagttttaaaaataaaattatcaagaatgaataaaataatatatacgattttttttaataactaatataagacattttatttacttaaaaaaatattataaatattatatttaccacttatattttattttaaaatatatacatacaaaaacttacagctacaactaattcatttataccaaaaactctacaacaacaaaagctacgacaacagtcagcactaaaaaactacagctacaacccaaccaatcacctaaatagttgtttatcttcttggatcaattctgatcataacaatttatagtttacatatatttctgaattatttataaaacaagaaattttctaaaaaaaaaaaaaaaaaaaggaaccaaatattcgaatttaaaataatcgagaatatcgcatagtgatcaatatgaatatatgaaattgacttgtataatatgtaggattacaactgattatatacagaaacgaagagtaattatgctgagtaatgagtggaagaattacaaggatacgactcaattagaggaagctgaataagcaattcgtatatgtcaaacacaaatatggatcatctataccgttgcttgacttcatttgatatgctagttttggaattatattatgtaacacacagttcataagttttgcaggtaaataaaaatggtggagatctagagcttaacatcaagcaacatttgccattcttcataaagcagcagcatatgtatattgtatcagacgacccatgtaagagtcacatcatctagaaaagcaaagtaattgaaatttatgaagagtagaatagagagatacacattagcatatgtaatgtaatagtttaagtgacatttacatttgatgtaaaacagatttatttaatatatggaactttgattcagagtttcttttgaaatttgagttatatatatagagagagactattaatcagcatacaaacaatatataatttttaacagaaacaattaaagataaaaactatatacacgtcggtttacaaatgactcaaaagaataagatttacacgacagaacttaaccgatgttaagattactaaaaccgacgcaaacgtttcgacgtataagtaagcgtcatttcctaaagttaagttaattatattaacgtcatgcaatgttacgacggtttttaaaccgacgctattatgttaaagtcagtttgaaaatgacgttaaagtcaataatgaccgacgtcaaataccgtttctcttgtagcgatcataatttggaaagtgttgatcatataacaacatatacttggatattttttttaaaaaaagttagtgtcaaaacaaacatggatcataatttggaaagtgttgacttaagatgttacctttttttttgtgcaaaaagatgttacctatacagtataaatactgaacaagtttgattgaaatagttatcaacatatacttggatattttccaggattaaaaaaaaaaaaagtttagacgaattatgggttctcttgagacatgcttacttttctttgtaatggttatgtttatgagtgcaattatgtctcgagcctcgacgagtgtagtgatttataatgatcttggaggtggtttgccactacggcaccactgcaaatcaagagaggatgatcttggataccagagtttagcaccaggtagatcgtggtcgtttggatttacaccggatatttttggccggactttgttttactgtcgttttagttggggagctgagagtcatatatttgatatctacaaacagagtagagacaaagaatttcaagagtttggttgcaaaaaatgcgaatggaaaatacggaaaaatggaccttgcaagttttataagaagaccggcatgtttgatcattgctattcttgggattaatatccttattttataaaacatgtcgtaactatcaatctatgtctgtctacttcttcttctacctttttttttcttttttgtatgaggtaattgtgtcttaatatgatattttatggtttgacctacaattcgttttcttttttttttacttgttaatgacacaattatagtcaaataattttagagcgaagtaacaaaacattataagaatataatgtgaactacaatgagcttttcttttatgcttaacgttcattttttaacaaaaaaaaagaattataaataaatagagaacaagtgttgatcgaaagaacaactatgtaaattatacatttgtgcttaactaaacgcatatcgattagagtcccatttcatgaccccgaaactcaatgagtcaaacgtagtgcacaatctagtgtaatttaaaaccagaaaaaaaaaaaaactagtataattcgacataaccaaatggcatagttaaacgcatgttggtgaatggaggaaactaaacccgcgtgggaaggcttttctcgagtagtggaagtgaaatattatcttaaaacatatactttcaatgacataaattggtgaagatttactcccataagtgaaatgcattacatctagaaacttatctcttttatatttatttccgatttagcaaaagaagtaagtagaaagtctattgagtcaaacccaaattttaaaaaaaataatgcaaagaacttgcatataaatattttacattataatttgtattaaattttgatttagtaaacatatataacaaaattttcatctttcttttaataatatagtttttagtttgttagattttttttttttaatttgggcaacacaacagttgtgtaatagtataggcaaagaaaatggtcggacagctaagggaagatcgctctctcctcatcagacaaaaaattacaagcgagaatttctttgttcctttacgaccggacaagacacgtccgtcatcgtcttctactactttctatcttacgcctctccccttatcctacgccaaaacatcttatcctgcgcatcatcccttccattaagacctagggttttctctctctcccatcattctcttctcccgatctcatttccattacccaatcccgctccttttctctgattttgaatcgaacccttaatacccagaaatctcacggttccgaggagtgggtttttgggggttagggttttcgagagatgttgaatgtcaggttcattgatgaatctgttttctctctgcttcaagccattcgggcacgtctgtgataattccgaagctggatcgggtggtggtggtggcgtttctggtggaaccggcggtgaaggcaaagacggattgctttggttccgtgatctcggtaaatattgcggcggagatttctccatggctgtgattcaagccaatcaggttcttgaagatcagagccaggtcgaatccggtaattttgggacttttgttggtgtttacgatggtcatggtggtcctgaagctgctcgttatgtctgtgatcatctctttaaccattttcgaggttcgtaatccgattcttcattgacacagtgattcgtcattttgacattcgagcttgagtgttttgaattggttttttggggaaatacatattttagatgaatccgttgacttaattctgaactttttgttcaaatcttggtgatgaagatggtgattggtcaacaaagttaggtactttgactttttaatctcgttggggtataattaggttcccattaagctaaatgcaagtttagagctacagtctttgcatttaaaaactgtgtttattgacttcagaaatagtaaaactttagatatgagtatgctctttgatatataggagtatttgtaatgcagtttgatatataggaggactctttgcatttcgcattcctggttctttgagattgttctttgccatttagataagggtccctggcttttgcattgatggtggagtgtcatgaatattaccaggcttaagcaaactaggagtgcactgtaattatgaaaggaggttgagcctctcttatgttttgattgctcaggctttatggttatgcagaaatatcagcggaaacacaaggagttgtgacgagagagacgatagaaagagcctttcatgcgacagaagaaggattcgcttccattgtgtcagagctgtggcaagaaataccaaatttggcaactgttggcacttgttgtttggttggagtgatatatcaaaatactctttttgtggcaagtcttggagattcacgggttgttcttggaaagaaaggcaactgtggcggactctctgctattcagctgtcgactgaacacaatgctaacaatgaagatattcgttgggaactcaaggacttacatcctgatgacccgcagatcgttgtgttcaggcatggagtttggagagttaagggcatcattcaggtagtttctcattctcctgccatcccttgtgatgttaattttccaaaagaaaaatgtaaaattagtcacttagacataactaggttccttgttgtgttaactctctttggtttcgcaaactttgacatatctaccttatgcttgtttcggaagagctaaatcatttttcttctctcttttttagtctttgagcggtttggcctttcttataagctatagaaaagttcattagaggtctgagaagtacaaatctttaaaaagttttgagaattagcaagtaatgaggtagtgcataagcagaattagcaagtaatgggtttctgatgaactccatacatatgtactgaacaagctaaatatatgtcttacgctctttgtgatgtctagttaccaataattaatcatctctaccatgcagctcttaagactttctgatgattccctgtatttactgttcaactttgattcgctgtttatataggtatcgaggtctataggagacatgtacatgaaacggcccgaatttaacaaggagccaatcagtcaaaagttcagaattgcagagccaatgaaaagacccttgatgtctgcaacaccaacaatactctctcatcctctgcaccctaatgattcgtttctcatttttgcatctgatggtctttgggagcatttgactaacgaaaaagcagttgagattgttcataaccatccccgtgctgtaagtttctactttgatttctctcttagatggcgtttttggtctagataagttttagattgcagttttaagcgagtcaagtcacaagaatcctcattattacaaattcgttaaatatataaatgatttcttgcattgtgtgtttctctctatgttcagggaagcgcaaagagactgataaaggcggctcttcacgaggcagcgaggaaacgtgagatgagatattcagatctaaggaagattgacaagaaagtgagacgacattttcatgatgacatcacggttatagtggtgttcttgaaccatgacctcatatcgagaggccacatcaactcaacccaagacacaacagtctctatacggagtgctcttgaacactgagaatcccaaacattttacaacaatgtttcttcttacttgattatatgacttttgcctagaatgaataaaaaaaaggcaacatatggaaaaaaccaaaaatgaaaaaaacaacatcattatcgtacgtaatgagttctctcttgtattaagcggctatgtttgacttttggtgtttctcttcaaagttctgatgagttccaagtcttttacttcttgccgttcgtcaaaagtatgtaatgtaacatagccgtgtaaccatactattctcgaatgtaacatcaagtctctaatcaaaattgttttggtaacttataattattcttcattcccgaacagtggttattcttcaacatttctaggtttaactttattgatcaaaaaagattttaagatgctcttggattactgtttcgatatttatgtgccacagttgtcaactcttcatactatctcaaatttgcggtttcggtgaaatacttaattttcgtacggatttgatttggagaacaaagtcgtggagcaacgtttggcttcaacattttacttatgcaagacttaaatgttagttctgattaaatggattcatggaccttttctaaaaaatatcaaatacaattccataaatctataaagttcttgttaatactaaaacctttgagagtactaatgaaagaaaaatcagattaagctttctaggctgcattatgcatcaaaaagaagttgaatgtcaatcaacaactcagagcccagtgcatattcatcatcttttccttcttagaccctcaacaattattctagccagataaaaaaattgaaacagatacaaaaaattataaggatcctcagagtaaaaatgcttatagcttttcatcaataaaaaatcaggtctcaaagatttcatgccatcataggatccttcaataagcttttttaaaaaagaaacgataactgattaggatatagcacgagcttattcgctatgcctggttaaacatagacgaagcgactcaacgcccctgcaataatctatcgcctcacgaataaaatcgatgaaagaatcatcccgtagatattgaatactctacaggaaattcaatctgagaggcgaatccaatcagctacaaaacgattctaaaagatcatatacaaacatagtaaaaacacagcaaactaaacctagcttaagagagatcgaatgttttaggcatcgccggaagtgttggtttatatacatacttatgaatttaggtcttagggttttttctgccgcaaacatcaaacataatgggccttcatactagactaatgggcttttcttcttttattataagcctgcctcagagaaaacgcataacccagttggcaaataatctttggcccgtgtctttttcaaacatcattcattcatttcttataatgctttctgattttaaaactcttgacactttgaacagaaaatggattcttgttatttgcatcaaacattatctatggatgttaaaatcctattatcttcagatcaaatccaaaaccaaaactatacaaacaaatataagaatgaaaataagtttctttttaaaaacaacaagtgttacagctacattataagtctgaattataaaatcttacaaatattagtaatttttgattaaacataaaacaaaactttttattatcgtagctaacaatcaaagtttttttttttaaaaaaaaaaacagacgctaattcgcactactacacaaatcaatagttttagaaaaaaaagaaaaaaagagagagatgatcataaaataaggaaaaagaagaaaaggataacaataattaattctaacaggatagtgcacatcacatggcagaagtaggacagtaatttgtttttggttacatgtgtataaaaatgcgattctttgcttcattcctctttgttaaaataaaataaaataaaaataaaaggaagaagaagaagaagaaaggattcgtcttccttcttccacaccctttctgacacctcatctcccctcccaccttctccgtcccgttccgtttctccatcaggtaattattaatctcctcttaatcatccctctaatctctttcccgtttcttcatctcccgattctcaattccatctacacagatcctcgattccgatccaacagttcgaattcagtttccgattctgatctgatcgaaccaatactcactgagatttgatcggcgattatggagtctatatctccggtatcgaatcagcttcttcagccgacgacgacgagctctaattccgatcgctctcgtcgtaagcgtaagaagaaatcatcgccatcatcggttgagaaatctccatctccgtcaatatcgttggagaaatggagatcggagaagcagcaacagatctactcaacgaagctagttcatgctttaagagagctacgaatcagccaacaaccatcttcatcatcatcttcttcgattccacgtggaggtagagccgtacgtgaagtcgccgatagagctttagcagttgcggcgagaggtaaaacgttatggagtcgagcgatactttcaaaagctgtaaaactcaaattcaggaaacacaaacgccagagaatctctaatccgacgacgacgacgttaaccaccgggagtatcaggtcaaagaaacagagagcgacggttttgaggcttaaggctaaaggtttgccagctgtacagaggaaagtgaaagtactgagccggttagttcccggttgccgtaaacaatcattaccggtggttttagaagaaaccactgattatatagctgcgatggagatgcagattcgtactatgactgcgattctctccgccgttagttcttctcctccgccgccaacgccaggtcacgaagggggacaaacacacatgcttggttagttggccaaactgtccttttatttttttccaattttaaaaaccaaaaaaaaaactgtttttttttatcatattattattcttctcactgtattgtttgttgtttgaatattttactattcaactttatttaccatttcgtcatgtatatccttttttcttgaatctctctattaccaaaaaaattagtgccaagaagaagaaacaggacagtgattaatttatgtataatcgtaataaatttcagtttcttgataatcgtggaagcacatttgagagattgtgatttagtttgttgtttttgcaatacttgttgattaagataacaactgtggacataatgacaaatttgtttttaaagtgtttggtgaattaatgatatggcaaaatgaaacaatggagagtataattagtttttgttttgttatgtttgaagttaggttggtgattggaactgagttctctagatctgttatgacaacatttattttcttcttctgtaaatggtattggggtttattttggtatgtggttagattttgacgatgcaaaaaaacaagttaaaaaagcgaaaaaaatctagagagttaacacaatcacatggttgagaaagacatgaacatggtgactcacatgattcatttctgcacatagggtatataatcgaccactgaccagtgttttttttacttatggttgattcttttactagtacaaaactactcggatacacgaaaaaggtgaataaaaaaaggcactaaaaatcttcttctttgtttttggtcggccaaaaggcactgattttggtgaaactgttagtattttggaggaatagtaataccccccaaaaaaaaaggaaattcatgacacataatgttttctgacacatgtcatgtggtttttacattatctccaactttctcaatacttgtacaaaacccttaaaccccaccaacacttatatttttgttgcacatgtgatgcattcaattgggtagacaatgaaaatctttcaatagatatacttcagaagagatgtatagtagagatttggggttaactactccaacttgacagttccattttattacatctaaagaaaacaaagaagaaaaggtctgaagaatttttggtttaatcttaaattgagtatttaataacataataagaccaactttcattttattttttcaagcgtgattttgaatagcattcaaaatctgcaaattgagtatttaatagcataattatcctacaatgtgcgtataatagcctaaaatattgcgttgctcgaggagagtattcaaatgacaacttgtttttggtttaatgttaaattgatgtagtcttgattttacgagggaaaggacaattatgtgtccgtgaaaataaattttgtccactaaaaagaaggaaaatgaaaaagagaagagcacatggattaaatgattttggcgtagtcatagactcttattgtgaataatgtcactacgagctttaagctgctttttgttaacctctttaatttgattgtcaataaagactatttattggtcttattccaatcacttttttattttgtcaactatttaagtcacttagttgtcggtttagatacactgtacacattttcaatgatcgttaacttagctggaactgttaagtgttaactatgaaagcactacgtacaaataagaaaactacataaactaactcctgatggttgagcaaactgtatcaatttatggcatgaatggtgcacttagttattgaagcattttttttcctaggatcaaccgatcgaactttttaagttccatatgatgcaaattaaataaactgtaacgttttaagttttaacgaaatggtgcattttgaaagtttctttgtttaataccgagcgcacaaaattgaaccagacgttaaatatcttcgtgcacacaacacaataatcagatggtccatgttaaagcatggatttagtcatttagacacttaagctaattgataaggatgtcttctacttctatataaatgcgaaatagatacacaacaatcgtggtatatatataaattaactaatcaagattgttctagttccgccatgacgggcagcctgtcgtgtgccgctgtccgaaccatacacaagccactgaccattcttattcgcacgtggggtacataacctgttggaccacacgtgtgctctcagattatctacttcttcaaaaaaaaaaaaaaactatttaaaggatacgtccaattgaaccctatatttaatgcatttttgtttatgtaactaactgcatgctttggtacaaaaaaaaaatcttcaaagtatgtcattgtttactttgcaaatcttgcatggatatgtatattattacacaaataaaattatttttcattttttaccaaaaaataataattaatttccacacctaaaatttcagaaagaaaggtttttagtttttacaaacctaacgtatacgacaagaacaaaacgttaaattcacaacaagtaaccacacacaaaaaaaaaacaatttaaagaaaaaaatgtagatagggattatggtacgtcgcttggttgctgtattgaaacaagagatgggcgtttctctgctgtctcatctcaatccacgacaaggtttgttgggttgtcaagtaatatacaaatcttcattaatcaatttcttattattttaaacactcttttttggtctgtcaacatacattcagttgagtagttgacaaaaatgctaaaaagttgtcttagcctgagtataatgcaacttaagttataccttattagtacttatttataaaagagttgggttttaaaattttaacttagttaaacacgtagtctaccaatgttactcttattttaataagtctatctgttatttgatacattttttccatgctaagaaaactgtttctaactttttacatgcatatgccaccaattacttttattaagtaagattgattgtcataactttgtttcttacctctacaaacagtggcggatctagacaaacatttagtatagggcactattcatttactttaacaaggctcgaacctgggtaaggatgaagtaatagtagaagcactaaccatttgtgctagatcattcttataagatgtctttacaaacaaaaatctataaagtagtgtagggcacgtgtcccacctccctccaacctagaacatttttgtttaaaaaggttttaacgttcacaaacaaatataatagatatttttgatcgagagcaattataacgtgaataagtatcactagataacgccaaaacttcatattcctataatcctagacggccaattattaaccctgcaatgctgaaaatcgatgtcaatacgataaatttaagagtccaaagtctaaacaaacagtctatatgaggttttctagaaattaagcaaacgaaatttagagtagggtacacttaaactaatgtagttacatctaaatcaaaatgttgtattcgaagtacttgtttttgtcatatagagactagagacgcagaactagtaattgatatatacatgaaaggtagttttgcgatttgacctatatctattctatgaaagcctacaaaaagcaatctagcacgagggtcacacgctacgatagttctttccttcgtcctctagaattatctttttttaaaaggcacttcttgataatcaattattgagtggcaattagatccctaaacattgattaagttcgtactaatcatacataatctcacctagattagttataaaatgactttagaaacctgcgccagcaaggtgtggaattcttcacgtttttactagtttatcattttccaagtttttcgccaaaacggttgattataataggatttaagaaaatatcaataaatcatacatctatgtttttcttttttttttttgtcaaacaatcatatatgttatattctctctttcacaaccctaatagttattttcttttttttttgttaaacacaagtacacaaccataataacttgtagtgaggaaaaaaaaaaagtacttcttatttactctctttgttattttttgtttgattgtttagaaaaaaaatttgtttctaaaagattgattttttaagttttccatgtaatatttattggttagtattggtgaactgtaattttttaaaaaaatagttaattatcattggtttaaagttataaaaaactataaaatactaaaaataatatatttataatcaacatttaatatattttcttaatatgtgtgttttttctaaacaatgaaacatcttatttatatttacaaataggatgtagtatttaagttaggaaagcgtagagagactcgttaatttgtccacgacacatagaaaagagaaaaacattgtccactgctctttaaaacgcacgtgggtaggaccctatctagttttccataaagccgtaaaacacgaaaataacaatttttcattacacacataaaataaaacctttattaatgagatattattattaactagaacagcgaaaacaacaaaaaatttccaataaaaccgcaaaaaaatcccaacaaatgtacactagtatatttaccaatattggatcaaatttcagattggtatggtggtcaaaccggtttgaccgtgaatcagattagtgtatggattaaccaataccaaatcttgctactgtttccttttatcttgcatttttcactaaactaattgctatagggttatgcatttcaaatgtatttatactaaacaaaacaaaaattgacagtctttctttactcatttcaaatgctgcatttgacactctttctttactcattatactaaactaaacaaaaattgtgttttcatgttgggccaaaatatcaaagtgttttatagttccaagcaaatatttgttagcagagaacaaatattttagtcaggcaggactcaggcctgaactttataaacgggctattgggggttcttataacagtaaccgatagacccaataatagaagtcagtaaagtcaagtatggacctccttcacgcgtatctgtaaagagggctaattccaaaaagtgggaggtcccaagtccaactacacatattcaaattaaactctctttctctcccttggatgaaacaaaaaagataggaggtcacgttaagtacactgtacacaccacataagccattaaccaatatcttatgacgtgtgtgtgataaaacatctacttatggaagtgttggtcgatggatcgtgctattcaaaacgtttacacgtatcttttaagcatatactataatttgctatagagagatgagacgtaaagaagacgacacatgttccaatactatataaaattaatatcatttaggatgatattggagaagtggcgattgctgtatcttcacctacaagagcactaagatcgcaggcccactttattcaccattgttcacacatattagtcaaaggaagctactagaacttacgtgactcttacgtttccattatcctcgattccttataaatacttacgcggaccaacattctctccatagatcatccaattgatttctaaattacaaacggcttctctagctagctcttttttctaaaactttcacaaagaacgatctcttaatttgtggctgacatagcttggttcttaataaagaagttgtggaaatgggaagcctcaagtacttaggagttgctttctttgttttagttgtttttgacgtctgtttagcagctagatcaccaaaagctcttggtagagggtccggttcaggttctggatatggttcaggctctgggggaggtaacggtggtgggggaggtggtggtggcggagggggaggcggcggaggaggtggtggtggagatggatcaggttcagggagtggttacgggtcagggtatgggtccggtagtggttatggaggaggaaacaacggtggtggcggtggaggtgggggcagaggtggtggaggaggaggcggaaatggaggttccggaaacgggtcaggttatggaagcggctctggatatggaagtggtgctggtagaggtggtggtgggggaggcggcggtggaggaggaggaggtggtggtggaggtagccgcggaaatggatccggctatggaagtggatatggtgaagggtatggaagcggatacggtggtggagataattacggtgactcaccctaaatcattcttattgcttattgtttcatgattctgaacttatgataataatgtgttcgatgttttgtcgttacatatatatacatgcttgtatatagtagatatcactcttcttttgctattgaagagagatgatgtggacctgtggtttcactttctatattaggaatcacaagtattggcatatgtattaccatgcatatcatttccgattcttatatatatcgttactattcgtatgtttatgtaccttgtttatcccacttattgattccttccactggcactaggaaatgttttggagacgtacgtccaataaaattggaacaacaacaaatttgagtatgcctcgagtgaaaagaaaacatgcacgaactgaaaaatgataaaacgaaaaaaagaaaaaaacttgttataggactaaagcataaaacttaaagggtttgtactttgttgtacttatagcattgtggcaaccgaattcaaaatcctcataagcatcggtgtcgttgaaacaaaaaaaaaagatataactttgacgtagaagacgggctcatcggcccaatacaaatattcgtagaccacgtatcggcccttaaccactttaaggatttgccgactcaactggcaaacagaatttgactggtctgctcttcgtcaccaaaaaaagtcttccacgtgtttcttttacacgtacagagtttctccttgtataagattttaagatttatctgggcacgaaactcgaaatatactttttaaggtctatgtacacattcgtttttaaaaaggttcatgatgggtaaaactataaagggtaatattagaaactaactatgaaatggaaaagaattgagagaatgacattgtgtcagaaaagttaggtaaataacattttctgaaaaagagaaaatacaaaaatatccttgtgtttacttatttttacaataatgccattggctttagttataaagtttatatgtatttgtctaaaatagcatgatatatttacaaaaatcatgtaattctttaaaatacatacagaatatatatacacgatatatatgtttctctgaaataatgtgtttctcagaaatagcacgaaatatttataaaaagcatgcaattctcttatagatcgcgaagtttaaaaaaacatatagaattgttacaatattacatgggtttttattggataacatgacaaatatttatttatttcatgagtttttattggatagcatgacaaatattaatatatcagtgttaataacatgttttgttcttaaaatacatgcattttaaaatcagacatttgttttaaaatcaaatctaatctcttatatcacaacgacattgacggaaaattcaggtaaaaagagaaaataaagaatgagagatagagagatttctatggaaaaagaaagagagaacatgtaggtgaacaaaataaagagatatgatgatatattttatgagaggtggtgaagattattttaggagagggagagagaaatagaaaaagaaaatgacatggtgaatctgaagaagatgaattgtgttaaagatgaagagagaaagagaactccatggctaaagtctcgtaaagaagatgaaaaagaaacaaaagaaggaagaagaaagagaaaggctaaaatagactaaatattgccaaaatttctgtagccgacaaatactatttggtccaaggttattttgtgtattcttttgaagtcaaaagttatttcttacacatactcaactataaaggggataaagtatagtgtgaattgttgacggcagaagagagaaaggtacatatttatatctcaatgaaaagataataaacgtgttaatagagacagtaaggagcgttagtgtaacaagtcagattcatggggccacggtatcatttaggaaatggaccgattcaatttaatgttgtctttaagtgcgatgtgaagagctccctaccaatcggacacctcccatgccttatgatttctctataactattgattttattcggaaatactataaatgttacacttcaatctctgtatatagttaatggaatggaattggaagaataaaaagcatcacatcaaattccagactctgatttgcataccctaataaaacatgtactaatgtaacacaatcatattgggatttagacttaatttaggaatgagaaagcaaaaaagtgtgagacaaaacgaggttgttgacgaatttgactacgatgagaccccaaaaaaaaaaaaagatgttgaccaactttttaagactgtatggttctgaatattcagatattttgggggttaaaatcgaaagatttgtatagttaagggactagataaaaatatttaagtgcgaggaggcagttgagggaaccacttctgttgaagtctgtcattttcatatatttgtaaactgggccagatagatttatagtgatcaaaatgggaccaattgatttttcaaattaggacaatatatgtcgtctctgtatttgtcattgtctattccaattctgttctggtcttgattttttcttataattttgtacataaattagcaaaacttagttttgtttccaagggaaaaaaccaaaaaaatatatcttacaaacaaaataagggtgcaaaacgtataagaaaataaaagaatgggatcaaagtggaataaaagaatattagggcgtcggtgacgtgaagcttcgctgctgggagaaaaaagctcacatgcgtattatctcagtctcagctatatttagaacaacaacacatgtctgaacacattacagttcctatatctgtttcgaattcaaatctcctgtccttttttcatatataataattcatcataaatatttattgatttgattctatctcttatatatattttcgatctctcctgaaaagagaaaaaagttggaaacttcgacgaatgtgtttataaatctttttattttctatctgtcttgatttagttttatcttttttggaatcggtctgaagttggacaaaagaatccgccattttctcctcggtctctctgctcttctcttcagtatcggatctgggtctccttcgctttcgtttcaaggtaacacaaaaaaaacttcaaattcttttctcttttattcacaccattttcgctttctttttcctttttcttctttaatctttgtgactgttctatatcaatcttcatttaacatttgcattctcatcacttatcagtattttctgatatccaatttctgggttttcgaattcgattcgataagaatatttatttcatttttttttttaatgtagtagtatatgttttttccccaaagtcacggcattggaaaaaaggaaaaacacagctgttccttgcttcaagcccgagattaagcaaaaataattactatttctttcttttaaaaaaatattcgaatcaacgcactatataaaattacctacttttgacagtatctgaattaaacatcaaccaaacttcaaactctctcctctgtaatccattctttttgtattcccaaccacgtgattttttgattcggtaattatccatattctacactacgattattaagcattaaaatttatcgattggtgaaaaaattaaacttcgtgattttggcttttgcagattattttgggagacgaggaggcgttagctgtaattcattgtatacttgctttggctattaaagccgtcacacaaaaaaagtaaaagcaacacacacacataaatagacacacttttttacgtatatgtgtgtcttctttcgtctctgttgggaatagatcttgtcctaagagatcacttcgagtctgatctaaagtgagaaactttggttcttgttttggtttttggaatcttgtctaatctggggagataatgggaatgagtctcgatttcgatgttgatcttgagaaaggaatcatagattgcgacaatgtttatacaaaatcaccggagaagccgatgtctcctgataacaaaccggtaataaccggagaagaaagtgttggttcgttagagaatgatacaagtccggttcaatgtggaatcaataaaccgggatgggggagaagcgatcggaaggagaaacggaagaaatctgcgtcgaagcctcctcgaccgccgcgtggaccgtcgctagacgcggcggatcagaaacttattagagagatcgctgaattggcgatgttgaaacgcgcgagaatcgaacgtatgagagctttgaagaaatcaagagcggctaaagctgcgtctgccgcttcttctttaggcaatgtattggccactcttttcaccgctattttcttctttgtcctcgttttccaaggtatgatttgattccacgattgcgtttgcgttttggtgattttaccagttttggttaaatcttatgtgtgtgtgttttattggattttttcaggattgtcaccgagagcagccggtagctccgggaaatctcacttagtagtcgccggcaaagccaatggtggttttgtttcggttcaatatgcgggaaatccgtcggcgagcgaaccggatggaggttataccggaccagttttagcacagagaccaaagtaagttgcttcactatctaatttcactaactggcgtaactgcttatctgaattaatctctaatccggtttgttgtacttacagtttactaaaaccggtgtccggtttggagaatgaaaagaagagttcacagtgaaagcgtaacgaaatggttaagaattggacagttccatactggtttgctcaaaccatttatcggtttagattgtcggtgagacatgtaccgataaactttttgggaaaatcggctgctttctctgcggctgtgaaacgataatattatccgatgtgggtaagaaagtagttttgtgtcagttttttcttgaataaactgagagaagtttacaaataataaaaatcagtgttatattattcaagttatcacgttactcttatctcttcttatatgtacaataatacaaactgagatctttttagtagattgttgcaaaactgtatccaaattttgacgaaattcaaagattcaaaaataaaatacgaaaccaacattattggtatatgatttttgtataattgaaatcacatgtgtaacgatggttgaagttgaaattgaaatttgaaatcaattatattaaaaataacaaatgtatatttgggaacagaatccatgtggatgtatctaaacagtccactgagctatagagagtagagaccacttttttaatgctgtgccaaaattaattgaacatgtgatttcacgtgtgtgtgtgtatgagtgtatttcaaacgtctattatttctgtttcgttgctgtctgcggatggatgcttcgtggcccctttaattaaggcccattaactcccaatctgtttagtctcactctattactccactcagcaagtgaacaaatacaattcgaaacttcgaatagtaacaacaattattgcagattagtttggtagtggattagactgtttagttttgaaggcggattagactgtttattgaggttatcctaagttatataatccaaatcacactgaaatttttacctaaagataaaaaaattgtggttatgtattacagtaaaaccaaatcttataagaaaaacatctttaactaaaatatattttaagatagaaaatattttacaataaagtcatacaaaactagttttcattattcataaaatttgaattgaggcagaaaaagcttggaccataatcatcaatatatgcgctgttttttcaacgttataagttatccactacaagtctttaagtatatcattttgtagttgataacttattagtttttgcttcaatatgtgtaactcttccgaatttacaataaaaatttgttcttgtcaataattacaaatatatgtatatatataattgttattttcaacaaacaaagattcttaaagaccattcatcagagacttaagcacagaaatcgccacgtcacaaagatttttaactagcttgtttctagccgtaacagccaccgagctttcatcgtcggcgccggcgttcgtgattcctttctgacaagaatcagtctgcttctcggcgtctccgagcacatatatcgcaaagccgaatttgccgccctgcattgcctccatcgcctgaggaatattaaacttgaccaccggccggtacagctcagcgcactgagccagcgcgcgctctgccgcaggatcgtgagcatgtttgatcagcgattggatgtatcctaaagtatcggtcatgtttccgagcacgacgctggccatagcggcacctaaggatttgggatcagaaggtgacggagagaatggacgaagagaggcttcacataggtcgcagaatggcgttgcttggcatattttgtcgataaggtcgtcggaggattggactaccgacggcagaagcagaaggagaaagagggagagacacggtaatgatgtgacggtggatgatcttttcatggtcggagatagtgaaatttgagaaaaaattgatatgtgataaaaataaagacgtgtgtggttgtgttgtgaatgctactggtagctctgtttctagacttatatagtagttgctatttaagtttgttatatgaaaagctttcaaattactaacaattatgtttttcttctttaaaccaccaagacaaatgtgctttttacgtgtcatcacatatgaattttgctatatatcgatgtgatcaactaggttaatgattattaggtctacgtggttattctaattcccacccgtgaacgacttcgtgatcaacaaactttatttggtttggagtttgatagaaataacatactatataagcagctagctctatgtattttagactatatgtaaacttggatttgagtattaatgtatatatgtaggtatgaggtatatattgattgaatcatactacctaatttttttgaatacatggatctgtgtttggtctttagtttttgtttgttacactttatccttttggttatatgtggttgttgggcacgataccaagagaaagaagagggtatgtgtggtttagatttggcgtatgagtactttagtagtcggtcacatatacgacaaaaaaaataccattatatatgagtccacactatacccgacgtcgaccaaataatttcaaaataccttaacttaattaaatattgtgggggctgtttctctcggcagtcgatatctggctcgtgaatgttttgtatatcccgtgattcggttctagaaacttcgtgccgaatttttgcccgtgttcaataaccggttcttaaagccagtcccggttaatgtaacgttatacaaatttgatccacatcattcattcggattaaagaggcatggtcgatattggttacgagctttattattattttagatcatattaaataagatgtaaattaattagagcaacattcggatgatggctctggtcacatcgcaaatcttttccattctctgagtcaaactggtcaacggagattggcctttggtaaaccctccttcgcatatggaagcttccacgccggcgtcaacaacagccccttcagcgaacttagggtttcctttgatagatataatggcagtgtggacgtcaacgtctacgatcgttttgtatctcatactacactcgtctaatggctttttcagcattggttttgttttgtaggcctcgttgatctgcccgaccgtttcggccccaagcgcctacattcccaacaaaaaaaaaaaaacatttacattttaacattaaatctaatatttttaactttaaatttagtaaataaaccccgtgatctcgaaaatattgtcttattcatattgagtctacggaaaaagagtgaaaaccttgattttgtcgacgaggacggtgtcggcctaggagctacgtggatcggagcggaggagagaaagacagagagtgtagtcaggtgtctgtttgcatgtcttatctacaatatttcccatcgcaactcccaccaccatagccatcatcatcatcatcatctttaccataatcatcttctcagctctctctcaaaaattataaatttattagtactaattggtaaattaagatgtactataatgcgatgaattactagacatgtctatttatatgtgtttgtacgtgtgacttaattaaaattatgccaaaacgttttcttttcattttgttgcttcgatacatgtaacctatttaatgtgcattctttgacgtgtccagcctgtaattatctacatagtttgaagttattaccctctaaatccggggatgatccctctgaataaaagatctgttactccgatttgaataaccattaatttgttgccaatttgaaattagggggaggggaatagttttgagggaaagaccacaagataaaatatataggctttggttgtgctaaatgtgtaacaataaacatgtatcaaatttgataagtatttatatatagagataaatagtcatatactttttacatctagtcaaacacattcaactacaataagaaagacaataaaagctagtagtatgcacaagtgttaatggcctcttcgtcaacgtaaataatatcttgccttataatgatctttgaccaaaacaggtcaatggcttcgtaatgatatatatatccagtatccactaaggttttcttattaacctttcaatgcactatcaaataaaaacaatgatgaaattattctctatttttgtcgtatttatgcaaatccaagtagcattgtcgtctcaaccaattcggtatgctacggaacctaagcccatacaagaactctgcaaatttaacattaatccaagcctctgcgtctctactctcaatcttgatcctagaagcaagaactcaaatttacgaggtgagatcaaaaaaatcttagattacgttttttttttcttcttccataaggataatctaccaacaatttcaaaaactaaacagaaaacacgaacaataattcgtacaaaaaaggaaaactgacgaaatgactttgctatatttgacatgtttaacgcaaattttaatcggtgaagttgttgttaccagaaaaaaaaaatgtttaagcaaattttgtcattgtctactattccctcataataaaacttacgtcaaaatactaaaatgtatatttgtttatttttttctttcatgatagagcttgcgtggatctctatcgatgcgacttcaaacaaagtcaacaaaatgttaaactatctcatctccgtctctaagaacatcaaagaccgtgaagacttaaagaagtacaaaacttgcattgatgactatggcacggcggctcgtaggtttttaccggcggcgttggatgatcttaaagctgggttcttttctctagcgaagtctgatatggaaagtgttgtgtcgatacccgatcattgtgaggcgcaattcggtgggagttcaccgttgacgggacgtaacaaagccactcatgatatcgctaatatgactgctgacatcataagatatctttttggcaataattaataagtttttagtcttgttcaaagtacaatcgagtaacgcataatgaagaataagatatttatttcccatttttattgacgagagtctgagtctttgattaatccgtactataaaggaaaacttgcttacgttacgtaacactgttatatatatggtatactgaatactgtacaatttcttcttaacatacgatttgaacatcgagtaaacgagatatatgtagaattccttaaattgcgttcgaagattttgccattgcaataaattctgatgtattcctaaaatacttagcaagacatgatgtattcatactcacccccctcatgtaaaataaaataaaaataatctgaattatgattcgaataagcactgagaatttgaataaattgagttctgtctgttagtcaaaaaaataaaagaagatatcatggttataccttaaaaaaaaaagataccatatgttcttttttttgataaaaaagaaagatatcataagtttttctagttaaacacatttagttcattactccttaattgaattgaccagaagaggtcaatggattctgtcattctgatatttattaaatggtttttgagaaatttggtccttgactaataaacgctatataaccttaacactagaacaattcactaacagtagctctcaagattctcagactagctatcaaaatgaatatttacatatacttattcgctatttttgtcgtgcttagccaaatccaaatagccttgtcacaaacaattcagtctcctccgggatctagccttgtacaacgactctgcaaaagaaaccgttaccaagccctatgcatctctactctcaatgttgatcctagaagcaaaacctcaaatctacaaggtgacaaattataaatacatcattctttgcctttttcttttcttctaaaaactgtccactagctaacaatctaaaagaaaaacttgattaaaacaatgttgaaataatttgctattaacgtaagttttgtcattacctattttcttagaattccaagttatatagctaattcatatttgtttattcattttgtaatccatgaaagggcttgcgtcgatctctctcgatgctacgacaaagaaattcaacgtgacgttaacatattatatctctgtcctaaagaatgtcagaggccgcgtagactttgagagatacggaacttgcatcgaggagtatggtgcggcggttgataggtttttaccggcggtgaaggctgatctaaaggcgaagaaatatcctgaggctatgtctgaaatgaaagacgttgtggcgaagccaggttattgtgaggaccagttcgccggggaatctccggtgacggcacgtaacaaagccgtccatgatatcgccgatatgactgctgacatcatcaaaacgttgtgaaatgtcaactaattaaaaaaaattcaatgttcaacgagaaatgaataacatatttttagaaaaggaataagattttgtttgatatttagtttctgtttttgatctttcaaagtcttgatttatagaaaccacgataagaattcggtggtctaaatcaggatacctccaacattttataggaaaaagagctttttttttctttcccaagcacagttatgtagagctcttctctgcgatcattacctgtaaatatctacatattcataatgtaaatgattttttgccaaaaaatgaaaaaactttaacaaacaatttttgacaatattcacaagtgtcatgtggacaagttgtggttctctttgtattccatgaggtttcaaatgttgttgttaaaagtaatataaatttatatgcactctttccctcaaaattgatgattctagcattgtatttgttttctctaagttaatggacttaatttatatcttgtttttacaaataaatactatgaaataagacattaggcctcactagtagcctagacaactaagtttaaggcccaaatgttattccatgaactaatacctttttaatgtgtattaatatttttcatcaaaactacattattctctaatatgaaccgttagatgtgatgccatctcatcaatcctagtatattccagattgaacggcatcacatcaatcctagtatattccagattgaacggttgagattgggtttcgagagtattaaaaaactaatgatttacttttaattaaaaaaaacaaagttaataattttacagataatatgtaattttcatttcactttctttttccatatcatttttgaaatcagataaatttattccatatacctatttataaacaaagtttcccaatattgaattatgaaattaaatcttgcattaaacttctttaacaatttttcttttgcatttaacttaattaagtgattgatcataatgataatatatgcaaaaagttatctttgaccatatgagtgtcagacactttttcaaatttgaagtttacatttatgatcattaactgtaaatatatacatattcataaatgtaaatgtttttttttgccaaaaaatggattttcagataatcaaaataaaaaatatttgaagaccaaaagttatataaatagagccaatcattaaaatctaaagaacaatatttgaataacttataagagttcatagaaaataaaatactatgggtagtacaaaaactttggtgacttgtttccttacgataatacttgcagtttcgttgtctaaccacaacgttttggctataggtatatgtggagtttgatttttttttttaattagtattgatcatttcaaaagctatatctaaatttttttaaattcgtaacgacaatatttgtgtttctatgtatattagacatgcattcaaaaactcccataaaattttattacttggagatgctatatgtataaatgtctttttattgaaatgtaatataaaatttacacatgtttgtatcgattatgtttaatatacatggacttgtatagatgcagggatcaaaggtttcgatactgaccactgcgatactaggtgttacggacgagatgaatgtatgaactactgtattaaagctggattcccaaaaggtggacagtgtggttctctttgtattccatgtggtttcaaatgttgttgccaaaagtaatacacttatatgcactatctcactttcaaaattgatgattctagcgttgcatttattttctcgttattggacttaatttgtatcttgtttttacaaataaatgctataaaataagaaaactatttattgcaataagtaattttttcttcttgaaatctatattataaaacgtattctttatcatacataaaaagcataataatgatggacttcatgacaactctttttataacctctcactaacaataactctaaattattgttttattataatatatttttaaagataaagatggagagatttagtcataagattaaattaaaaaaaacatgtttaaaaaataattattgatttgtgattttaaatcaataacttggagtagatcttccctataatattattaaataaatcgaatcattgtttgtagtttaaaaaggcgaataatatagtggaagaaataaaacgtctgaattaaaattttgaaatagttattaatattttttaaaatttaatatgtgaataaaaaactgtatgtaacgtaatgaaaatgttttttattcttataacttcatactgttttaattttggatgaaaatgtaaaattttatagtatttaaaatagaaagacatggacattaggcctcacttgtagcccataaaactaagtttaaggcccaatttgttattcgtgaactgaaacctttttcatttatattcttatttttcatcaaaaccacgttattctctaatatgaaccgttcgatgtgatgccatctcatcaatcctagtatagttcagattgaacggctgagattggatttcgagagttgtaccgttctatagctggttcgaagcttcactgctgctaaaacctctctctcctctaagaaacacgaaaatctctgaaagtctttttgtttgaagaagatgacgcatgttgaagatgataaggaattcaaggagaaacctttggttcaggttctgagcgacgacgacagtgaagtgaaggaagccaaagacggaggaggtgaagaagttaccggcggcgacggtgaaggagaggctaatgtagaagaggaagacgacgaagcagaaaatgaagacgatgatgatgatgatgatgatgatgatgacgacgacgaggacgaggacgatgaagaaggggtatgaatctctttagtttttatttatttattttgatttgagctgtaaatccttaagagaagattatagatctagggttttatgcatctctttagctacgaatttcgtagaacatgtgtgttttgttcattttacattcaaactgtgcaggaggaggatcttgggacagagtacctagtgaggccggttggtgaggttgaagatgaggatgatgcaagtgattttgaccctgaggagaatggcttggatgaagaagaaggtgatgaagagattgaagaagatgatgttgatgaggacatcagcttgagtgctggcaaatctgagcctctgtccaagaggaagagggttgctaaggaccacagtgagcaaggagatgtcactggtgataacattaggccttctaaacggtagttcttctaacttcgaactgatctcaatccaagaagaaagtcagaaattgattcgaattctcagtattttgaatcattcgttgggttgatgtagtttttaatctaatggtagtagtgttgcttagagcttaatggattgttgtttcttctttatgttccttgagactgctttcaaacaagtttaagtattcaacgcttttcttttcaagggaatagtttagtttctcatatacttcttaggatgctattatgagtacaacaaacaacttcgatttgatgtgtgaccctattatccaaaacatgacccaaaaacaaaagaattacagacagtcctaacctcctacgttaactgttctccgggtttctcttctaccattagttgacttgtcctgtccttcttcttgttcactagctccatcttcttcttcttctccttcttcttcatctccgtacaacaccataacgacattaccatcatcatctacttcgtactctatattatcagcatcttcttcatcttcaccctcaccttcatcttcatcttcttcaatctcttcctcttcatcatcgtcataatattcatcacctgcgcggacagagtgaaactcaggaggtggaggacagtcttcggttatggcctcatcacgtttcatcacaagatgcctaatcaccctctcatcactatctaacaatcccttgaattcgttcaagtattttgcctctatctcaaagttcatcagtatatagtgcgcattctctgccttctgtattttgtaagccagtctacgcattccccaatcactaaacctccaaactttccccttcttctccttcaggtaatctgaatatcaacaacaaacttaattacatacaaggagtttcactaccgcaatcactaaataaacttaattgcttgaaatctagtgagcagaacatcagagaataagaagtcaaaaagcttcaccttgtactttctggttaatgctttcaacctcctcagcatgtttttcatgaatcaagtaaaccacctcatagtgcctcactgcacaaacatagtttatacatcattaaatggactgatatcaaaccgattacagaatccatgattttctcacaatgtggctaagtaatgtatcacaaagatggataatattctaaggtaagcttccgaccatataaagaacacattttgcatgtatatctaaattcatctcctaagttaaaattggcataccctatatcttacattatcatccttccttgataagaaagttaaaagtttacaaaagccatcattttcgaatcaaaaacttagctaagagcaggaacaatggcaatgctagctaatgagtaactgattaacagagaaccaacttctagataacgagtaacaacattttgccgttggaaacatttaaatgaaaatcaaaacggtttaaagaagataaacttactcctttcttcattcaagtcactctgaagctgaagatccagaaactgatatagctcctctgtgcaaatgagaagaacacaaacaatattaatggactaaaatcattttgataactaaaaccaacaaataaatactttgccataaatcactcactttcttcagcatcagcaaactcgggaagaagatcaccttcttcatcaatcttcttctgcaaatccaatccacaaaaacaagcaagtacacaacttcaacaccaatgatggaacaacaataaagaactaaaaattcgacgaaatcgaacctctttgagaagaatggattcaggaaaaggaccagtggcttcgtcaggtctagctgaaaagttatgattgtcatctttcttgcttttcttcttcttcgccgccgcgaccaacggaagaggtttagatcctctgcggccgagactaggattaaggcacacgcgtgacgggttgatgaacgaatctctaccgtcgattctgggtctcagagacaccagagacgaagacgcgtgcaggagtgactccattggagaaagcacgagtgaagtgaagtaagaagaaggggagagagggttttagcagaagagcaaagacatttttgggttttggataagaaaacttttattaaaatatcattttgacccctattgttatttatatgttcccaaatcgcccggtacagtttcaatagatcaaaaaagaccctttgttttgtattcatatagagtcaaactaaaatattgtaagcaacctctgtttccataaagactaatcacattcttttacaagatttgaaccgaacttggaacaccccatcaaaactaattggttggtatgcagatttctcaagaagtaaacattggttttaccatcttttctcatgtatgtgtcacaacacattgccactttgttctcctcatccaccatgaaactcatcgaaaatgaaaacgtataattacatttcactgtaaagaactttctccacgggacgtcgtcgtcattggcttcatcaatcttactagttaaccatatctccatcgttgcttcatcttcactctgaaataacacagcaagttgtaacactgaaatgcccactaaaattttatttacaaatgattcgttgacttgtgagttcttggactaacaaagtcttgaacttataatttgtatggtttgagaagttttattttagtgtttcctgcttcttcgtctagcacgcagtaagaaaggaagagaagttgtagagagaaagtaaaagacacacgaattaacaagtccaagaccaaaaaatttgtgatccctacgactagagaaatattcttgttcttaaacaaattacaaactcactctctttttcaccaaccttatacactaaacaaaacaaccattatatattgtaaatttctcacatagttgggtagacagtaacaactaatatgtgattatgtattggacttattatttatgcatgtatcttttatactcggtaaaaagatagagagaagagactagctatatgatatagtggtagtatctaggggcttgacggaagttcttggccgttaaggaaggaccggaaaagcgcgagagcttcttcaggtttattgagaggaaccaagtgtccagctcctctcaccgttacgaacgttaaccctccctcgtactccgttattctccctcccaccttcacaatacacacacacacaaaaaagactttaattagctttaaccgtactaatataaacttatttggctaaaatatcacacatttctagctaatttcacaataaaccctaacctgatgattgtggaaccaagaacgccactccgatttgacggaaatccctaaagcttcaacacaataccgacttccgatcaccgggactctcccgtcggcatctccactgttagacaataataagtatttataactaatcaattttcaactttctaaggaaaataaaatcagatattgttactcaactagttatttttcctttaaaagagttttccggatatctaaaccgtccaactaattcgagactatgaagacagtatctgtcaaatacaaaatcaatgaacaaacactgggttacatcggtaggttattcatttgacagctaattaatcattcaaatatttacttatatgtaacgagatcatgtaaatccaaaagagacatacgtacaagagtttggtgggtgaataatagttatcataatatcttcggtgggtttactttgtgaatctcgtggttatatgtctatcattcatctttctaacagcctcttttttggaaaaaaaaatctttgtaacagccaaacatcttattattatttgccaaagattcaaagccaaaggctctactttgtaacagccaaacattttcctttttctaaattctaatgatattaacgtcaaaaaaaagttcttcgacaatcaatcacgaaactgagttttttttgtatgtatggttattggaacattctatatatctgaaagatatatctgaaagaaaaggaacaccaattatctagatagaagtgtcgagtatacctataaacccatatcttgaggccagctttgatgagcttactataagtaggcaacattgaggagactgtaaaatggtacgtttgcaatatcgaatcactgttaatcacaaaaaaaagaaaaaaagaaaaaaaccaaaaaaagattaacattttaacctttttaatatacagaattaagaaacttagatatattctacataaaacttacttgcaaactttccaccttgctacatttcgtgtagtagcatgaagagacaatcgaacatcgactctattgaaatattcttcagcgtaattagagtaacaaggatcgtatccttcaaaccatctcactctcttgaaccagtctttaaccgccggagacttatcattgactccgaaacctaagtaggaagctcctgatgagctattagatatgcacttgggagcatatatgttataaatatcaatctctttgtattttgtgaacactgtgttcatagcaacgttgcatggctctgaccagttcgaagacttgaagtcgcagttatgttttgcggagtcgtaaagatgatcagagatcactgcatggctccatgcgtattctagaatccctttgttatcgtactcatcgtccgtcaatggatttcccacctatactgacaagttttagacttaagtacagtgaaagaaaatcctaaataattgaattttaaaaaagcttttcaaagagattaaaaagaaacactgaaatcatgtgttattttctcttcttcattttttttttttttgattattttcattttctctttatacaacggatcaacaatcggatccaatattagattgtgttgattttgttttcaagaagaataaatcggtcgccgtcaaaaaagaaaaaaaaaaaaaaaaagacatcggtcacattaactggatcaatgttatactttcatcgttcacgtagttattagtccacttgcaaatatatgattgctacgcctacgtaatcaacaattgtgtattatatacgatgactaattatagtataatacgtacgatgaagcctttgagattaatgaaggagtcctttggctgaactttgttccgatcgtatataagctcggctagctgaggtgagtagtgacctgtaattgtgaagtgtgaatgtgaacccaaactttatttaaaaaaaaaggtgtgaactgtcatataaacaaaaaagatctatttatttccatgcatcattttttgtacttgttcattactagctataactttttttcttaatagtttgataatcaaaatctagatagtacaacaatattagaatgaaaaaaatacagagtaattaattaagctcaccggcatagctttcaccagctatgaagaaatcacgagacttatactgaggataccttgcaaaccaagcaaccatgaagttgtatgcatcttccgctgttacattaaacatctcaaacaaaaattttgtcaattaagtttcattagtccccttagtttagatagagtatataacctaagttctagtattgatttgaatgcttcatagtagataagctcggctagagtatataacctaagttcttgtagatatttacttaccaacgaaagcgtcgttgaggttttccaaatcagatgatgagttcgtgtacgaaaaccctactccgactggtgattctaaaaacaacatattcgcttctgcaaatttttgaacaaaaatattcttgaatttaaaaacaaaactagctttaattattggttgttaaaccgtcacggatttcattataaaattttgtaactagaactagataaaacgaagaaaacaaaaccttggacccaagagtattgattgaaactaagacttgtcccattttcaacaacacgaaaaggtcctaattcagatgctgctccatatccaatcgatgaacatccaggacctgcgcagcatgatcattgataatatgtcaaaaaattagaatcatatttaattaagttaattagttacctccattgagccagagaactagaggtcttgttgaaggagattcagacaatgcttcgaagaaccaaaagaagagtgatcgtgtattttcttgattgacgttgacataacctgagaaatgagagatctttgggttcagtggttgttcaggaagattgactactttgtctgaattttgagcttcaatgtgataatcttgatgaagtaatgataataatatcaataatgagatgattagcagaaatttttgttttttcatcggaagtgtcaaattcatctcaggttttttttgtttgtctttggtatttgcctttgtctatcgtacgtagagtgtattagtgtatatataaagtagacaagtagtgaatgtattggggatgttggttgattgtggaagtatgtggccacaaatattaaggataagattttacaattcttattttgtttgatatgcaagattgtaatggatggaagattggaagctgaatgtacacttctgagttgtgaacaattcgtttgataactttttataattttagttgaattacaagataacgatcgttaaaatataggaagaaatttgcttcttcttttttcttttgtttaatttgattaaaactaataattgccaagttcaaccataattttaacatcacactatttcagaaagtaataacgaaaaaaaaaaagttgttgtttacaatttaaggtttctctagaagccaggtttgtgatggccatggtacgtgccaagtgtttgactccactaacatgatcatgtgatttgccttactcactaactaagaagaagcaaagtcaataatgagattccgcatttacaactaacttcctacgaggcttcatattgcacttgatggggacattttcatatactcatcaagtgtcaagatttgttcatgatatactgttcatgttaattcggtcaagtaataagaagcagtaagtattaaatgggccgagaataggcctatgcgaaaataaacagaaagttcagatatcaaatgggctaatgggtcaactatagtactcatatattcttgactctacttccgtataatccgaaaactttgtaaattacacagacttttcaagtgacagatgcaaaatataccactatcctaattgacattattcagagcatttcttagaaattgcaactaaagcttttaacatgtacatttacagtttctcactagcagtgaaactaaattattgttatgttattggaccaaaacagaatgaataaaaatgttgggcataaaacgaaagatctctgaaacgtagtacgaagagaagggacagaagaggaacggacggattgaaatgggctaaagaatacacgaaacaaaaatcattactattattctttaatagtaggggacctcttttatgaaattaagagccttgtcctagttttgtagtagtattttgttataaaaaaatattgcaattgaaaaataaaggttttactgaataccaccaatgtgtgtgttaaactaataaacatatttgtacattacgcgaaacattaattaatttaggaacgaaggtcaagggattcttttttggcattatcaaatgatataacaatgttaatagttactataagttgtgatattactatttttttacattattttgaccattttatgtcttagaagactgtgtgattcccccgcacgcccacaaagtttctattccccacaaatctcagacttttgattactggattttagaaataagaataataacttgctcgaaagagattcgaccttctttatcttacttcattttaaagaaaactgataagccattgaataagaacataattcctctttttttttgttagaatgagaagagagcaaagaaacttcttaaaatgttataaaactaattaatactaggaagactataagctt

SEQ ID NO: 430 - DNA, 18231 bp, Arabidopsis thaliana
gaaatatataaactattacagagtaagtactacatatataaaaaacacagtgtgtgtaaacatgatttattttgaaatttgaactttgatgtggttttttttgccctagaattgaggaattccatttaccaagattctcttaatttgctcaaactcagtctcttcaccaattagtggataattatgtttggctaggatgcctagtccagctagattagattatgaagtatataccaaacaatgttcatttatcaaattttcaattaacaatcaacgaaattttaaaatagaagctctacgaaaaatacatttaacatgagaaaccaacatatattttaaaaactgttgataaacaataagaaaaaaacttgagacacagtttcgagttttttatttgacctgttgactttggtttcgcttaaggaccatagaaactgctaactcaggaaaaggaccaccttcgggcacaacggtcaggtgttcgggcagattggtctatgccatatcgcaacgatgacgtcaccaaattcatattttaaaactcgtttcgggcaacgacaacgtcatgatccctcccaaaggtctaattgggccccggcccacaaaggttatcatcttctttcttcttctttgtttattgttgcttttgccttaaaatctcttcttcatcatcccaccgtttcttaagactctctctctttctgttttctatttctctctctctcaaatgaaagagagagaagagctcccatggatgaaattagcgagaccgaagtttctccaaggtgatatgtctatctgtatatgtgatacgaagagttagggttttgtcatttcgaagtcaatttttgtttgtttgtcaataatgatatctgaatgatgaagaacacgtaactaagatatgttactgaactatataatacatatgtgtgtttttctgtatctatttctatatatatgtagatgtagtgtaagtctgttatatagacattattcatgtgtacatgcattataccaacataaatttgtatcaatactacttttgatttacgatgatggatgttcttagatatcttcatacgtttgtttccacatgtatttacaactacatatatatttggaatcacatatatacttgattattatagttgtaaagagtaacaagttcttttttcaggcattaaggaaaacataacctccgtgatgcatagagattattggatccgctgtgctgagacattgagtttttcttcggcattccagtttcaatgataaagcggtgttatcctatctgagcttttagtcggattttttcttttcaattattgtgttttatctagatgatgcatttcattattctctttttcttgaccttgtaaggccttttcttgaccttgtaagaccccatctctttctaaacgttttattattttctcgttttacagattctattctatctcttctcaatatagaatagatatctatctctacctctaattcgttcgagtcattttctcctaccttgtctatccctcctgagctaatctccacatatatcttttgtttgttattgatgtatggttgacataaattcaataaagaagttgacgtttttcttatttgatttttgttgttgttggttatattattgcaacaaaattaaagggggtaaggaaggtctcgctatcaaggggactggcaaaaggtaatgaataaggaaacgggcaaaaagaattatgcctttactctctcttttaaggctttggacaggaatttagttttgttttatgtgttgtgttgtttgtttgggtctgactgaccccaaagggcaaagccaaaccagagaagactcttattaaatattccctcagaatcatttattgcctctatctttatctctctctttctcacactcgtgactgtttctcaccttatgtatgtactagtaatagtttttaccactttcaacttttacaaatagcatttgtttctgtttaaaacggttgacggataggtaatacccaaagttttatacaccaagaggcgaggagttttaagtttataggtcgttcatagataaaaacaattgtttgtagacagaagtatatgtctctactcatgacactttaaatttaaggtttgatagagatgtttaatgtcttctatttatcgggtaacctatttatagattatgctacaacgatttcactcctatataaactcatatgatgcatttcatcagtaagttttatcaacataacttaaatgaataaataacgataaaaattgttttcaatttatgtcagatgcaaaccgcactaaaagtcaatagcacaccgtgtatggtcgaagaatcactaggccagaaaccctcaaattttccatataaaaccttttggaggtgtgatcgatgaattggttttgattattattttttttggctaaaaaataaaaccatgcataattattagtttgatatttagaagagtcaaatagagaaaaaggggtaagttttactgagaagagaggaaaagctgagcaacccttttgtgatgtatacgagaataaatgttttttttttatttctctcttatctttttttgccattcctctttttcttttgtcccatttcgccattcctcataaatacatataacgtgagtacttatgatcagtctcgtatatcataattgtacatttatacctcattttcaagcaacgaaatatcagttgatttgttgatagctttcatttcaaatcaactattctacaacccagtagatgtacgtattgatttatagtcgattggagatatcacttacttgaattataaaatatacagtgtaatatttatgataaatcatttattttcttttgacaatttgatcataatgatatatatatgaatttagtactaaaaaataaagaacgtttcttcttagagaaaacagatgattttatatgatatagtaacaacgacatgattagataagggtcacatgatggctgcatttgcccaacctattcttcatgtttttgtttggccgggcattagagtattagggttagggagaaatgagttgtttccgtttacgagttgatttcttcttaattcttttgagttgtggttgtgtgtttttaaaaaacttggtttggctattactagaatatttggtaactgtgtaacagatattagtctgtataaaccgattgcaactaaaatgacattaaaaacaattattctgtttcataagagcaaacttatgtatatttatacttacatatatttgtcaaattatttcaattactatatgtctatttcaatttgaatttggtagttagctatatatatagttgctatttgaaactattctttcacatatttcatgtatttttccaaaataatacgtgtaaataatagctagaagttgagcatgcatatttattagaaagtttcaaaatcattagttgttattcatcaaatatatatgataatttattagtattaatatatgtaataatttgtataaatagttatggtgttgtatcatcattgaaattgatttaagaaacagatacatatgtaatttatcatgctgtaaatacgctaaacgtatagcaagtattaaacgtgtaatttatagtgaaattggttatatttcaatccaaacaaagaatactactccctacctattttgatagatgttttggttaaaacaacgcatattaaaatagaaattttcttcacaaaaatatgatgtaatattttaatttaacaactcaaactacatagaaaatactgtataatctaaatgattagaaaaatttaaatgtatttttgtatagaaatctacaaaacaacttatgtatatttaaatttacaaacaatttatacactgatttgtctattgagtaaacaattactaaccgataaaattttcgtcaattcagcttaattaattggctttatattttgtcagcggccctttaattatgttagtggggcggtggagagattaattagacgaaaagtctttggtcaaaatcaattcccaatatcaatgccaatttttggtttaatcattgccatcttcgacttttaagacaatttcaatacaacaaagaattgtattattatgtccaataattaaagatactttacagataaataaaaattcggcattttaagtttggttcttataatatttgtataatgttatggtggtggtacgttctaccacgaaatgattgtgtctgcaagtggacgattgaaatgaaaaataaataaagggtttgcaacaaatttacctctttatttctaacggtacgaaacattgcattaaaaagtcttggaattttttgcagacataaaatgatttcctttttggaaattaaatttgggtacacgatggtaaatgaccctctatgtagttcaaaattgatgttctaagtatctttgcacttgtccaaaaaaaaaaaaacttttttgcaccaaaacattaaaaccaataaataaatcctgttaaaaatgaaattgtaatgctatcagtagtttatcgatcgtatatgaatcaaatacatatattgcaataatgaaataaacaatagttctaaactttttaaagtgaacaaatactaaacgaaacttgtaaatctactatatttatatttatatatatacttaacatcagaccatgaaaatattattactatactattgagtcgatttctttatttaacgctttgatcgtctattgtagaggccaagtgaccctatttctacataaatagaatatcctaccctaattctacataaatagaatatcctaccctaattggctacttctaagtcatctattcgatcgttttcgatgtgaatcaaagttcttacgaaatcggtttataattcatccagtaatctgtaatgtactcatatactacccaatgataaaagggcatatccgccgcatatgtgtttcttttttggtcgaaaaattatttgtcctaattaatcatgatgatcaatgtaccactaatatagatatctatatatacattttttcagccattttgtgaaataaatcttatagttgagacttatttacaatggttgccactgaattttaatatttgtttttgataattagaaatataatcttctaattaaatatttgatatttaacaatcatctcaaaatctttcgactttaactacacgattaattactaaaataaaatttctaaaatatttaatatcatttaattactacaaaattatcatttttgatattgcttttctgcatgattatactaatttgattataatcatcaaaccgtgccgagaaatttgatagcatttaattactacaaatttacaaaatatttagacaataattcataaacatatcataaataagatcaatcttaataaaataaatgagtttttttaccggacgggttggcgggacgggtttggcaagacattacttaataacaattgtaaactataaaataaaaacattttataaatatgtacaatttgcaaacttttatatatattaatttaaaaaataaattgtttccgcggtgtaccgcgggttaaaatctagtacatatatatgaaacgtgtatataaatggaagggacatgaagaagaaggatgggacaagatgttgaaactttatataagaatgggtaacatcttaacatggctcactcatcaactctttcttcttcttattattgttcttttttcccactatttttggctttcttgtttttgtaatatacccttttcatgtgactcccactttgtttgaacgttaataatttgaaacgaattagttgattatacaaaaatatgagattaagttgattgtgattgctaagaaaaattctccatatcatacaatattcatggtcacattaattttaaaaatatagtttcccaccttcatcgtgtttgacgtagacgaacgtgtccatgcttatatgaatttagtaaactaactctaaccttcaaaacggaacaaccttttttgggctcattgtttatacgtttatctttttgataaagtatcccctcttggccagttttatcaaaagtttcaatgacccagatttggtacagcccataaatgaccagtaacaaaccgagctaggcccggcttacctttctcctactcaatttaattgtttttcagtatattggtgaaatcccttgctcgattcaagtactttttatattgatgaaaaatagttgatgtttataagtttattagtggtataagtagaatgaagaaaatttcattaacccttttataggagaatcttcgagtaatggatattgcttatatgaaaacttcttaagttctaattgatacaagcaacttttattggttacgttatttttatttttgcaatgtgcatttgcgcttagtattttgtctcttgaatttcgctgatctcgaaatcagccaagatttcataaaagtgttacacaaaagtttatggtcataattaagaattttgacttgaatattagtgttccgttgtggttaaacagagtccaaatggtgtgttccaaatccagaagacaagaaaagctgaaatggtctgttttaactttgtcgcaagatcctaaggagggacacataggaagagggattcaacaaagagacgaaaagggaaaaagaaagctcggcgagataaacaacctaggcgcatgtttggctattaagttcattgtactttagtttattcgcttgagtttattagtgtctccttacaataaattaggcagtaattcaagtgacatggataataacagcatgagcagcagttctgatgatgagagagggcgattatcaagctagaaagtcattgaaaactaaaggtaaaggcatcttctaagagcatatcctaagcaagagaggtcatttatataaggaatgctaaatataataacatgttcatatttgtaaagagtttgctgatttcaggcactggtggagagcctctcgcagagaatgatgatcctgtcaatgtgagcagaagttctgatgatgagaaagaagaccactatcaagctagaaagtcagtgaaagctaaagataaaggcatcttctaagagcacattctaaacaagagatgtcatttatctattttgtagggaatgctaaatataataacgtgtctagatttgtaaagggtttggttgatttcaggcactggtggagagcctcccgcagagaatgatgtcctgtcaatatgagcagcatgagcagaagttctaatgatgtgaaagaggaccactatcaagctagaaagtcagtgaaagctaaaggtaaggacatctcctaagagcatattctaagcaagagaggccgtttttctaaaaatcatatccagcaattgtaccttcttattgtgtgtagacgcatagtagagacgatcttattgtgtggaataatatgttgttccaaatagacccacgctttgccgcagagctgtgcaaccactttcttacgcgtcaaataaatgaacatgttttgtacatagtaattttgtttctttacgtatattttttgtattctaattctttatttctatcgtttttttctccttattactacattactatttatgtaacgaagttatttgcatatttatcgacaaaaattatatataaagtacagtaaaaactctataaattaacaatgctcagatcataaaatttattaattaatgtataataatattaggagtttgccataaattataaatatttagtggtttttttaccgggtttaatttgagtcgtgatttggtgtatatttctattccatcaaacattaatatgaattccaaattacacatattcaacatcaatccgattaatatctaaactgcaatctgatttaaattggagggatcgcgaatggtaattaaatgtgttattttcaacacctaactttggaccaatgtctgcagaggtagttggacgcgggtatcgataatttttttttgtagcccgagcttgggtctgataatgacactcgtctttttttacttatggtttgttattggtccaatctcacgttcggattcaaactactagtattggtgtattacgtagaataaatgactcaatattcaatcagacgtcatatcgaacaactctcaatattctctaatctctataccgaaaatatatatgttcctaattaactaataataccaagcattcaaaatattcgacccggcccaaaaccaaaagcatgcttcaaaaaccaaaatatatgataaatctagccacagtatatacggattataaattgtttttggtacgtctgtaaactttttagggttacatcgatcatttgggtagtgaaatcaatcatccgcctaaacggaatacttgaaatttatggtatacctgttaatctacttctatagaatatcaggtgcattgactaattaagcaatttttaaataccatctaataagcattttcgttgtatagtggagtatgttttaaaggtgtgctcctgattacataattatacgtaactaataaactactattttaaaattttggtacggccggtctcaatagaaatttagacggattcaatcatccaaaaagatgatatgatttaaattaatgatgtgttactaaatagtaaattgaagaaagggttctttaacgttgctttcacataaaatatgcctagctagacacacacacatatatcttttctgtataaatctcgagatgaatcatatctttggctttcaaaacaagggtatctcatattaaaaaaaaacgtgagcccactaattaatatggtcacttcaattcaaattctcctactctctctctatatatctctcccgcatgtgtgtgtttagtgtttacacatgcgttcgctcatctctctctatataacataattcatttctctaaacttatccatcctccttctgtttctcctaaaatggtgaaggagtcccagaaaatcgtggccgtagatcaagacattcccgtgatagatatgtccttagagaggtcacgagtgtccatgcagatagtaaaagcttgcgagacctctttttggtttgattcttggagctctcttggttgtatcatcgagaagcttggcgaacgcgggtacattgatcttggcataccaaaaacagccacagttggggaggtaatggcaatgcaaagaagaagacatcacagaaccgggctgctgaatcagatcgaggaggaaataacaaaacagagaatgtgtaacatagctggagagagggatattgctctctggaaaggggaaaaagactcttatcgtaataagttcgtgactagcgagacgtggcggcaaatccgtaacgctaagcctgagatggaggggtacaagggagtatggttctctcattccacacccaaatactctttcatcacatggttagtttcaaaaaacagaatggcaacaggagacagaatggttttgtggaatcaacacgtgaacacaagttgtagtctctgtgacgagccaatggaaactagagaccatctctttttcgtttgcacttactcaagaaaggtatgggaggatatagcaaagccaattcttcagcacaggttctcattggactggaaggacattctaaattacgtttgcgaaagggattcagataaaacaagaaacttcatcatcaaacatgtgttccaaaacactatccattcggtgtggggtgaaaggaatgcaagaagacatggtgaacaaccatctccggtggggaagctggttaagatgatagacaaaaatatgcgcaacaaactgagtacaatccggtgtggaggaagactcacatatgaagatggacttcagttttggtttgcttcaagacagaacctaatctaatgtgtggattgattagcttatggaaaaaattatgcattaagttgtagaacaatgttgtaattttacccatcctttttttgaatataatttaacagctattcaaaaaaaaaaaaaaaaaaaaaaaagcttgcgagaccattggtttcttcaaagtggtcaaccacggtgttgacccggacgttatctcccggttggagcaagagtccataaacttctttgctaaacctgttcttgagaagaaatcggtcggatcggtggttaaccggcctttcggttatgggctgaagaatattgggctcaaaggtgatattggagaggtcgagtatttgctccttcacactaatcctctcttcctttctcagttatcatttggtaacgattctaccaagttcgggtacgttacataattacttggctactgtggagacctggttagtatgtagaacattaagattagggatatctcgcaataaaaacgagttctgtctatatatcaacgtatcttacagtctaatacgtacagaaatgtaaatgcagttttttcctttgtgtataaatgcgagaacctatccgtatatacgaaatttgcatgcatgcatgtgtatagttatatctgctagatagatttttcttttctactagagatagattactagtatatgagtttgattttgtttttcgcgtttgaatgtacatgttaaaagtgtgtctagaacataaaaacccacaagatgatttcagagtgttctattgactatagtggaaaagaaaagctaataattaacccataataaaaaatatatagttgactaattacaagtgaattggaattctgttttcagccaaacttataatatttttttaatcaaatgaaatttatgaattggtttctttcttacatattatgaaacattaaattcgagtcagcaacttgaatttcaaaagtacagcttctcgatcagtctgtctactcgacagggaatgggtaactttttttttaacttacgcaatgcatgttgtgtgtgcagtgtgtataacgctaacttatatcaacaataaaaaaaatccttttttccttttttttcccccccctgaaactgttatgctttcgaaatttcacttatctctctgacgtgtttagtttcatcctaaaagtgtatatatatatagcttaatgtttctatgttttctcttatcttataatatatgtatttcttataatgagcaactcgtgatgatgtatgatatgtctgtttgacagctctgcggtgacgtgttacgtagaagcaattaagcagttggcgtgtgagatcttagacctcacggctgaaggactacggctcccacctcataccttcagcaagttaatcagagccgttgatagcgactcagttctcaggcttaatcactacccatcatccaatcaattccttagtggagccaaggtttctgatatgtctgtgtcattaccgagagttggcttcggggaacacacagaccctcagatcttgacagtccttagatccaatagagtagggggcctccaggtggcattccctgacggaaggtgggtctctgtctcccctgacccttcaaccttttgcgtaaacgttggcgatcttttgcaggtcagtccctatattcattacccatttgattctgtatatgttactttaaaaaaaaaaaaaggttttcaggtgctacttgaaaaacttaaaatgcaggaatctaactatttaataatacatatcaacatgtaagaatctactaagattctataaatttccacaactattataactaaaatattaatcgatgcaaaatttctaggtgatgacgaatgggagattcttaagcgtacgacacagagcggtgactaccggacatgcaagcaggctatcgatggcgtactttgccggtccatccgtccatgcaaagataggccctattccgggaatcatcccggcggcagaacagccacggctttaccggacgttcacatgggctgactacaagaagtttgcttactcgctaagccttggagataaccgtcttgacattttccgctcatgtgtcgatgagcatgatgaattgggcttctagtaatataactgaattgggcttctaggaatatcactgaatttgggctaaaaggccgaaagaaacttcttgtagttggtaaggtaactatgaatcaaaaagtaggaccacattttgtatgggaaatttgcaattcaattctattattttggtgtctattatacaactcgaattaaacaattcgtacatgatattgaaaatcaccataaagatgagaaaccataacaccagtgatgttacaaaaaataaaatcaaccaaccaaccaatagacacaatttttttcccgtgtaacacgagacgacccaattattcgtcttcctcaaaaagactcgaaaacgacgtcgtattgaattcaccactcacgaagtttccgtcttcgttgttgagagtcggcttccgaaaactatctttcttaattgctttggttccttgccttgccttgctcctcagaaatttttgcttctgtttgattttgtttttgcccctttgcacacatatcatccaaattcgttatcatttttcacctttgaaagaatctatctccttgctctgttatctccagttctagggcatacgccgatcacatccctagctccttttggctctaataatacagtaatcttaggttttcggggagtgaatcgtgtattggtattctagttttagctcaagaacatgtttttctccggcgatccttcgactcggaagcgagttgatttaggtggccggagcaccaaggagagagatgctcggaagcttctcgagcagactagaatggagcgtaatcgtcggttactacagaagcagcagaactctgctgctctcaaaattcaggtttgcgattgaaaagccttttcttttgggactctgggattttatttgtgttttctgagcaatgtagaacgaacacagtgagtcattttgcaagatatgtagaacttttgagctaaataatgtttactttttatagttttgaggtttagttggaaattgaaccgacattttcctttgtagatgttattctaaatctccattgtcctcgttagatttagcctctggaacaaatttatcctgttacggtgtcctgcggtacaggtcttgtggatttttgttttgagtagtagtttttaagattgaactattgcgattacaaaatgtgagcttgagctgcaaatgcaacacttcaaagtgtttctttttttcttctattatgtggacaagtgcatttgttgtgggtaaagggaaaaagtttttcaatcatttatgctcctgatgggcatggtgctgactagtttttggctacagaaattctttagaggtcgaagatcaatggccattgagcgctcgaaggtgcggcatgatttctgtgaaacctatgggaataattgccagaatgttgataggtactttttctttggtctattatgtttgctatagtttttttttggtctttaaatggttctatggttaattagttgtatatttttttgcctacatccagacattgctttgagccaggttcaagtttcctccggcagtttctgttttttttcaaggcacaaaactcgggagattttgtgatacttgtggagacttgtcgtctactgcagagtttcgttgacagcagtggtatttccaatatctatgcctgcttcttttgttgacacttttgttcaattcattcatgggtttgatcaacgtgcttttcctttcttggtaactcttatgtaaggggaagcatgttccaagtcttcattttgcttaatcagtctttttatggcgttcatactcttatttattatgtttatcttacgagcaacaaacttaaaacattgtgtgagtcatatcccttgcaccacaaattaaagtctcctgtttgctgtttacatcctcacacatatagactgccttaatattatttttgcttcacagacaattttttctctagtttcttttcgaagatgactgggatcttgcttactgatgtattacagttctcatcatatgacaggtgacattgtcagccttttttctggcttggactattcttctgagcataatttggtggattttagagtaaagaaacttgcatttacctgtatcgaggcgatacaccagaataggtaatatatatatttttgtcatctctcattttgtagagcatatccaagcaatagcccttcttctttcaaaatgtgaccaactattgctatcttggctttttcagttctgttattaaaatattcagttttgcctctttctgatttgaatcatcaggaaccgtttaagggatcagctcttagttactcctgaagaagctagcatttcaacagctatcttgatggaggcagtttcgttgttgctagatcctaagctgccttgggtctgcaaaatagttagttatctacaaaaaagaaaagtattcaaactggtccgagaaatggtcactacggctaaggtattttcagcagttccccatgattatgccccaccacctagttggcaatctaaacttttgaagcaattgtggtttgttgcaggaaagcccaagaggtaagactatgaccggcaacatcctttcactagaaagagtattgatactgatagtaccacatattggccgtgagccatgttgctgcactgttgttgatccacgttggagtttctcatctatgattcttacaatacctttgatatggaagctcttcccaaacttgaaagtggttggttcctgaactcatattttttagttacggatatacgctaatcaaaatatatgtaaaatcgttgaggctaaatgatagcttttggtttcttacaattttgtgtttgaccctgagctaaatattatctcaactgtgagcatctatttaaactttggtaaactcatagtttcattgtccaggtatttgccaacccgagtctaagtcaacactacattcaccagatggcttcctgtattcaaaaggatacctgtgttctcccaatggaaacaagcccagaattccctggttatgcttgcctacttggtaacacgttggacactgcaaacgtggtgttgtcacagcctgaatgttcattggacatggtaggttccttatgtagtcgatttattgtatttgggtgtgtttgtgttagctactgtggttggtatcttagtgcatgtttacttaattttttccttttctcgacagtgaatttcactttgcggtgttcatgtatagtagatttgtgaataggtaccttgtgctcaatagtcaacagcttatgtcatatattgagcattatcttctatatttaatatgagtttagtgtttggctacaggtgatagtgccatatatatatatatatagatatatattaacttgtggagtagtgttactgacagaattgatctattttacctttgctgctatacaatcgctttatgattggaagtgttttcttcctttattgctgaagatccacaagtttctgcttttgtattttccacattttaggggatgttgagtctttgcctttctgcaaaaatcattcatttggataatgtttaaaaacgttacaaatataaatattttttaaaaacattgtgctcccagttctgtttgattctaatgctgctttgtttttatttatttattttgaccaggcaattgacattgcattagttgcaactttctttttggagacacttcctcctgtgaaatcatcagaaggagaaagtagacaaggtatgacattttttcttgctatactatattcgcttgtggcattgttttgtcatcctaaagatttcctgtccattctgctcgcagtagtttcttcataaatttgatcttgtgctgaaagagacatacacttttatcttgattcaggctcttctgatgaggatgatatgttgattgacgatgtaccaggattagtcttgaataaggctctggagcagcagataaccaatgctatagactcacgctttcttctgcagttagtatgtacctactctctgtcatatagaaagtatattaagtgctatgcctctgtaattttttatttttaatctaagtgctatacttcctctggatcaagtgattctttaattttaatctaaataatcttagtttcatccctgcagacaaatgttttgttccgtcaagtttcgcttggtatgcagtcatatgacgaagataaagaagcattagctattggcacagccagttcttttctgtatgcagcattcaacactctccctcttgagcggatcatgacaattttggcttatagaacagagcttgtagctgtgttgtggaattatatgaaacgatgccatgagaaccagaagtggtcatccatgcctaaactcctagcttaccttccaggggatgctcccggttggctgttacctctggttgttttttgtcctgtttataagtaaggtttgcttgatttaatgccaattggtttttgtagtattacttgaaagtcactctctcgtatgactataggtaaattagtattgtgacttgtgaggtgggtttaatacttggtttaacattgtcgctgatgatcaggcatatgcttatgatagtcgacaatgaggagttttatgaaagagagaagccattatcgctacaagatatcaggttgctcatcattatccttaagcaggttagtgttttgattgatctcattttgcagtgtgtaactttgacgtcaagagttttaggtgttatgattaaagacaacataaaatatcaatggcgcgattagctgagccttagattgcaaattgtaacaatcatataataagctagattgactttgcgttttcatatggttgctttgttgcattggtttgactcttggtgaatcttcgctctttcttgtccaggctttatggcagttactgtgggtgaatccacttacgcaacctaacactgggaaatctgtctccaatgacctctcgaagaagaaccctattgaactgattcagaacaggatggggattgtagtctctgagttactttcacaggtatatgctgcaaagaagttaatacttcttgaccaattatggctatattgactttcagtcagtaaaacttggcaaagatcactgttcagtgttcattttattctctttgctgatgaaatcttctgtagttgcaagattggaacaaccggaaacaattcacttcctcaagtgacttccaagcagattcagtcaatgaatatttcatctctcaggtgactactacactgctatttcgtttgatgttggtgacgagccaacattatgaaaatttctttatctatcatttttagtaatttggtcttaattgtcccctattattgctgatattttctcctttatccaggccataatggaaggaacgagagccaactacatactgatgcaagctccgttcttgattccgtttacaagcagagtcaaaatattcacagtgagtggctattgggatatgtatatctgatgaataataatcatttgtacgttttgaggaacctataagagctaattaaatagacttgcataagtaatctgggtaaatgtgagaaaaagattgtatgtacttgtttactgataacttggttgtggttgtattgacttgctggtcatctttcgtagacacaattagcaacggcaaggcagagtcatggatcgcaaggaatttttgctcgaaatcggttcagaatacgaagagatcatatcttggaagatgcttacaatcaaatgagtgcgttatcagaggatgatctacggagctcggtaagttcttgcccgatattggtcttctagcaattgcttggctcactactgaaacagatccatatttcgtccctgtgtctctctgatttgtttatcttttgcgatgcttgtgatgcaaataactactggctgtagattcgtgtgacatttgtgaatgaactcggagttgaggaagctggtattgatggtggtggcattttcaaagacttcatggagaaaattacccgagcagcctttgatgtgcaatacgggttgtttaaggtcatatgtctagttttgctcacccaagtttttgtggatttgataatttaccttactccatcatctttgcatttagtacgtctatctttctctgaatattgtacatgctttctttcaggagaccgctgatcacatgctttatcctaatcctg

SEQ ID NO: 431 - DNA, 80167 bp, Arabidopsis thaliana
gatcaggaatgatacatgaacagcatctccagttctttcattttctcggcagtctcctcgcaaaagtatggtatttgattggtggccttgatgcggaactcttataatttaccattttttactcctgaaaacttttatatataggacagaaagcaaactataatgcttacagtgtacgccacatttgatttttaatacactactcgcaatgtttttcatgcaaatagaattagtaggcgtataacttgatgttttcctagaaaaattattgaatttgtccttttgtcgttatttaaagttgcttttcatctgttatataagactcataattgttttttcccgttatcttgttgcaggctatgtttgaagggattcttgttgatataccatttgcaacgtttttcctcagcaaactgaaacaaaagtatgtaaatttaatttctacctcaatttcctgtcacttcattcgttttttaagcccgcatagactttttgaacatgttgtgaaacttctattgttctttggctaggtacaactatttgaacgatttgccttctctggatcctgagttgtataggcaccttatatttctgaaggtgagttttgctgaacattctatttaattgttgctttgtagaacggggagatagttgctagcatagatgtgcgagaatgctgaaatctgtttgtttgtttttgtttcgaaactgaaatttgtttgtttacctacctacgataattttggctcttttttttttttttttttttgcttcttagctttatacacctttttatgtattcattatgatatttgcagcgttataagggtgatatctcagacttggagctttactttgttattttgaataatgaatatggagagaggacagaggaagagctacttccagggggccaagacatgcgagttacaaatgagaatgttataactttcattcatctggtttccaatcatcggttaaattttcaggtactggggaaccacttacctctcatttatcttggcatacctgaggtcaccctgtaaatcaacagctattgatatcatctcatttgcagatacgccagcagagttctcatttcttgagggggtttcagcaactcattccgaaagaatggatcgacatgttcaatgaacatgagcttcaggtgccaattaagtgtataattatacttgctttgttagttgttccctcgaggagcatgaagagagaaattttacctttgtgggctttggttgcaggttctcatatctggttcagttgatagtttggatatagacgacttgcgaaacaacactaattatgctggaggctaccacgcggtgagtggttcttcactgttagccgaaatgccattgtgaattagtgtagggacacttttggagtattgttatatatgattatatcgctatgttgttgacacttgacagggacattatgtgatcgatatgttctgggaagttatgaaaagcttctcaactgaaaaccagaagaagttcttaaagtaagcaaactttgcagttactactacagtctgtgtacgcaatgatttaccggagtctatgaattttctaagggaactaagaggtacctctatttttcaatttcaggtttgtgacaggctgctcacgaggaccactgctgggtttcaaatacttggaacctgcattctgcatacagaggtaatatacacagactcacaatcgttttgacttttgatgggccctggacaatagaatcataaaatatccatcctcgatggaatgtgtatcagggctgccggtagtgcgagtaatgaatcagttgatagactaccgacatcagccacttgtatgaatcttcttaagcttccgccctatcaaaggtttgtcctctcataacacaaactctttggttttgcttagctaagagacttgttttgttgccaaatagcttctcttggtgttgtaattggaaaaagcaaataaagcatgtcttgttgttaatgatgcagcaaagagctacttgagaccaaattgatgtacgccataagcgcagaagcgggttttgatctgagctgatggaatagcttcctgccttaaacacagacttcaatggccccaaattgacacccttttttctagcattcctcgttatggtataaaccgggtaacctgtagactgaggcaggcttgttggctctaagcatctaagagacggatctagaaggagaacatgtagtagagattacttgactaatgggtttcatttgcagctctcgggtattcgctttcaaaaagtgtgacaaaaaaaaaaaagtgattacagggaagtctttatttggaagctcctgagagttagtcttgggttaaaaattcaataaaagaaatggtaaataagactggtctcaagaggaacttaaatgctgtaaattattttgcttaattaatgcatgttacacagaacatagatgattattttgatacttatttgcatcataccatatatcttctataaaaagatgcattttagtgacttagtggtaagaatatccttttttttttttttttgtcatatgataattattaaaacagaaacaaaatgacagaaaaataacgagaaatacaaaatgaaatttaaactttactttccttagacacttgattgtgaagtcatgaaggctctccaagtgctaagtaaaacttagactgaaaccttctgtcttgaatcacactcccaagaaatggaacgcgcgatcagatttgcgtttgtggcaatatgacggaatgtacaagattcaaatgcactaacaatctcatggatttgtgttaaccaatttctatagaaaggctatttggacggctgcaaaacggcgttaagtgcggctggacagtccaactctattatcaccgtggtaagaatatctctatatacattttttgtcgcacttatcatgattaatcaagtaaacataattgttacaaacactttataaattaaaaaagcttcaattcaatttgcacagaaaagaaaaaaaaaagaagaagattcaatacagagtataccaggagcatctggtaatgtttatatctgaggacgttttatttaattttttggaacgaaaacaataatccgacgatcgtatttgcacgtcgcaaatccgctcttttaatcaaagatctcgaccgtccatttttagttaagactttagagagctgataagtggaatagtggagatttgcattcgcaggggataaggatcaaaaatggaggaagcaaagggacctgtgaagcacgtattgcttgctagtttcaaagatggggttagtcctgagaaaatcgaagagctcatcaaaggttacgccaatctcgtcaatctcatcgaacctatgaaagctttccactggttagtaaatttggattctgaattgcttcctagtgttagacatatgctcgagatccgaaaaacacttccatcaactcaatatgattatgtaaaactaagcaatttggggaaattcatgaccttcctagtgttgatctaatttccctcagagagaatccatctccattgatgatcttttgaaaagttaaatcaactaaatcgacgaatctgctcttgtcttattgaattattggatctgtataattttaggggaaaagatgtgagcattgagaatctgcatcaaggttacacacacatctttgaatccacatttgagagtaaagaagctgttgcagagtacattgctcatcctgctcacgttgaattcgccaccatcttccttggcagcttggataaagttttggttattgactacaagcctacctctgtctctctctaattatcttgtagcagcattttcatcattgatctttttctcgggtatgcatcttgtatgttgaataaagtatattccttttgagttttcctgcattgttctcatgtttctctgtgaatttctctcttttttgtttgtttgtttgtttccttctgttgtattatacttgatctgtaaaaagatcatgagtttattaagagtgtttgatttcagactcctctttgttataagtctattactagttgttgtctcttagtttcttttatcaatagagttgagttatatggaataacaagttgaaaagaaaccaggttcttgttgatgtgtgggttggagaaaaaaagttctttgattatatatgtaacatttatgcattactgtttaatgtaatcgtctaatgagtatgatgaagggagattgaatcaatcccactctcacatcatgtttgagatgacaagtacaatgccacaaatattctgaaaatcaccactgttcttcacagctgaaggatcaactttgaaatccgccatgtcttgttcacatgttgaaggtccttccatagctgctgaaaccttaatgttcaaccctttgccatcgcctgacgccaggctctgcttagcatcattgagactgcttattgcactcttataatgttgtacacatgaggtgtatgctttcttcatagtggggttggttgctgtcttgactagagattgaattttcctgaaaccttctgatgcacttgtttgtgcagaaccaaatgtgatatttgcaagcgtttgaagatcagcacctgaggtctttgggttggatttcatgtagctcgtacagaaggattggtttttcgcttttccacatatcgcttttatgtctgccacttgtgcgttcaaagaaccagtcattacaaaaaacatcagagaagacattaaaactctgttcgtcaggtatgctgccatctttgcttctttctttcttatgttcgttggtagatgatggttaagttattcccttactatgcctgactattcatatttatagatgcatgcgattgattgcttccactagaactaataatagaaatgggttgttactctttctgattcttagttagaccacaagtccttatgtaagagagagagaaaactttgctattcttagcattagtgcagagacagttatctgattagtattcgtctaacttactttcctgacttctcttctttaggtagatatgcattcactaatatgtgttcatgatttgttggtgctaagaaagattactgtaggaagaggttctatggagataattgtcataaatatacaccagaagtaacgagagattaaagtcttagctgagatgcaagacacggtaattttgactatgaatatattcatttattggtctttaagttactagtacatcagcgtgaatgacatttagtagtttctgccttcttgcaggtgaaagatacataaagaatcaagaagtcaaaacgtcggagaaaaccctatcaatattacacattctcttaaaaaacaaattgagttttgctacataagccggcacatttcctgcaaactgagcttcacacactgatatactaatgaaggctttagcagccccttgagatgctaacgggtacgccttagaggtcacaaacccttgagcttcctcgatcgctttaatggctccttcataatctctcacgcaagtctcaaatgggatcttgagcgtcggatcagtcgtggtattcactgagcctttcatcgccgctaggttcttattgcccaataattgcgtcttttggaagactaaatcgagaagaccttgtaggtcgagggtatatgttgttggatcagagattagccaagtgatgcagaagttggtgtcaatgtgcggttctgtgcagagtcgggataagaaggtttttgtgactttgtcactcggagacaaagatgaagacaaaggggtgattgatagaagaaggagtagaggaagaagtgaaaatacgtttcttttgacgcaaggataagccattgtcttggctgcggaaagataattatgcgtatacttgagagtctgggaggttcttactgcatactaatattaatatacatagtttttggacgacaaaagtcaagttttagcttggtgttgttgatgaaatgttacccaaatttgtttttcttagtcaattgttgactctaattaaacaccttcttctttagttcaatataattcgcaatccaccgttgttattcgattgattaagttaagaaaaatatctttgacttttgacttggggttacaagaaaatcttacactttcaggagttttgtttttgaaaagatttcaaaatcttgggttattaaatatatattatatcatacaaaactcccaaaactttctttttattttttgtgcaaaacaaaactcccaaatctaaacataggaattctatggatgagtgtccgcattccaaacagtgttttatatcttcttttgagtattgtttgtcgtacgtactattcaactatcgttttcgtaagttttttatgacaaacatagtacatatttaaaggaaacgaatcattcccaaaaatttgaagcaaactgaacacaatcaattagggctacaatcaatcatacagagtgaaaaaatcatatcgaatttggtttattcatttattggttttaagttactagtacatgagagttaatgacatttaatatacccctccatttttatctatttgatgttttagacgaaaaattcttttaaaatagatgatgttttccactttcaatgcaaaaagtaaaaaattttcttggttttgaatatttttataatgcagattgttttactattggttgaattgtgtttaggtagatgataaataatgttttagtttataaataaacaaaaattaaataattttctaatcaatatgcaaaaaactttaaatatcaaatcaaatatacaaaaatggagggagaccaaagcgaaaagagtaactcctctttggcaagcttggtttatgaaatgtgacccaaatttgtttacattttagtcaatttttattcaaattaatgtgagaacaaacatatttagggtgctagttagaaatctaagatattcttcttcttcaaacaagttcagtattcaacaacgcttttcttttacaagggaataatttcatttatcatattttcttgatttcttacttctttgcgactctctccactcggtagttggtccgctctagacttccaataaatacctgcgatgctaatgctaatatgctatatgagtaaaataaacaacttcagtttcatatgtgaaactattatctaaaacatgacccaaaaccaaaagacacaataattgactaggatttattcatttatttgtttttaagttaatataacagagtgaatgacattgaatagtttctgccatcttgcaggtaaaagatatataaagaatcaagttctcaaaacgtcggagaaaaccctatcaatgttacacattctcttaaaaaacatattgagtttcgttacataaactggcacattatcccgtccttcaaactgagtttcacacactgatatactaatgaaggctttagctgcccccagagatgctaagtcgtacgccttagatgtcacaaacccttgagcttcctcgatcgctttaatggctacttcataatccgtcacgcaagtctcaaatgggatcttgagcgccggatcagtcgtggtattcactgagcctttcatcgccgctaggctcttatagcccaacaattgcgtcttttgaaaaaccgaatcgagaagaccttgtaggtcgagggtgaatgttgtaggatcagaggttagccaagcgatgcagaagtggttgtaaatgtttggttttgagcagagttggttaagtgtttcgtttgtgactttgtcactcggagacaaagatgatgaaaaaggagtgattgatagaagaacgagaagaggaagaagtgaagatacgtttcttttgacgcaaggataagccattgtttttggctgcagaagtatatttatgcgtgtactttgagcatgtgaggttcttattgcatagtactaatatacatagtttttggatgacaaaagtcaagctctagcttggggttattaatgaaatgttacccaaatttgttttcttagtcaattgttgttgactcaagttattatgggaacgaacaattgatggggctaattaatcaccttctatggatttattctttaattcgatataattccacctttattattccattgaacaagttaagaaaaaaatatttgaattattaatcattgccgtttttaataaaataaaatcttacactttcagaaaatttttatttgaaaagatttcaaaatcttgagttattaatgtaatcatatcatacaaaattcccatatctaagcataagaattctatggatgagtgttcggattccgaactatgtttcgtatcttcctttgagtatttttttttatcgtactattcaactatcgtttttgtaaccttttatgagaagcataaccaggatcagttcctctgttcagtgtggaaaaagtttattttctatatgtgatgtgtatttgtacatgtgtttgtataaatgataatataacgtattttgaaactaccgcaatgcaatatatttttgacatgttttaaaagagaaaattatgatttcgatttaggaagtatataattttaaatcgtatggacgatagcaaaaatacatactgatattatgtaataatgtgtattgtagttttgtatacttatatttagtcaaaatatgtatgtaatctttttaaaaatgggataacattgtatagataataaatgtttatatagtttagttagctaatgtaattaaattgcaattgcgtaatactaattctaatattactgtagtctagtggtgagagttggaggtatggctttgaaggttcgaaccccgttagttattttttccaatgaaggaaaaatgacaaaattaatcttattcttccttcaaaaatcgacctcttcaaaatcctagcccgccacccgttaattttttcacgattttgatccgtttttcttaattttcttttgtaagatagagatacatgttatattcaactattatcaattgatttatatgttaaacaaaaacaatattttctataacattatgtgaatgtttggagaatgatatttatcaaacatgaaaatattggtattgaaacatgtatgtgtctttttattgttgacccttgatttctgctacaactattgtcagtcaatttaccatttcggatgtgtaatcatggtatgagaatgggttgttgctctttctgattcttagttagaccacatgtcctaataaaagagagagagaaaaacttcgcaattcttagcaattagcattagtgcagagatagtgatctgattagtattcttctaactcactttcctgaattctcttctttatgtagatatgcattcacaaatatgtattcatgatttttggcattaagaaagttttactgtaggcaaatttcaaaggttatgtggatttacagtagaagtaacgagatgtgaaagtttgttttcattcttagctaagaagcaagacataatagttgactaagaatttattcatttattggttctaaagttactactacaacagagtgaatgacattgaatagtttctgccatcatgcaggtgaaagattcataaaagaagtcaaaacgtcagagaaaaccctatcaatgttacaaaatcttttaaaaaacaaattgagcttcgttacataaaccggcacatcatcccgtccttcaaactgagcttcacacactgatatactaacaaaggctttagcagccccttgagatgctaactggtacgccttagaggtcacagacccttgagcttcctcgatcgctttaatggctccttcataatctctcacgcaagtctcatatgaggtcctgagcgtcggatcagtagtggttctcactgcgcctttcatcgccgctaggctcttatagcccaacaattgcgtcttttggaagactaaatcgagaagaccttgtaggtcgagggtgaatgttgtaggatcagcggttagccaagtgatgcagaaggggtggtcaatgtgcggacttgcgcagagttgctgaagtaaatcttttgtgattttgtcactcggagataaagatgaagacaaaggggtgattgatagaagaacgagaagaggaagaagtgaaaatacgtttcttttgacgcaaggataagccattgtcttggctgcggaaagataattatgcgtatacttgagagtctgggaggttcttattgcatactaataagtacatagtttttggatgacaatagaaagatattatgaaatgtgacccaaattattatttgttgactcaattaatgtgagaacgaacgtatttagggagacaaaaagctttccttaaaactccatctttattggatgtggaaatcttaaatgtctaaattctataatattcttctttaattctatattattcgcaatccaccattattattcaattcataagttaagaaaaaaatcttcgaattattattcattgccatttttataacaaaagaaaatcttactttgaggaaattcttttatttgaaaagatttcaaaatcttgggttattagtataaatcatatcatacaaaattcccaaatctaaaacataagaaaattctatggatgagtgtccgaactgtgtgttttgtttatcttcttttgagtattttttatcgtactactcaactatcgtttttgaattttgacaatggtaagtatcttgagcatacatatgaaaagaaacgaatcatgtcccaaaatttggaagcaaactgaaatcataaaactgaacacaatcatacagtgaaaaaatcatatcgaatttggttatcctctttcaccaaaaccaccgatcatacctgattaatcacatttggttcattgagcatatcaaattattactatagttgggcctaacccgcaactgaaaatctggagaagatttaacgaataaaaaagagtggtaaaaccgttaaagtattttctttcagctcatctcatatccaccagaaattaaaaatcaaaagtttaaaccaaagtcatcttgatttggcttgtcgtaggcggctttacttccttctccctctcaatccacatctcctagtatacgcatcaacacacacaaaagaaaaatcaaaacccgaagaaccaagaaagtcatccaccgaaacagaatcaacaccaaaccatgatgtacctgagggcttctacatgtgaatgggcttgtcataggtagccatggcagcttccttgatagcctcactcatggtgggatgagcgtgacagactcgagcaatgtcttcacttgatgcatcatagttgatagctagaaccgcctcatggatcaattctcctgcgtttggtgacataatgtgaactcccaagatcttgtctgtctctttatcagccaaaatcttgaccattccctctgctgtgtctatggccttggctctgctattggccatgaatgggaattttccaacattgtagcttacaccttctttcttcagctgctcctcggttttaccaaccgacgcaacttcagggtacgtgtagacaaccccagggactttgtcgtaatccacatgcccgtgtttgcctgctataaactcaacacatgcaacaccatcttcttcggctttgtgagccagcattggtcctggaatcacatctccaattgcataaacgcctgaaacatttgtcgagaatctctcgttcaccagaattctcccgcctttgtctgtctcaactccgattttctctagatcaagtccagatgtgaacggagttctaccagctgagacgaggaccacatcagcttctagagtggtctgttctccaccttcagcaggttccactatgagtttaacaccatctccagatgaatctaccccaacgactttagttttgagcataaatttcatcttctgcttctctagtgagcgttgaaactgcttgcggatttcaccatccattgctggtacgatatccgctgcaaactcaacaactgtgacctctgatcctagccgtccccatacagaacccatctctagcccaatatagccagcaccaatgacaatgagtttctttgggatctctgtcagagacagtgccccggttgatgagacaatcttcttttcatcgatggtgattccaggcaaagacttgacatccgagccagttgcaactatgatatgtttgcctttcacaaccacgttttctccatcgattgtgtccacagagacttccgatggggacagaaacttaccatagcccttaacatagtttaccttgttcttcttgaacagaccttcgactccacgggttaaattcttgacggctgtgtctttctgcgccaacatagcaggaagatctacctcaaccgaagagaccttaacaccatggttagcaaaaacgtgctttgcttcatggtacatgtgagaagagtgaagaagggcctaatacagcagaaactaaactagattatgtcatatatattaatcaaatctcaaacagagactaacacaatcacaaaacaaaaaatgcgaggatcgtgatccagcatatgcaacgagaacaaaatattttcagatatacaaaaattcaaagacaaatagttccatttccgaggaatcaagcacaaacagatctgaaaaataaataagtatcatcatcacacaatcatttcttaaacctcgaaattaatctaacctcagatcgaatctaaatgatgatcaacgagcaagttccacaggagacgaatgaaaatcggagaaaatttccgacgaatcaaggtaatcggaaaaggagtttctaaaatcacctttgaaggaatacagccgacgttaagacaagtaccaccgagagcgcctcgcttttcgatacaggtagtcttaagaccgagctgtgccgctttaatcgccgccacataacctccaggaccgccgccgatgatgacgacgtcgttgtcgtcggatcctgacgaagcgaagccgcgagtgagggagaaagagaatctgaaagcatcagtgggagaattagagatgtttctggtgagaaagtacgcttttctcctagctaagctcgccatcgccatcgttattgttgttgttgttgttgttttgttcttcttccgtcgaagtttctgagagagagagagagatggagaagagagactttggctctttgaaaagtcgaataaagacgaaaacaaaaaggacctcttcgctttttccctgatttttttttaattttcgttaatcataactaagaggatccagaagcaataagcatattattatgatgatataatataaccctaataatccaagctgagtgatcatatacatcatcatcatatgatcaaccactacacaaacatatatcaaaatgggacaaatatgttagtgatttttaaaacatatacaaagtgaagatgtaatgaaagagatattagacacaaaactctgatcacaattttcaaagaaatgggtagagaattagttgattaacttaatcacctgaattccttaatcttaatcagtttttgtacataagtgctcaataatcctacagaataaatagataaaaaatggctataacacttatgaacattttaacaacataaagaagaagtccttcatcttctctttttgccttccttttatttcatccaatatcagagagatgtaataatgtcatcaaataatttggccttgggagggttgttatctcaaaaccccatctttgttgctataatatatacattgtgccctcctcaagaccgctaaaaaaccttcatcagttagccttctagcattgtctgtaaccgggctcgagcttcatcggaaacacagaaccgtatccttcttctctgaggagctggggatgatgagaagcagatgaccaccactgtaacgttatctgatgagtctagccttaacgcttcccttccaagttccatagcgcaccttctaggatcaccgtgtctcctaagtccttgcctgacgaaagtaacagcatactggcttgtcatcacgtcccaaacaccgtcacatcccataatcaagaactcgtcttcctcagttagaatcatctgttgaatgtccgggtctgagatcagaggtgacaaagattcaccaaggggtgaaaacctctttattgaccagtctccaagagctcttgtaacagcaaggtcaccatagagatactcgccttcaaagtaccctcctaaatcctctactcgtctccgttctggctcaaatgtagatttgtgatcaaatgacatatcaacagcttttccttttctgcagagcaccgcacgacaatcaccaacattagcgaccattaaatgtcttccgattacaagagcagtcaatgcggttgttccgcacgaactactaactattctttcgtcctccattgcaagatcagcaagcctataagcttcccggtgagatgtctccagttctttcaagaaaagagagtccacaacagagggcgattgtcgaaaaacagcatcttcaaagaacaagctcatagcattctcttttatatactgtgatgcgtcagatccaccatggccatcaaacacaccgtagaaagccataggcaccggaaatctgtaaaaggaagacccaagatgatctgaaaggtcgtctatgcatatgtgttcatcttccatgtactcccggtagtcacccttatctgcataactccctgagcttatatttggtacaaactcagtaacatgctcttcaatagtagttgcagaacaactcttgatctgtttgaaaacaaaggtaacataagagcttgtttagtgttagttgtttttctccttcataacatcacaaaaccatcacagaattcacaaaacagaacaaatccatgagtagaagagcaagcggaattatcaaagaataagactttatctatccaatccaattcaatttctaacttcgaattcaacggagaatctagaatggtacggagtcctaaaaaattcaaaagtaacaaaattgagattacacaaaaaagagaaaagaaacaaaaacccaaacacataccgattctaaaagaggcgtttcttcagagctcggaatatcaatacaaattgaatcatgaattcgaatttcggcaatctgaaagttactaggatctttcgcaacggagagatgagacttgacatcgataacactgatctcggcggaatcagcgaccatgttttgactgaaaagcatcgattttgctcttcttatgatctgacggacatagcggattatgagatctttccaaagacaaagctgtgtgtaaagcagccatgtttgggtcactgaagctttgcttgtacgcattttaattttggataaattacaaaaaaatgaaaacaaaataggtttaccttgatatgtttgagactatatatataaaaaattttggtataaaattatttctatgattttttgacaaatgtaataaactttatttatttttatacgtttctggtaaaaatatcttattgtaaatactatatttaggtgtttttaaatgcttgtgtgttcacactaatttttcaaaccaaatattaaataagtgttaaatacaaattaagacaaaagattaatgaataattaatttgtctaatggtgattagtgagcaacacgtgggaaacatgagtgagtgcaagctttcaaaccaattaggcctctttaccaatacaccgccaccattacacatggttcttttacactcctaatttttttatgtagtgtacttgtatgtctaggtaaagttacacgtaaacaatcaaattttctctgagtgacaatttttttttcttttttcacaagtgttctttattcatattacaaagccaaatcatatgccattattttacaaaaccaaaagaaacaggccgaaagaaacaggccatattatacaaagaaaaaatacaataaaacaaagtgaaagcccaaaagcccaaacagaaaccctttcactgaaaaaacggtgttgtaaacagcacatagaacacgtggcaagagggaaccagatttgatgacacgtgagaagtcgaagaagagagagtttccgatcaccagaatgatgtgacgccggaaagttttaattccgattgaaaccaccggaaaattgctcaacttttgcagcaacaaaactcaatcttcgcccaaaaaatttaaagcgaaatcccaagttagctttgatgagaatactttctaattgaagcaattctgtaatacttctgcatcttcaaacaataactttataatcttcagaaaaggaatttatcaccaaccgaggcttgcttttattaacctaattcgaatccaataaactagacgatgtctaataaccaaaggcagaacttcagtcaatcggactgtcttttcttcagatctgaagccaaaaaaaaactcaaagtgcgtgagagccgaccgatctcgctacagaaaccgataacgtcggagttaaaccagccaaacttgttttaaaagccaaaagttgctggaaaggagccagccaacgatagtgatgaagccatcgatgctggaagaaaagccagccaacaccactgagaaagctgaccgttgccggaaaagagaaaaaaacgtaataaaaactttctctctctcagtgacaattatttagttttatacttctatttataattgaatagttttgaattttatttgcagaaactttatatttttttttatattaactataaaggtaaaggatacttctgtatattattcaaagcaaacggcgacttaatatgcttatcttggtacttgactttttaaatttggggacatattaatttcattttcttaaaatttgtaaattattcaaagcaaattaaacaaaaatagtaattaatattgagaaatttcatatgagtttaacaaaaataagtctttcaaaagaacatgttatatagaacgaaagtactaaaatgaacgaaacacagagacattgatatagtaattttgcctttatcgtcaaactcgtaaccatttcttgctgcacatcatagcgttagcaactttggatttcatggagacaacaaactcagggggctctcgtctgtccacaacataagcatcgtaagactcagcacgtgagattggaattgagagaatgtcacgtgctactcgggagaggattggatacttttggctctcttctttccaccattccaacgctttgaagtctttgttccacttcataaccggctctttgaggtaggaatcaagctctgattcttgaagctctattggagatccttcaaacttgatatattcttgaaacaaaacaaacttctcgtatgcatcaggcttcttctcttccttaaccttatgttcttcttctttaccttcttcatcattgccatctttttcttcttcttcttcttctcctccttcatcatcatcgtattcatcttcatcatattcttcatcttcttcttcttcttcgtcttcagagtcaatagaagcaaccgagcatattggtttctgacagatatcgctagctgcatagcgagcatacagattgcgtaaatagtccaaaacagttgcagcttttgaaccttcaacattgacttccttctttgagcagtaaaactcaagataattcatcttaaaccgagggtccaatacagaagcagtagccaaaaccagaaacatattgttccaatacttatcaaacctctccaatatctgcttagctttgcagagaaagtaatcactatcagcactcggaagctcttgattcaacattaccttcagctcagcaagaaggtggaagtagacgttagatgtggaatactctccttcgaaaagctcctttgccactttatagatgcaatcagtgagtttgcaaaaagtttgaatcttaatccaatcttcatcagatggtttgtcataatcatcgtaaatctcatcctttgagaatgcatcctcagacttcaagactacagcttgttgcagatgaaacaacgagacgttccaggtggttgctgaacatcttccccatccaaccaacatacgcacatcttccagcagcgacgagcttaattcactcaacacatcatcaaccattaaccggaaaagatcagagcaacaatagactagagaaacccgtggattgaactgattgttccctatctcctctatccatttcctgaaaggatccaacgtttcttcatcaaaatcctcactgttaggcagtagaagagtagagaccttgttctcaatctcaaaatcctgaacagcgttcctgaaagggtaaacataaccatcatccataggtatttcctggtcagtagtgttagtgtaggccaagatccttttcttcatcttccagttatcatcgacgaaatgagcagtcaaacagacgaaatcctcatgcaaaacagggcctcttatgtggtccctagccccccagccattaccaagaagcatccattcataagagaggtttaattgtccttgaaaactcttgaaaaaattcttagctttctctttacattcctcgtagatctcaaaaacttcattctcgactttagaaacactaggaggatacttggggtccccgaggaagctcataaactttgcaaaggaacgggtgttaatggtcttaggattaacatcagcagcaatgaaccacttggccatagcgttgtgagcttctttctcctcatcaacaacaagagaatcgtccaactttagtttcttcctcatatctaaataaaatgaaccatattagtatatatctcactcaatcccataagcagagaaaacaaaacttttggaatcagtacatatggacacatatacaaacacatacaggtcgtagatcagaaagtaaaatcaaacaagacagatcagaacagaaaaaccctagaaattaggcgttgtcaacgagaagacagtacatgtgtacaatagcggagacgctgaaatgaaaaagaggagaagagattagaacctgaagaggagccggaggcgaggtcatcgttatccaagcaacgttgctgctggtttgaggaagacgtacggtacggggagagaggatttagggttttcgatttatggagaaaataaaaagacgattttcaatgtttaaatctttctaatatcttatttatcatttaggcgggaatgctactggagctatttacgtacgtggcctctttttattggatattttcttttcttttccgatgagattatttcgaatattatcattccattttgtgttgggtttaatttcttaagttattaaatgacaaatgataactttgccttgattttatatggatacaaaatatatttctgttagacgaatttaaagttttataaaaaaaaaaacagtaaactatatgtaaagtctctataaatagctaccaaataccaatattccccacaataatgattgatgaatagagttttggtgatgcaaatgcagatgtatgtaagtagatgtaacaggtggtttagtgtgagaaaaacataggaaggtgattcgatcaaaaaaagttcaggaaaaacgtctcatctaatagaaactggactagaaaattgtgattttaaccaaaacaaggttctcattgttactgatctagaaatggaaaacggactaaataaaaaaaaaaaaatacagaaatatgagattggaacatcactgacgagaagtggccaataatcggactgatccttgtgcacaagtacaagtacatgtaactctcttgatgaagttgtttaggtacatgtatatcatcaatacatttaccaatgattcgtctcagacttattagtcacccataattccttttttttctttatggaacagaagaaagtcgtctatgaaacaacatgaacatatatggatagtacatatatttgtgttgagatacaattaaaatgtcacaactttagggctttaattaagatctattttgcaagacttaaataaagcgatttggtagaacaaaaaaaaaaagcaagttgaaacaaagggagcttttacaagttgcaaatgaaattatattttcaccaaccttcttatactcttttgctaattagccttttactgttttgttttcggtattcatatgcttacacattctgtatttatgaaaaaaagttaccgaggaggcgaggaggattgatagctcactaagcagccatgaacaacgtatttgagaaagatcactaaaatgtaatttcaaatgtaaagagtgatacataaaagaaaaaagcaaagaaaaaaattcagctactttgtttattaactaaacagaatcaaccatacatattttatgattaactaatatcattagaaaaaaatactaggtaattaaattgattattaatttttttcctctagattttgaggattaattacttaaattacctcactaaaattgaaccaaacttggaacataactgacgagaaatgaacaacaaccttttggtttctgtgcaatctcttgatgaacttgtataccctctttagcaaagtaaattatagtcttcctttcaatgtgacgaatctttgaagaacacacgaccattttattctcctcgtccaccaagaaactcaacggctcacttgttaatgtaactttaccaaaatctactactaagaagttgctccaagacaagtctttgtccgcatcgatcttagttttggtcacccatatattcatctttattgaagatgtatcaaacctttgttgtaacaaggcaagtttctcttgtctaacaactgatagaaccgcaatttgatcatcgttctgagaaggaaacgatagacgtaggaatctctctgttgtgaaatcaaacttgagtatgaatttgctttctttatctgaagcaacaaaataagcatttcccttcaaattcacgccatttgagcgtatgaaacaaacaggagagatgtcatcaagaattctccatgaatcagagttgaactcatagattttaaacttaattaccaagagaataagctggggatctgagaaaatagtcataagtcaaaattttgtagttatcgcaagatttgttgttgttgttgttgtttccatatcctaaaacataactgttcttgaacacattcttgatttggatccacctggtttgaccagtacaagggttccaaaccacgagtctagtcttgtccttggtagcgcacaataataaaccatcgcagtgagagataataccaagtatcttatcatgttcaggatcatttagctcgtaaagtttacgttcaacaccaatggatggatcaaagctgttttggattccacggagattgatgctatgaaccaaagtattcatctctgtcactgaataatccccaagattattaaagatcacatgcgttgctgctttacccaagttcttcttgacgaatatcggatctctaaataaagcgtaccatcgtttgcaagtagtttgcaattcttttagaaatgtggcaggaaccctagagagtatttccgattctaaatcaggtggaagataagcaaacatcattgtttgtttatctcttgtgatttctagtctgacctccctatgaagaagattgcaacaggactgcaaatagaattaagggtttttacattaacaacttgtctaataaatagagagggtatataactgtgtaatgcaatcaagcatttaaagttattttaaaataacaaatcatatttattcaattatgaatttttacaaagttataatattcagtgtaattgattaaactattgatttgttgtattttaaatctattcttattggaaacagtacattatattttaatgactttaaagaagaagaaactatatatttccctatatttattatgatttgatgtgttagagtttggagtaagattttttatgatcaatatatttattatataggagaagagaatctatgtatgtttattttatttttctattagacaaaatgagacaactttaacttttcatggtttttaattagttttgataacagttaaaaataaacaaatatgaaagtaaaagtttgagcacaaaaagaaattaaaataaaagtaagagatatttatcgagaaaaaacaattgagtattggaatttttttttttggtgggaataagtattggatttttactaatttggtttgaaatttttcttagtttaaaaatacaaagatctaaatcgcatggttttaaattcatttaaaaactttattaaagatataaatccaaatcatttaaaatagaagattgaaataattttgtcaattatattgaggagaatggtcccaaagaaaaaagtctgtccagctttcttgctgatcaagtttgtttttttacgcttaaaattaatgatttactcaggttttctaatgattattgacttacgtttgttgatatttctctcaaaatctctgcttaaagggttttcttaagtgcaaactgttctattggtaagagaaatcatgtatggtgttaaaaacatattcctggaactagaatccaaaaacgatctggagatcaaacacggtcttgaaactgctttgatgttctcaataagcattcaatccaaatagaaaatatgttcgggtaagttcattagatcaccgatccaattaccaaagcaaagtaggtgaacaaaaggaagttttatttagttactctgcttatcaaaactaaatagaaacagctcctattatgtgattcgtttgaccacaaggaaaaccaagaaagaaactacagtaagttgatttgtgttacctttttttgctttcattttcctctggcctttaatttggaagtgtctttctgaatgtgaaccaaatttggagcataactgacgagttattcttgacgaatatcggatctatgcgtgcaactatgcgttcaatgtctactctctcttgtccaggtttcttgctaatcaagtttagggcgtttggtttctcaaattgcatttgattcttgatttgcgtttgttgaattctctttcagtttctcgtcgttacggagttttcattgcatgacttcactgggattgaccaatgttctgaaattactcaagaaaatgcactgtcagagtcgtcaaggaatatttctgctacaagaaagatttcaaacctctaagacaagattttttgcattctgtagaaacttcattcaagcattttgtgatgtctgtcattctttaaggaaccttaaaagcaaattccacatgcggtgaatgtgggtgtttgacctatattccttttgcattaatacgatatctattagggaatgtatcattgaagtcaaatgaactacaaaagatttttgtttgcttttacttttcatagccaaagtaagacttgtaaagctctaacgtatgttgaagtggttcattactccaccacataatttggatatgcggttagatttgagtttcgcgtacattgtgttaaggcttcttgccaagtttgcctcctttgatactttgacgtctttcgaatcaattagactcctgagtttacctgaaaactccatagatggttcaaatctgtcgtcaattccatggcgattgacgctaattgagtgaaccctatcattcatcagtaacatcacttccctcgctgatttacacaagttcttcttcacgaatctcggatctctgaacaaagcgtaccatcgtttgcaaatagtcttccatttcgctagagacttcgccggaaccctagagagtatttccgattccaattcgtctggaagattgggaatcgttgtcatcatcgtcttttttgaagaagaactgggataagggaaaggtaagtagaaaagcttttcttattgatctttatctgatagtgaatttcgattacaactgaggtactttatatagactactcattatagggtttctctttttacagctgttaatcttgtcatcaacaaagagccatgagagcttcataacggttagatagtatcatttggctgtctccttgaacatatgcttttgccatgagagtgaagcttgacttttgttgaatgtcggggcttgaaatatgtgggcttcttttcaatcgttttgggcctttgtaatgtttctgagcccatcttcactttatcttcctcattcctctgtttctctttcgtcgattctagcttgattggtattgttgtgctgatatatttcaaaagcaaacaagagaaacaaaggtaagttctatcagctaaatagaaacaatccctaccaatgattgacgaatctcgttgaaaggaacatgaccgaaagaaaaagcaagataaaagctaaggcaattcatttgactaaccttttgccgtttccttttcctttacacttcgactatgggtgcatctttctcaatgtgaaccagatttggaacataactgacgagaaatggccaattgtgggatgtttccgttgaaacttcatcatagacgaattcatctacaccttctccaacaatgtagattcttctcctatcttcatcttccgtgtctgtatcagaacacactgcgtcagaacacactgccacttttttctcctcgtccaacaggaaactcgttacacttggtagattatcgtcagcaagttcctctactaagatgttgctccacgacaagtctttgccctcaccgatcttagtatcggtcacccatatctttatcttagaatatttcaaaccatgaaccctatggtcgaactgctgtaacaaagcaagcttctcttctccaacaacagacacaaccacactcttattatcacgatccctctgaaaattaaggggaagacatagacgtgcaaatctctccgttgcaaaatcaaacctgagtatgaatttacccttgggagtttctcttttatctgaagcataccagtaagcactttccttcaaagccacgccattacattctatgaaacaatttgcagtgacgccatcaagaaccctccatgaactagaactaaaatcatagatttcagacactggttttttctgattgtcatcgcaacacctcaagattttgtagctatgtaaagaagatgatttgtcgtcaccacatcctagagcatatatatcatcactatcgtaacgagttctaggtatgatccatgtgatttgaccggtacaggggttccaaactacgagtctacagttcattgtggcgcataagaacaaaccattgcagtgatggattcgaaatatttccaaatctgaaccttcgggtatggtgagtgtacctgtaaaatccatggataccgaatagccttttggaattccatggatatctacgctaatcgaattaacctcatgattcatcagaaacaccgtctcccttgctgctttacccaacttcttctcgacgaatttcggatctttgaacaaagcgtaccattttttgcaagtggttttcagtttcggtatagacttggtcggaagtctagagagtatctccggtaacaaatcgtatggaagatcggaaatcgtcgtcattttctcgtgatttctgatctcagtctctagaggaagaaatacggcaaatggagattaagaagatactattactgtttcttattgggcttttgttacttttagcccaacatagtttcattatgtggtgttttctcctgtcagatcataagttaacatgattttaaaggttaccaatcctgcaatccatcaagttcttgctggtcaatctatcaaaatagtctttgaaacgtaggatagagaaattagataaagcatacagtagaggattaaaacatacactacttctcaataaaagatcaaggacacacaacatgaaactcaggttcgaaccattactttggtgaccagaaacatagtttggaaggaactgagaacttttgagttactgagttttcacaaaagccatagcatttaatattcgtaccatattttcccatatcaaaatcgtggccagctctcgctgcacatcatggcgttcacaagtttggcctccatggagacgataaaatcaggacactctctcttgtcagcaacataagcacggtgcgatgttccacgagtgattggaatggagagaatgtcacgagctactccggagaggatcgggtactttgagttctcttctctccaccattccaatgcattgaagtcctttttccactccataactggttccttgagataagaatcaagttctgattcttgaaactcccttgaagatccttcatacttgagaaattcttgaaacaaaacaaaatccttgtatccatcaggcttcttctccttctcctcttcttcttcatcttcatcttcttcgtcaaacagaaacttaaacaaaccactggaatttgggttcatcgaagcatccggacgttttggtagtggactgatatcactagctgcatagcgagcatatagaccacgtaaatagtccacaacagtttcagcttttgaaccgtcatcactaacttcattctttgagcagtaaaactgaagatagttcaacttgaaccgagggtctaaaacagaagcagttgccataaccaggaacatatcattccagtacttatcaaacctcttcactatctcctttgctttgctgagaaagtaatcattatcaccgttcttgagctccttgtttagcatgacctttagctcagcgagaaggtgaaagtagacattagatgttggatactctccatcaaaaagctcctttgcaactttataaatgcaacccgcgagtttgcaaaaagttttgatcttgatccattcttcatcagatggttgttcataatcctgataatcctcttcctcttcaaatacattcgtagcttccatatcaacagctttttgcagattatacaacgtgacatcccaattggtcggtaccattcttccccaaccaaccaacaaccgaacacgacccatcagccatatgtttatgtccttaaacatatcatcaaccattaaccggaaaatatcagagcagcaatagatgagaaacacacgagaatcgatcagatttttccctttctcttcaatccattttctaaaatcatcaaacgctttaacaccaagatcaccatagttaggcattagaagagtcgagaccttgctctcaatctcataatccagaataacattcttaatagaatcaacataaatgtctttcaaacacaaagacgcacgaggatgataccccaagatccatttcttcatcttccagttttcatcagcaaaacaggcactaataccgataaaatcctcgttcaaaataggttcatcaatgtcatcacttgtccaaaaccattcataacagagtgttaatttcccttctccatccttcagcattttcttgaccttttctttaccttcttcgtgcatctccagaattgcgctcttgagtttagaagtatcgagcgaaaaatccgggcacacagtatgaatcatttcaggaatgacagagttctcgtcagaaggattaatcccataaccaatagcaaccttagccatagatctataacgacgtttctcctcctcctgagcctcatcatcgacagaatcatccagcttttgtttctttttcatatctaaaatcaccatgatgcaatagtgttaagatatagtaaagacacagagaggtagattcacagacacatcattgtcaagttaaaataacaaaagggacagagatcagagtaaatcctaaaaattgggataaaatctatagaaagaatcagactctatctctctagagaagaaataagaacctgagccggagccggaggcgagattagcattgtccatagcaactgtttgggaggagaggagacgaacggtacggagagagaattagggaatttcgaattaaaggaagaagagacgattccagttttcaatgtaggctagagtcttagtgatgattttggcgggaaatgccactggagtctgaagctataaccacgtaggatattatttattccctctgagacgagtaaaatctacggttggtaatggacggatgagattgttttaaatatctacgtgcaaatataaatgggccgttacttattgggccgttagtaagaaataaaccatgaaaccacgtcgtttatgctttacctgaaatctgaaaatcggaagctgacaccgctgtctccgagactctcaagctcgaaatttcgccgccctgtcttttctccggtaagcctcgatctatttgtctttctcttcctctcgctctctatttggcttgaaatgttgtattgatttcttctatgtcttctctttaatccaatctctctgccttctcgatcaacttttatttgagttgtggacttcaatgactaagctttgctcttcagtgagtgactgcagctttagggtttatggtttttggttctgtgtatttcatcgtctcttctgattgatagttgcgatcttgtgttttacgttacaggaaaagaaactataattgaagaagctcaagatctcttgtgaaaatgccgtctctgcaaacttctctgcctcctgaactcgctaacaatgtggttagggtcagtaacaattcccacattgacttgtgatttgttttacctttccttgatgctatttcactgatctatttgtctcttttttatgcgcagttgtaccgagaatgtcttcgtagagctaaatttattggtaagcaggtgaggtttataactagtttgtttctctgagctttgaatatgaacctgctttgtctgactcagaatatatggtattgtgtttggtttgattgctattcttgtttgtagtataatgttggattaaagaatttcatttttattactttgaagctaaatcgagtttatttcactgttcgttaccttcacatgctttcacttttagtcacttagtaatttagagcaaaatgtagagaggttttcatttgtgtcagtcgattctcttgaggtaagttatacacgaatgcagtttgattgaagcctgaaaatatgtgttgatgtgctgcaagcagaaaaggttgagattgatattatcgtcacttctgttttgattcctcgagaaagagatttgtgtgtttctattaggattagatatcctggagtggaggagatatatgaagtgaactttttgttatgtttacgtttgtgtcttgcagcaacacaacactgagctagtggttggtatggtgaggcaacaatttaagaaacacatgaatgagacagaccctgagaagattcagaagcttaaagatgagtgagttttctttttttccccaatctctactgaatacgataacttaaaaccttataattagatcagatgtaaaacttgttcgttgaggcatgtttctgcaaaagatgatgtttcacacaaacacacacatatacagctgcttgagatcatatattacagaatactcttgggataagtatgttgtatacatctatttgaaaagtttggaaagactcaaacttctctggtactgtatatgtagtgctgctcggggactcatcaatcacatgttgtttgagtcagcgaagctgacaggaggcaaggttagccagagatcctgatgcagtctggttgcagactctcccattgttattctctctctatctctctagtcaatgcttgtaggctaacaatgcaactaagttggcttgaataatagacttgatcgagaagcctcagtgactcaacattgaggattttcctgtgcaatcaatcaagtggttctctatttcaaatctaatcatacagttttttttttactctggcttagatttgtttatattttggattagacacttcagaagttcagatcatttccagttacttttgacgtaagatgagtatgaattatgcaatcaacaacattgagctaaaaaaagtgctaatattatacataattgtgaacagtacacaacaacattgaccgcatgattcactgcttatctctccgagaagtaacatagcaaaaaaataaaaaagacgatattccacgcttctatgaagattatggtacagactgattcattaaagcatcaactgcaaaacaagaaaaacagttccgtaattgaaagtctccacgataaagaaaatggaagactccttctgagattagacaagtctccaggttcttgaggacgtaaaggctcttggtcaacttcactacatcatatctctgacacgtttcgtgacacgagcaaactcgttaaacaacgtataatcaaattcacaggcttcactatttgagatttctttagagagatcaagtggtgttgatgggttctggcaaatgacaaagtcaaatcctccaaatctctgcatcagagtctccagcctctttgccgttaagcttttgatttcttcaatttgcactagctcaccggtttgtcccgaagtctgccaccatcttttcagtatgttacggctcaatccacaggactctacagagactacgccttttagatggattccaagacggtccaatgcaatttccgcaccaccaatcccgctaaagagtgataaaactgttaaaccttggggaaacatagacttgagtacagagagatggtaacccaatgtgtctgtttggaagcagtaatcaaacaacttcaatctttcagccaaccttccaccaccgatgtttgtgtggttcattggatatcccataatgcactctaaatgttcaggctccaagggtgagaggatgtttggtgctatccaaatgagattggaggtgtgacaatgtcgaagtattaaagtctggtcctgttgagtaggctttcccttgcattcagctatacggcgaccaattcgttcacagagaagagttgcatctttcatattagaacacgtgccgctattgaaatgctttctgatatcccattgtggccaccaactcctcatgtgtggcattgcgtcttgtatagttaatcgagggttcgggagggtattaaacctgttaacagtgggaagattgtgcaggtacccttctgtcctacggagcgctgaacacaaccgagtatctacatgttcggggtgaattccgaacaagaaacccgagatcttcgaccaccagctaggagaaagttcacctaactgtccatagaagaaataaggtcgtctggctacttttggaccaagactctgggacaaacgtggctgcattacactgggaaattcatatgtgttatctttccactcatcttgcatccatggggtttccataaacgaacttgagtcacccatatcttcgggccttaaccgttttcctctgtcatcgtagccagtgtattcttctggataggcattctcatcctcatcttttggtcgcttacctctcgaggtctctcccacattgtcagtggcagggaaaggaaaagactcaataccaggatctggttttatattagcagtgccactcgacgaacccccaccaccatcctctttctgagcaccaaccccaacaaatctccaactctttgaaagacatgtacgattcactgcaggagcagccgctgaaactttctacagtgacaccaaatatcattgagttaaactccaacaatatcttagtttaattaagagaagagtgtgagatggtttaggtgcagtagcagcagcaaaagctctagtttcagcacttcactttacaagtgcatcattggaggtcgagtaaaaattaattaaaaacattagtgtacataccttttctatatcttcaaggtcatcatggcattccgcaggaaattcaccagtaacaattgactcagcaaggacagaaatctgaccttttgtacctgaagaggtgcaaaatagattatataccagtacaacaggacgggctgcaaaacaaatgataggatttctttcaccctaaaagtatcataatcacccccgacaacataaacaagatacgtttcatgtctacatttttttctttcagacatataacagtcatgggatgaacagataagtgcctcagttgctcacctatcttctcaattgccattgaaatttcatcattagagaatcccatttccagtaaacgcaaagtcttgtccattgtttcaaacaattgttcattgggaacctgaatttaaaacacaaaacaaaggttagaggtaataaaggtaataacaacatgaacaacacagaatgaacacaaaagaaaggtagtggaatctacaaaagcattgacaataaaatcaacagctaatgtcaaaaaagcaccaaagacctcaggtcctcgagcagtaactggagtgacatcttcatcttcttcattgatctcagcaccatcaagtgaatcttcggattcctccgcatacttttcagctaattgagcagcaacaatgaagtccaccatctcatcaattggtgtgtctttacctatcacacagaacaaacaatcatgaagaaaggatttggggataggccaaatgatagctgctatctgcatgctaagtttctatatagctttgaatagtataagtatcaattttttagaaactatttacaagtttctaatacggtcacagggaatggattttccactttaacattaataaacaacagcttcataaatgttatttctcttttcagagagttataatatactataagcctccttagtttgcctatattaaatgtcatacaatcagaagttccagtatgaagagatggttaatctataagaagacaaagaaaaaatatcgtgcaatagtgagaaattggtcttgcaatgtacacgaggtctaatcactcaaaaaataacctgaaaagaagaaattctaatatgttaaaccatgaatagacacggacaaaaaggtgtaactttgtaacatgtttgaattttgaatgcaaagccaaagacattgtgaatacattaccaagcctatccagtgcaaagtcaacaagattttctggaaacttcatagttagtaacgcaatccttatacggtcagtttcgtattcaatatcaggttcctgtcaaagaaaagcaagaaacattaagaaattacacagaatgaaagacaagacatgtgggatcacacattatgcgctttaccggtttgggttccattagcccatgaaagctaggtccaggaggttctgtttcagtactcttagtgagaatctctaatagcaactcaaaatcatcttgacctggatgcgaagaggcaaactcagtaatcatatataccccaaatgaaagttagcatgcatggtagttttttacaggaaactgaagaataccattttcgtcaattgctttctgaacaagagttgggcaaaatcccatctcaatcagcaatgacttaacattacttccagaagaactagcagcattgtcctgcacatcaagtatgaaacaataagaacctttctaaaccactacttgttctaaacagtaaaatgtagacacagtggatgtttaagaatcttagccacttatgtcctttatggtatagaaagggtaacaaaacatacaccaatctgctgagggaaagaggtgtcgcagggcaaatcaaagtccaaggtctctggttttggaaacagtatctgctcattcctttcatgattagaggaacctccacttccatttcgtctacgcatatcagcctgcaagattccagaaaaacttatgaaaaacatgcaacacaaaaaacaaaagataacattcccaaagtagccaaattccataccatttgaattaaaattcacacacaaaatctcacatgaaagccctgcagatagataccagagagattatgtcagtgtccccaaataacacaaaagatgaactttaaatggaaaagaattaacctcattgatgttgattttatcccataaacggcaagggagaagatggaatcaataaagccccaaaaatagaacactcctcgaactaagagatgaaaccaaccacgagtgacacttaaaaaagcaattccgaaaaatcacacaaattccagagattgcgacaaagagagcgagagagaggaagacggtgcatgcctgtgcagtggtccgcgtctcacccaatcgagcccagtgcggaggaggagaagctaaaaagttatgaagttgatcgcaatgttgcgcgccgcgtggactacactgccgagactaattcggaattttattgattccctttgagcagtccggtagatcgagcgcgtgaggaaaaaacgaacggtccagatcatagagtttggaacttcgaccaactttctattacaactatgttgtagttctgttttaatatttcaagtttttagaattttaaatttatgtttcagatgctaaaatttgtatacactaaaaacatcatttaccaaaacttgatgaaaaacgaaagaaactactctcaattcccaagctttgagaaagattaaattttgcaaagataattaatagatttcgagctatttctcgacaaagattatgtttttttggcccagttttgtttagtttgtaacaaattggagcaccgaggttatgtgacccaaatgtacgtagactagtcgaggccaatgtatatatagtactactattgtacctgaaagatgatcaaacaaattaataagttgagtgattggttctgttaatgcaagattttttttactaatcttcatcaaagaacatggcaaaataaacaaagcaagaactacgcctgaaacaatctatagattttgtaaatggactaattaatgacatggtttcttcctttgcttcgtgcatggtgtaggttgctagatttgcactgaattaatgacatggtttacatttctgctttatagattcaacgttgtcgtctttgtgaattccgtctagattgacgctcatcagataaaccctatatttcaaaatcatgatcgcatgaaactccttcacttgtttcttctatgctttgttgcctggttggaatattgagagaaagaagaaataaggtaagaggtacgagataatatctcttctccttagagacaacaacagaacaaaacagaaaatgttttattgaactgaaacttgttaatatttacatgacaatacaatattaagtttatataaaaaaaaaaacaaatagacacaacaacccaattagttgtgtctctttttacttgtgccctttgagtgaaacaacacaaacttacaaccgttagctgaaaactcaattacggaccaacactcccccttaattgagcttcgctcttccacttagctcccttctcagtttgtcacaactttcggcttcaaactctttagtagtagcatcacacttcccccaaatagtcttacccaattcgtaacacttcttatcatgatctttagtaaagtcaccacttttctttttctcaatctactttctcaaatttctctctcgtttcaacaaatccgatagtgaagaagaaatctcagcctttgtttactccatcgacggcgaagaaatcaccggagatgcgactcccaacggtttctttgaagtggatgcgacatccgacgatttcttcgccgttgagaaaaagaaaagtggtgactaaactaaaaatcatgataagaagtgttacgaattggctaagactgtttggggaagtgatggtgatgctgctactcttgtgaagccagagagtttgaagcatgcttctgtttttgcctggccgtaaccctagagagcacctcctctgccaaatccagaggaagatccgaaatatcttcgtcattgtttcaataaatagtaattagggttttacttccacacctttagtcttttttataaaggaattagttataaattaggttaccgcctttgtgtccgggcccaaggagactacacaacgggcctcgataagaaaaccctcatttgtgaacgatgacaacataggatcataactatcgtttcataggcaattctataagccatgtgtgtagttcactcaaaatatgtatgaacactttgtctttatcaaaacagtgcgacttttaacaagataaaacatgaaacgatgtaaacatgtaaattcttcaaatgtgaaatcaatccatatcttatcaaattgattcatacacacacacaaagtttgcctaatactcaatgatgagtggttctcataaattcatagactcatagtcatataaaaacgtggttctcataatcatagaaacaaaggatttcaaaaataaaataaaaaagttcatgcggctactacatggaaaagccacaactctttaaaaagacaacatcaattgatacgacatgacaaaacacagaaactcttcctcgtggtgcaggttgctagatttgcacagaacttggaacataagagcacgcaagtggaaagcaatatttgtgtacagactcaccgagatccactggtttgatgtatccatcttctccaacgatgtaagctgtgttacgagtggggttaagtatactctcgcctttatcaaaaagcaccacgagtttgttctcttcgtcaacgaagaaagtaccagatgcagcctcgagtggtcttatcctacccattggaaaaaatagcttgctccacgacactgcattaggctcaatcttattactaatccatatccccgtccacgttatatcccatcgctgatataacaccgcaagtttctcttctctaacactagatagagttatggtatcatcaacacaaggccgaaatggcagaggcagacgcgatccaaatttctctattgtaaaatcaaaacatagtaagaaactagggatctctacgtttatctctgcttcacctagtgggatatcttctatcactctttcacgtgggggtggtgggatcttctctcgagcaaaccaataagtatttcccttgagagtcacgccacggtgaagaaaacataaatcccagtcggtagtgacctcgatgaccttccaagagttagtgtcaagactgtagatttcaaactcgcaaactctagttcgaggctctacactcatatcgcccatgtcctcgtaagcatccaaatatctcaaaattttgtagcttcgtttggcgttgttcttactctcgtatcctagagcgtagatgtcccattcgcggtaagaagttctaggttcgatccacctagtttgcccactataagggttccaaactacaagcctagagtttatttcattggtgatgcataacaacaaaccatcgcagtgataaacttgagatataactattctatcaggatcagcaacggttaggctaataagtttacctttctgctttatagatgattcaacgttttcgtctttgtgaattccatctagattgacgctcatcagatgaagtctagaattcaacgtcatgatcgcatgaaactctttcacttttgcttcggctttttcttgaccaatcagcttctttgtaaagcttctacgtttggttaaagtgttccactttttgcaagtgaatcgtattgctcttaggtatgtcactgggaccctagagagcacctcctctgccaaatcccgaggaagatcggaaattttcgtcattgttttaacaaagatcaatgaaatggaaattaggtcgtcattgtttcaataagggtaaacgaaatggtgattagggttttacttccacgctttcaatcttttatattgtgacggctcagtcaaataagttactcgctctgttttttcgggcccgagaagactctgggcctcgacccgtaacttcctagataacccaactcaaaactctcctttgcaaattatcattcatccgcgccaaccacaagtataacatgatgaaaaggaacgtttttgatactgtaggtttacgaaagccttgttgtatttgatgctgaaagaggaaacaccagtcacatacattaatatagcatgacaaacacataaatttcgatcaaaagacggaaccaactgtttaatcaaacccaacaaaccaaaacgcaaccactggcaacaatcatttgtccaaactgagacgataaacaaggattctcaaacgaccaatcagaccatttaaaaggtaaaaccacccaatctatacatactcaatctctttctctttctcgaaccatatcgaccatgctttctattatgcataaacaagttagacaaagacaatgtcaaaaccctggtttacttctgaactgatcttgagttgagagaggacttgtacccaccgctgcgatcttcgaggataattctttagatccctttacttttatgggcaacgatcctacactgacaatgtcatcagccagagacccagtaacctcttcagaagagtctgacttgtggtcagagccgagagatggggtcggtttaggcttgggttgggttgggttaaaggtggtaccagcagttggtttaatggcgagagagccaaacttcagagtggaaggagtagaatcgtctgttgcttcctgtgtattgctcttttcatccccatctgagttttttaactgcacaacctttgtttctgcagaggtcactgaaggcttcttaacgacatccttggagcttttcttgcttctgtcagaaaaatctagattgagcacgggaaatggcctgcgaaaggtcctaaatggaagtctagctctctcttcctgcatgagtctctggcggtcttcgtagtacataaaatcatctaatagtgaagtcttttccgcatgatgtttgaatagttttagcacctcgagtccttgtttcagtattatctgcacagaaacgagaatgattagattgagatttgagatatcaaaagcagagttctcggaacctggtcttcaaagtgaagtgtcaagataggaaaactcacctcttgtgtgtctcggctgttggtcactggcttattctcgttattatgtaaaataatgtgcctgaaatagctattaggaacatctttaataatgtgccacttgacaggaaagcttccactccatttgtcttgctgccaaaaatccatgtctcggtcgaaggaaactggaccggtcatctcagccacgccacagaacagaccactggaattgacctaaaacgaaggaagcactacatcagcatgagcacaaagtatgaatgcaaacacattcgcacaagggacaaaggggaagaatcgactcacagaaaagaataagaaaataggacattcacgagacttctcagtggctattctctgagcatcttcatatacactctgcaatttcttgttcccattcaatgtagatgaccagacaccatatttgatgctcttgtgaacatcatcttcactatacgacttaatcacaaaaaacctggcatcgctgtattcaatactgaaatcttctttattatatcgatcaggatttatcacaatatttccttccgcatcagcatttccagctttggttgtatatgctttgacaattagttgatttcttgatcttctcgttctcgatcctcgattttgttcactcgtatatgtacttccagttgtgttgttatcacctctggcatcataaatcttggaacaaggtttataactatatgaagcaattgatgagaccccattagcaatgtctgatttcccataaggcaagagtgtgttcgcgtaagcagtttttccctgcaaattaaatatacacgagtccaaatcaagataggaatgatgactaagaagacacaacaaaacactcctcgcaatgcaaactacacccaatatttaaaagaaaacagaatcaggaagtataattctatacgagaaatcacctggagagaatgtgcagaagctgttgtggaaacattcttggggattcctggctgtttatactggccagtagtggtagactttggagcatcttttgggagtccggcaattgctgaaccatttctctgcatggatcctcttccatcagattgaccaccattcgctaccaaagagtctgttgaactattcgagaccatatcaggctgaataacatatggaacataagtaggcgaagacgcagcactttcatacggagggtctgagtaatattgttggaatccaacaaaagaagaatcaacgcctattgaagctcctggtatgtaaggattgtagggattgtagggagactgtgcatatccataacttggtgtatagcagatatagggagcattttcattttgcccaccctgaagacccacagatgaatcataacctgaaaaaaggttccagaattttaggcaatttgcaaccacaaaagcaagagtgataagtaaatttcatgaaccagcctatcaacctgaagagtaataagcgggataatacatgctctggtcaatgacaaaatcagaggctccctcggtatacattgcttcagtttatctgataaaaagttttgttcaattgactttgaactttgaataaacacctgaaatttttatatataaaaaggtcaaaaaatgggactttcatgtaaattaaacttaagaaatcagctaaaaaaacctaaaaacagatatctcagtgaagatataaatccaggaatggagagaaactcataagtcataactagcacggcagcaatactatcagataaaatctgagactccctttctatacaaaaagaagagctctaaatgtacacagagaatccctaacttactagatggacggaaatctaaactatacaaaaccaaaaataacaccaataaaatctcaaaatgcaaagtaacgaaatcaaattaagcttagaagcttacatcaacgtgaagctaaaaatcctaagaaacgaaatcaaataagcttattaaaaaaaacaaatccagcttaaaaagcagaaatttgataaatataccagaaatttggcagaattaagtcatacttgacctaaacagttcttcgagtgaagaagaatttggtaccgacaaagagttagagtgacagagagagaagttaggaaagcgagttcagcagagatagttgaaataatattctgccaaatcgaagaaaccctaacacttcgatgagtgaggtagagagaaacgaagaagacgacgagaagattcgctgagtgagaaaaaatagaataacccagaagacgcgcaaagacagattctccgctgttttgttgcaatacgcagcgttttcgactgaagaatctaattaatcctaaagtcgaaaatacccttgaaattgacctttataagccaatggtctagaagatcccttaccagaaacggtaaataaaggtggtcacttgccagatttgtatggcctacattatccaaatatgtaactacatggaaattaaaaaccactgaaaacaagtgaacaatattgaatattcgaaacagacagtatacaaatttctcacaaaaatatctctaaaaatataaaagatcattttttcatgtctaatagtctcaatgaaacatggaacaccaagctgactcagaatcactaacacaacatgaaccaaaccgcatcaaaacttggagagataaataaaactgtagcttaatgtttagaggcacttagagaagagacttgtgtatataggaaaagaattgagaaaggttgagatagcttcagagggtacgagatttattactttctggtgatgcttctccattaatgataacaccagtttctgcggatcgatttcattcagagaacctgcaatatcagtacttaagaaaattaaaaatctaggttttaaacaaagcaataaattgtttcttatcttgttgtgaagagcaaactttacccaaatcaatctcatggtcatcatcttcttcatccgcctcttcaataacttcactatcctccaattctgctgcaactttggcatacctttctagaaactcttcctccgtttcttcacactcatcgctctcggaatcctgttcaaaaaaaaaagacacaaaatgagactgcttatttgagaagaaacaaaccactagaagatccaatgttgtttcttgaaattagccgtttataaactactttgcatctggaccagcaaattgattgcagaacatactttgattataatttaataacgagtactagaattcaaatcaaacctcgtcatttgaatcagtttcttcagattctgtctcttcttctccaggttctccatcatcttcatcatcgtctgtttcttcgttcacttcctttagccttcgagaagcctccatcaatgaaacaaagcacttccttgccaaatcatcagttgcattcccgtgccttacatctaaaagatgctcgatcacctttactagcgtcatcactgaaacaagaggtcttttagtctatgctcatgcatttatgattaacaacagttactacatacaactaaaccttttatgattatgtgacgagttggcaaaggcacatgtttaacatgtgaactgtaatcgtaactttaccacagaaaggaaagatttatctactcaccatatagttttacttccgatactactgatggactgtcatcacacgtaagcgagtatgaaaaagccaatgaagatacccataactcgaaacctccagatatcactttctctaaaacgccttccacaatatcggaataggagatatagcatgatgatattgccagtaatagaggcctccacaatgtacaaggtttctcacgcaatgctaaaaaatgagaaaaggctgattcagcgaagaccatcgccaatgatttccccaccccttcgatgtcagatgagtagtcgggtacatataataatgtgtggacacaagaacaagccctccttgtggccgacggatactcaagtatggctttgctgacaaatgaaccaatggattctacaacagatcgtggacggactggcatggctggaggggatggtatatctctgaaaaggaaactcctaaaaccatatttattgtttatacccacaacttcttctatacagtcaaaaactgataagtcctccgactcttcccaaccattccaactagcaagaatatcggcccaaactatgagtaaatcagttaatctgagctccacaaatacattgcaattagtagcagcaatcacaatgaaccgcaacatcgtcgacaaatgatctatgcatgaagtcggaggcacatctgttgcctgaaccatgcaaagagaaaaggcagagcagtatcctaaaattagaacagtgtttcaatttctataaattgtagtacaaaggagtagtaatttaactaccagccatgcatgctgtaaaagtgctgacaaagctttgctgatggtgccttgaccagttagccatatttcagtcgcctgattattctcctcatccgcttcaggcttagagctttcataagtctgagtcatcgctgctaatgtctcaaggccacctagaatagcctacgttgaaaataatataagacatttcacaatacctagaccacgaacaactgaaaatactacaaatattttggtagcgtcaaggatttcatgtgcgtgatataaacataggtgtgtcaattttttttacttcaaaatacgaggaatacattccgttaccttcagtttcatgttgttgaaacttcaatataagcaaaaaatttaagaaaggcaggactaaaacatacctgagaccatggatcttcacttggatgcataaacttcaacatattacttactagagaagagacaatgtaaggaatatgcattgcaatatcttgatttcccgactcgaccacggatttgagaagctgaaacaacatgctgtcctcgtcttcctcattaccaatcttaccagtaataaactgaagaagcggcaacaattcaggtggttggtactcattctgaagacaacaaacatattctttgagttagatatgacaagccatcacttcaagccacgagtgcaattgttaatataagtgctgacttacttcgagtagggaacctattccaccagcagctgaaaaacgcactgggtaacaagaaatctccacctgatctggcattgctaatgcctttagtagggaagaaaaaacatctgcattcatctcctgaaagcataaagcaattaatcaattatgggttcactagacgtaaattgctacaaattttaataagtgactataatatatcatatcgcagcaaatggttttcttaaatatatatatttcggtgatttacagcatcaagaagaataagttaaatttacacctcaggtaggcaagacgcaagctctccaagtacccaatttgcagatgcaaccaagtaaggtgagcaatcaggtgtagaataaatgggtagcacacgggtacggacaaaagatgccacatactcaggattttgttcttggataaactgccggaaaaaaggagccatcgtaattctatgtactgtttcagtcaatgcttaattccaaagcaaagagaaccagatttgctcacctcttgcaggctaccatatgccattaggacaccgaaatagctgacatgtcgacatagcaacaaagtcagcttaataaaaaagtaaaagggaatgaaacaagatatactaaagtgaaagagaacagttaacaagaagcacttccaacccgatattagattttcaaaatgtttaatagttgtctgaggagtcttgcaaagaagataagagagccttgtatatactttcagtctactgaaaaaatatctatggcaagatgatcacgagcttgcaaaacgagtttttaaagttcaattcaagaacatattttctaataaccaatgcaagcatttaacataacgttactcaatacgtcaaacaaacatgtaccacactgctcagagcttgcaaaagcattttttatttggtttaggcatctgccaaggatttcaatgagttagaatcagaagtcatgaaaatgtatagaactcacgctgctgaagtactagcatccagtttgtaactcttcgaaggcacaggaaattttgacaaaaatggaagcaccagtagatcacccatgcatctttggttatttcctctgttcttttcacctttcttccgcttacatgctgctggggaagctgtatttgtagtagatactggtggtccctatgagaaatggatcacaacctataagaacctattaacaaatagctggaataggtaaatgaacaactatagtttcttcacctttgacatggcaaggacacaaagtaagttcatagcgcttttcctggctgtaaacaagtcatccctccacccagaaatttcttcctgccaaaacgagagtgctattatttcctaacttctggaacatagacaaaataataatccgtgtagagagagatagagataagtttccatactagttcagatggaaggtttttccttatgaattcatctgcatcttcctcccactcagagatgtcctacttgcaaaagcaacccagaaagaccactaaagtttttgaaataatggtagtaagcaatgcttgcaacacagattacaattaaaggaaagcgtaccctctcattaagcaccagggctggaaagattgcggagtccaacaaaaaggaaaaatggggtgaaagtaatctccatccctgtttacaaggtaccaaatatttgctttcataaacatttgataaaatctatttatatttgctgtaaatttgctaacaacttacagggccaatttccatgacgcgtgaaattacgtcaaaagcaagtgatataattctctcagttaggcatccgagcttctgcacatgatagtaggccctcatagcattagattaagaagatagtaacattttgatgagaagcagcaatttttgtagtaacaaattgctaaacatacatacaccgatgtttgagctatgtttgacaatcttcattgagcagtttattatttccggcaccaatctgaatcaaatatattaggcatgggaaataagcattgctaagaggacttggggtgtttgcatacttatcagagtattttctatgtcggctgacaagcgtgcaaaagaggagcaaacttctttttccagctttcgatcttatcaagtacccatcagaaggagttacactccagtcaaaactcaaggagtccagaattctgatcatatcttgacagaaggaaccgagcagaggtgacaaagcagatggcatatgggacttcacctacaacacaaaacaacaacagtagatagtacaacatgaacatgaaatgaaaaatgataaattatgagtaataatcaatggcaattttcaatcactcagacatgcaataacaattctggaaacttcgtgtatctgcaatataaactgaaaattgtgacttactgaaaagtataggcatttgcaaataatgtggagtgtcttttccaattccagttcatcccatccatgggtagtcaaagcctgcttcagaatcataccagataggaatactcattgagatccaaagagaagatgtatcttacataaacttgtgagtagatgaagaacaagaaaaaaagtaagagaaaaggataaccttgtcaatgagacgatgtaatactgacaccaagggtactagaatttctctcgcgatactctccagctgttgtggcactggctcctttgcaagttttggttgcaggaagtactgcaaagcaaacacacagaaataagccagccttattctcatagaccacactggaccaggttcaaaatagaggactaccccttcaaaatacacatgttttcagatttatttgaagtagttaataatcttaaatttgcagccagaagcaacaaaagttcacaaccaaaataagggatgatcaaccataatatgatggcaaacagggtgcagtagaggagagctgatggaagagagagatataaaaatctaagtttaaagctcatcacttccttactatattcttttttcttacgaaagagaatgatgtaacaaatacctgaaaaggctttacaactgtaagcaataccatcagagcgttcacagtactccagctagagtttgaactgctaattaaactgctcttctcgatagcagagcgcagctccggtacaagtttaggccatgcatttttcctaacaaattctgacacaacaacaatgtgcagctgcccacaagtgaagtaaaatgaagatgtgaacaaattcaaactaaaatctacaggacggaggggttataataagatttgcaacaactagtccagatgaagttaagcttgttgaatacacctaccagttcaagtaagactttaagaactgcaggctctgcctgaagcaaagctaggaggagctgatccttaaactccttgctgacttctgagattgtcccttcagtgccagtgctctttctggtaaaattcttcagatatgttgcagcagcaactttcaggcttggattttcacttcctgtcaaaaaaatatatattgaattagcattaactgtgaagtcaaccaacgtaaccctaattgttccatccggttcaaggaaatcaaaatcgcatctcttcaccagaagtcaatgcttcggaataaagtgaattgataagtaaatcgggtaaaaatgagaagacaacccaaacaaaacaaaaaagcttaccggaagcgatggagagaagacgataagggaaatgagggagcttcgtagacagtagatccagagcctccgtcgcctcgcggacagaaacgccatcaatagaagtaagcgtctggtcaagaagccgaacaatctgaactgagtcgtcgtcgccgacgaacattgcgtttcttttttttcttattgctttttcattttcttccctccaaacttttttatttactgatgaaatttggggaacatcagtggcgggaataattcaggttactttatatattacggaagaatgaataaaaaacaagtctggttgaatttcgaagactttgaaaagatttgggttcgaagactttgaaaagatttgggttcgaagaatttaacaattagtttgtactgttgtatactgataaagctaaaagtttggagactagactttgagggtatttggcaaatttaaccccaaaaaaacttaatgtttagtttaatgatcattgtcttggttagcttctctacacgatgtagttattaaatggttgtattagcttagtttatcatacattatattcgtagtgatatatgttatcacagcattattaccacctatgatgtaaattattccaacaattacgttgtctcatttatttaaagtccttttctattgttaggttttgatcttttctctgtggacaaaaatatatgttgtatgacatctctaattggtttaattggcatgttcattgtatgtaagagcatagttttttttgtagacctgctaactgatacggttggtccctttctatgttgagtctctatgtggaaggtaaattcactctagcttctttcatctaatgacaccaaatatataatgctgacagaaaaaaataaaatatccaacaacttttaaaaaattaaagcatataatttatactttaaagcatatccaactctagtcaatggaaagtttctgaaatctaaccaaatttatttactttattaaatatatatatatatatatattatattaaaatgctatgaatttcaatttattaaatttatttaattttttaaaagaaaatatattatattagaatgcaatgaatttcaatttattaaatttcttaatttatttattattaacttgttcattttcattttataatgaagatatttaactatagacattatatatacaaattttctttctacctttttttactttagtttgaataacgtattttaaaaataaattcgaacgttatgttatataaataagtacgtcaattaactacaaatgtctattaataattacattataatggactcaagtcactttgcgaaggagtaaaaatgtataatgcaaagttactttatcatttaaatcattcaactgatacgtttttctttaggttggctaccaaattttaatatttttttaaactttttaaagatattatatctacaagttttttctagatataaatatgagatcttaaaaataaattcaaaagttgtgttatacgaagtataactaaacacggtacgttggtatcatactattgaacacgtgtaaaagcttacttaattaatactataatacagtgtgactttataatataaactttaatgcatccaactgtagttaagatcatttttgtgacatcttatccaaatttagtttgttatgatcagggtccataaaaaaattattgacagtcaataacatatcttttttatgcaaagaaatatctttacttattcttttttttttgtaggaatatctttacttattcttgagtttcaaatttccattttaaaataaagatatttaattatagtagacaatgtatgtgtatataaatatgtgtgatgcgtatcatctttttacatattttggagagatcaaggcgaagatttggcaagggctcgtcaatcgtcccacctacgttactattgttgatttgttgttgtcgtcaaattcttgcccgtgagttctgaacttaattatgttttctaatcaaatttgtagataactcatattttcttaggtttctaatttagttgatacattttataaaagaaaacaaaaaaaaaaaacttaaattttgtatactgtatacattttttttatcaaacgtatactgtatagataaatccaatttttagaatatcatctggtgtattttccccaaatatttataggggggatctggtatttggggtggatcttttgtttaaagtctacccaattattcagagatatttaaaattatttatatattttaattttaaataaaacaatcaaatactctgttagaatcttgatagcttttagtggttacaatccatcgtgaatctgtgaaaattcaagccatattgtgcttacttagtattgtttatcagggttttattaatactatggaaatggaatttacaccaaattcgtttttttttcttggtttataccagattatatatagtaagtatatctcccacatctgatatgtaacatcctaacgcctaaagtttttcctgcatttcaatcaaaaaccctttattttgttttattttattttaaaaagaggtacataaattattatacaagtaacattgtagaagattcggatatgatcgactttcgtctagcatctacgtgtccaaatggcaactgtacagtcgatattattaataatttgtgaaatctttcatatggtaatttaagcttaaataatatcgatcttgtttttgggaatgtgacacgtttaggtacttttagagaattttattccttttgaggcacttgtcagggatgaggcacttttccaactttttcattaaacttttgaccaatttgtccttgaaaattaaaaaattataattaaaaaaaaagtttcatctctccacgttccttttttttccttcttcttcgtcgcttcttcttttttctctctctctctctcattattacttttttttctttccttgcaaaatcaaacatttaagagtttatcaaaatcaaacatttgagagtttatggaaaacccaagttggcaaattccagtattaaatttcatatccatttgatcgctttgtttgatacaatttgattctttcttgataaattgatgtttcattgaaagtctaaccttaaaagcatattcttttgcttatgagaatcacttatttccacatggttacgtttacgtggacaagttatcatggagacaaactagcatcatttttttttcatcatttttattcttacaaatcatagaaattctgagattatctcaaaattctctatcataacttaaaaacgaagaatatattaagaatcaacaacagaacattgctgctacaattgatcttcttacacgctttatatacttaaacttgagtacttggacactcatcaatggacaactatgcttcagatgtgagttactagatgaccacttggactagagtgcttggacacttatcaatggacaactatgcttcaaatgtgagttattagatgaccatttggacttgaatgcttggacactcatcaatggacaactatgcctcagatgaagttacatcgacaatggcctttttgctgctactcgcgttctcaacatcacgaaccgtttcaagcccagattgcttagaaggtaactgatcatggttaacatcctcacttttcattgtaatcgatgacagagattccttaatcaaggagagaaataaatggaaccaaatcaaataattgttgagagacagggaagatgatgataaatcatatgaaattgggtttttagttttgatttggaatattgagattcccgtaaaaaattggttttgattttggaaagaaagagaaataaagacgatggagaaaagagttgagagagaaaatgaggagaaagcgttgtggttcagagggcaatttaggaattttgatttggtaaagtgccttctcctttcaaagtgcctatttgtggctaaagtttcaaaatagtgcctgtacgtgtaatattctctcttgtttttgtagatggaggatcccttgaagaataccttgacaaaaaaaagcgtgtggatacgtacacgtgagaatatactcatgttagtgtatcttgttatatcttaatcggtattacatttttcgatagatttagtgaaaaattatctaaactttggataaattaatgacaggatgacgtcaggattggtttactcggtagtcctaaattttgtactcatgaccgcattcgctttgctaattttgcaagtttcgcgttcatatggttttgatccctaccagcttgccaaagttgttatgtttttctacatctacttgatggctggcctcgttgaaatatttaggagaatgtttccaaagccggacaataacattcctgagcttcatctggtgggatttctcgccctttttcagtgtacggttgggttaaaatattcatgtacgttggggttaaaatatcttaattttgctttcatatatgtcgaaatattaattgggtgttggtttttcttcgtttggtgtctgtttcacatcgtctcacataactgaatcgccactttaaaatcagtgtctttgtaatctctacactattatttgagcaatgttaaaacaattttaatctttgttgatgtgttatattacaaataatgccatcaacattttagccgtattagagattacattagaatggtaattagataatttgtttttcaaaaacacgcgaatcttaaatgaaacaaataattatccgacgtagcatctttcaaggtgctccgtgacaacacttcctccaatataaatattatatggtgctgacatgaaacaaattgaaaaacaaagattcaataacagctgctaatgtcatattacttacgcgtttagctcctggtccgtgcgagacgaaagttaagagatagatgaagtgagcaccaaatcagaacaagttgacgtaatagatcgagacttgactggtcaagataccatagatcatccaagtcactgtgctcaccaacgtacagatcaaaggccagtattggcgctctcccgttgttccatccatccaaatcctccaatacgtcgccctagacgtaaatttggttagagactatataacatcctataacaattcaaataactctaccgatcgatcgcttaaaaatcattatcactcagttagatttcatgcatatgtatatataataatgaagagagaaagtagtctcacgccggagagatgaagtacaaagcagagacgacatttcctgcagtatagagaagaaaatcattatatatacaattttacaaaactaaaacgtatatgatataaaaaaaagagtaggggaaatgctaggaattttcacatatgatcatcatcatcgtcatgctgtaaacaattgagagaacgggagttaattaataataatatggagaaacgagattagagtaaagattatcaaccatatcatagaacgtatgtatatatagagataaagtcttaataacaaaaaaaacagtcttaataatcgttttttaccttttacgtgtttacttctacttgtgacttatttactttaattgcaactttttttacggtctagattcattttaaagttttaacaacactttagtttgaaattcaacacattttcaaactacactttcacgtgattttcttcatttaacttgacatcgtgcatggttataaagcctgtacacaatacgcactttgcaataattgtttgttagtcactgatcatttttcattggtccactaaataaactattatatgtttgattgttaatatgtaaatttagggggaatttaagtaacatgtacgtagccttgttctatttcaggtggaagtatggctattatattcctctttttttttagcaacaactaattacattaattaggctaattaggggttcttacaagcaaaagagccttctttagcctagctatatatgtttatcagtaaatatatatatatatatatatatatatatatatttgtcaaagctatgtttaggagtatatatttacgctattttgtgatattttcgtatgtcaaactcaaaggaatttaaattaatcaacctagctatgagttatgtgttggattaaattcctcttttcttgaatatacatttggtaaaatagtcttgtatgtagactaccgattaatcgcatgcatgtgtgtagatatatcacacactcaatatatttaagattaaagattattttattagttaattaaaattttggaaaacgccataagcttcagaatgtatgagtctagtcagactctcaaacgtcagattaacgatatggaaattacactttctagtgatttgtttatttatttaatttgacttcgtgttataaagagatcagagacattgatcacatgtttacattattgcaccaccacttttgttttgtacgtaggttgggcattattctcccttgaatccattaatttccttcattgtaaacaacaacactgcttttgaaaaataaataatttattagggataaggccaaattcacttccataatctgtcacatactttaattcatgactaatgttatttcaacccttgtcgttattatttttttaaacaaaaagcagtggatgtccacaacagaaagtttgatgatcctcactctttttacgttactgtgtaacgtgtgcatatactaattgcgatttatgctaaaatagttggaaacatgaaattagtatgtggtttcactcgttttcacttttcaatttgttccgatcgaaaatgtcatcactcttctagaaggttctaaatatcgatcaacaaatagaatacggttttaaagtttaaacgaattgatacaacgaagataatgatgtgagtactttttcttatagtttttaggtttcttactctctcttttagagaatgtttgttctaccctctaatatttaatagttgtatctactttagatttgtctatataaatgaaatatgttgatgaacaaaaaacagattgatgaattagtagacaaatgtatatatatgatgtaatagatatcataaaatccactagaacgtatccaataatgtgtggggcataataacatgtattatttttctattaacagaaaaagatgtttttgactatttgacaaataaattaaaggaaaaaaatcacttaaaaaatacatcacaaatcaaaggaaagtagaagaaaaaaaaatttcaagataatattccatatttatgcatacataaaactatgtttaggataataaattaacaaataataccataacgaggtttaatttaatttaaaatttaaatttccataaacccattagagatagaaagggaaagagagatttacaggaagagataaagaaaaacaacaatgacgaagctcttcttcttcttcttctccttcctctacacaatcacaaccctaacatttccgccattaacaacctcagcagcaacatcatgccgaacattatgcggcaacatcccaataaactacccgttcggcatcgacggcggttgcggatctcctcaatacagaggaatgttcaattgctccaccgatctatatttcaccactccttccggcagctataaggtccaaagcatcgattacgagaagaaaacaatggtaatcttcgatcctgctatgtctacttgctcgattcttcagcctcaccacgatttcaaaatggcggatattcaaaacactcttattagaccttcgtacgacaccgttttcgcacttttcaactgttccaacgattctcctgttcataatcgttaccggaatctatgttttaatgccgccggccactcttgcgacgagctttatagctcctgtacttcctttcgaatcttcaacaccacttctccctatggtatgaatcgctaagttgaacgatttgaatttcaaaatctcgtcgaaatttctcgattttcccccaaattttgaaatctgtgtttccaggtaacaacagtacggttcatacgacgccgtattgctgtttcactaactacgatacggtgcgggtgatgagtatgaacattttggattgctcacattacacgacggtgattgacaatggaaaaatgagaggagtggggcctttggattggtcctatggaatcgagctttcgtactcggtaacggagattggctgtgaccgttgccgaaagtcaggtggcacttgtggctttgacgccgagacggagatctttctttgccagtgttccggttccaacaacaaccctacgagagaatgtggtaattaccgtatcgatccctatactttttaattagttctaaccagaatgtagaatttattatctaggtcagtttagccctaagacagcaatacttgcctggattagtaattgttgttgttggtaaagaaattttgtttgattagtaactgtggcatttgttccatgtcaggtggaggtatgactgatcgaggaggctgcagttttacaaacataaattttataacgactctcttgactatgttcatgtcttttatttacactgttttgtgatatatgcgtatgtcaatttctaagaaatctataaattatgttttggattaaatatcatccttcctgaatatagttttcgtatatgggggttcaataaatatatttgttaagattattttatcaattaaattcaaaatgtcttttagtaaacaatactactaggctctcaaatgtcagattaacgaccaacaaaatttgaacattacacttttcgattgttttttaattacacctcttggttcttggataaagagatgaaagacatttattacagttgatattattgcaccaccactttttgttttgtaggtgaggccgttaatctcccttgattcaccattaatttcattgtaaaccactgtatttatgaaaaatttaaagtaaaccccttaaaacaatgagttttcgaaagatatacctggaaaagttaatctaataccaaattaatgactgacagagggacaattcgattacatttatttaataaaacactaaatttgaaaaccgagataaagaaagggcctgttatcaaaagaaaaaagataatgaaagggcctattcgtataatcgaagaagtagaagggttcatcgtaagaaaattaaacttgctaattttgaatatccactccccccaattcaaatctgagcttcaaggccaactacaacagctctcgaaacttcaaaagctctgggtaagcattaatttcatcctcaagcttctgggcaagtttcttattgttccagtatgagcaaactaagcgtttgaattcgaatcgtcttcttattcttcccggttggtgaaagagaccacaagctacttctcgatctaccatgtcccgaaacgttccgagaatagagatgccggaatcggaagaaaacgagttcgcgagcttgtctttgttttcgccttcaagacctcctctgaattcgataccggatccaagtcaaattcagaaggcgaatcatctaccccatttcgatttggttcagaaattggaaggtacaagagcgcagcatcaacgaacacttggtccagagaagaaatttgaagttttggaaggtagagctggaaattcgagtgattcgaaccctaagattgttaatcgtaatggaaaatctcggtcggagccaaactctgcgcagagtacgcccactaggaacggtgctagggtttctcttggtggtggttgtgctaccggcgcaagatttcttcagtctttcggtggaagaggaaggattccgaggggagtttctattgctgagtctgttagcttcgcggaaacaactccacattttgaactcaatgaagatcattcgttttggaaagaccacaatgtgcaggttggtgcaaaatttagaagtttctttataaattcgttttctttcttttaaagttactaatttaggcctctttctgtatggtataggttttgataaggctgagaccattaggcacaatggaaagggctaatcaaggatatggtaagtgtttaaaacaagagagtccacaaacattggtctggttaggccatccagaggccagattcacctttgaccacgttgccagtgagacaatatctcaggtaagcctcattttaaaattcatgtagttatctgaatacagtggtgatttatagtgttgattttcaggaaaaactgtttcgcgttgctggactgcccatggtggagaattgcttatctggttacaacagctgtgtgtttgcctacggtcaggtgagatcgtaaatgatgataagtgtttgcttattagaatttctatggtgcaagactaagaaacttagcatcctctcatatagactggtagtggcaagacttatactatgatgggagagatatctgaggcagagggaagcctcggtgaagactgcggagttactgctcgtatttttgagtatctgttctcaagaattaaaatggtagttgcctaacttcctttcgaggaatcacttcaagccaatatatttcagtactgaaaaaggtcttttataacaggaagaagaggaaaggagagatgaaaatttgaagttcagttgcaaatgttcttttcttgagatatataacgagcagataaccgacctcttggaaccatcgtcaaccaatttgcaagtaattcaattatttttcctccatcacttggttattatccagtctggtgctttttttttttttcttttgagattggtcgtaaccttgaattccatattttagcttagagaagacttggggaaaggagtatatgttgaaaatcttgtagaacataatgtgagaactgttagtgacgttctaaagcttctactacaggcaagacttccatacccaaacattctgttaagagtttaagtgttcaagtatttaactttatatgttttccttaactttatatgttttcagggagcaactaaccggaagattgctgcaacccgtatgaacagtgaaagcagcagatcccacagcgttttcacttgtacaattgagagtctctgggagaaagattctctaactcgttcaagatttgccagactaaacttggtcgatttggctggttctgaaaggtagcttgtacttcttactgtgtttacttttgcatctttgactgctgaaattatttttgatacatatacaggcagaaaagctcaggtgcggaaggggatcgcctaaaagaagcagcaaacattaacaaatccttatcaactttggggtaattctaacagacagctgtttacgtgtcagtttgtctgccctctgcttttttttgtcatgaactgttttctgttgtacatttccaagcgtctcaattctcaggtaaaaataatatgcatacatgtgatggagaaaatttgtgaagaaactgaaaatatgcaaagtatgtaaggatggcgatagttgtatagctttgaggtctttccaacttaaaaatgctaatgaactttgagattaataatcttatgacaagataagatgccaacaatttcttatactttctactgtgctctacgtttacgttcttgtaacaaaatctttgtagctactaacacttttccattcatctgtcaatttagcttggtgataatgtctctggtggatttggcacatgggaaacatagacatgttccctatagagattctcgacttacctttttactgcaggtatgactgttagagcacttaaaccttcatttatatttctgttgcagttgcatagggactaatttcagatatggtttcaggattctctagggggtaactccaaaacaatgataatagctaatgtcagcccatctctttggtttgtaccaatagctattcttgtttattgggcataccttgtcttgtgtatttctgatttgttattgtcttattgcagctctacaaacgaaaccctcagcaccctgaagttcgcgcaacgggcaaaactaatccagaataatgtacttgtaattcttcattgattaagagctccgttatgaatgtttgacctgatgtaaggttgctccactctgattttccaggctaaagtaaatgaagatgcctctggggatgttacagcactccaacaggaaataagaaagttaaaggtatttactactgacaaattgcatcaaacagaaaactttcctcgtttcatacgtagtcatgtgaggtgatatcaaaaccttttcatttattcaaacaggtccaactgacttctcttctgaagaaccatgactcttgtggggctctttcagactgcatatcttctcttgaagaatccagatactctggtacatgtaaagtagcaggagaaacaagacaagacaagtgtcactgtcaggtgcataattcactgagagtgaaggtatttttgcaacaaatttgtggatatcttgcgactctattattgaactggcttaataactgtataacaggtgaaaaatatgaacgataatatgattggtgctctcagaagggaaaagattgctgaatctgcccttcagaagtccgaggctgagattgagcgtatagattgcttggttagtttgttacaaggacagttcattttcgtattttgaaaggatatatcctagacagagacatctcgagatgcaaacgaaataggttacattttagttcatcttatattttgaccttttactacaggttagagacatggaagaagatgctaagcgcattaaaataatgcttaatcttagggaagagaaagttggagagatggaattctgtacgtctggttcattgatgacaaaagagtgtctcattgaagaaaataaaactctaaaaggagagatcaagcttcttcgcgacagcattgacaagaatccagagttgacacgttcagccttggagaacaccaagctccgggagcagctacaacggtaaattacctattaactgttttggaagagtctttattttttaattaaaaaaacgtcttatactctgatcttactatctttacagatatcagaaattttacgagcatggggaacgagaggcattacttgctgaggtgacaggactacgtgaccaggtttgagaatgcctttaccaaataaaatttcagccaataattcaagctgaacttttgtcacttgtcatgcagcttcttgatgttcttgaagcaaaagatgaatccttttctaaacacgttatgaaggtttggggaaaatatgctatttattatttttaatcttcttggaaactgttgttgctggtttctaatgcgtgaactttgataacactgtaggagaacgaaatggaaaaggaattcgaagactgcagaaacatgaactctagtttgatcaggtaatatcaaaattatatgaaaattcaattatcttttgtgaaggattgacatcgcatgaaaatcatttaccctgttgcatttttctgttttgttgtgggatgtagaatgattgaatgaaccaactttttagttctctgctgtataattatcttacactttcatcctattcttggagtgtttcaacatacgtccataaccctgttgtagcacaattctgctatggcttgtgtttgttaatactataaccttgaacctgaaactttttaattatacacattggacataatatgcttaatttgactaaattggaaaagaagcctgctatggtactgtctcttatgttttggtgttgcttttccatgcagagaactagatgaaatacaagcaggacttggaagatacttgaatttcgatcaaatacaatccaacgttgtaagaattcagagtgacagagaaatgattgatataaatttttctttgctggtggttttatctgtgttgtaccttttgcaggttgcatcttccaccagaggagctgagcaggttaatcaagctcataaacatttaatggtttgatgattgaatatatgtaccataagaatcatagtctgaatagttatacttactagtattgaacattgttttgcatacttaaaattgctttatagggaagattgtttaacgcctctttccattgaaacaggcagaaacaatgccaactataagtgaaatccaagaggaggtggctatttcacatagtaaaaactatgatagaggtgcactagtgaagacagatgaggggatagaccggtcaatcctgcagttcaagttagggaagttaatgaaggacctcgaggaggccagaacactcaattgtaaatatgaaaaagatcataagtcgcagttatctcaacaagaagacattgaagtagtccgtgagcaagtcgagacagaaactgctagaaccattcttgagttgcaggaagaggtgattgctctccagtctgaatttcaaagaagaatctgtaacttgaccgaggaaaatcagtcgataaaagatactataactgctagagagtcagaaataagagcacttaaccaagactgggaaaaggctaccttagaactgactaatttcatcgtcgctgggtccaaatccatcaaaaatgcctctacacagattgaaagtatcatctgttcatttccacaagtgaatgcgtggataggtgattatgttgagaaggctgcaaaaaattgtataaaaaaggaagaaacaattttacttctacagaaaagcttggaagatgcaaggatattagtagcagagatgaatttgaagctgaattctttaaagggcgcaacaattgctctcaacgaatttcaactgggtggcaatgctgcaacgactgaagaggctttcaacttgaataatgatgtagacaggatgagcgatgaggtagacacgcttgagagtaactttaaagcaaatcaatattctattctgaaaacagaacgacatgccgaagctgctttagctgttacaaaatggctttctgattctagagatcaacaccaaatgatggaaaaagtacaagatcaatcagttaaagaatttggtacattaagttcaatctctgcttctcttagtgcggaagggaatgctgatattagtttgtcaagggatggacatctaagtgacgcaacatatccaaagggtgatgagctttcaacatcaagctctgacttttcaaactgtagatggcaacatgattgtgcactgaacgtaaagtgtcaaggagtttcaagttctgaatctgacgctcaagaaagtaataacaagattacatcagcagctttaattgctaagaatggttctgcacattctgtttactgtggaggtatacttttgcttgttttctcttattcaccatcctaaatttaagatctgaaacgagtaatcttgaatgactaaaccaccagttttattttatatgtaaataaagaagctacagattttgtttcatgcagaggggaggcagtcagttgagaagccattgaccattatgatggggagagaagaaacagaatacaaatgcagtaaaccggtaagcttttattagcatcgtttcattttgtgaaggtatataaagaaattggttacatgtcagtgacaaagtaaaccactgaacttatatctatgcagctttcttctggggtatatatgggtcttatgcagagaatggatcctgttagaactttcttcgatcgatttgaggaagtcaatgctaccatgaaagaagctgatctcacaatatgtgaattagtaaaggccaatgaaaaatcaaatagtgttactgaaatgtggcttcaaacccatgaagagttaataagtaaggaaaaaaatttgatggatgatcttgaacaggtcaagtctatactatctgcttgtgaagaagaaaaacaagtcttgctaaatcaaacacacaccactttggcggacatggaaaattcagtgtctttgcttgaagaatattttcaggaaatgaaaagaggagtagaagaaacagtagaggctttgttttcccatgcccgtttagctggaaaagagcttctccaattgatttccaactcaagaccatcacttgaacagattgcatctgaattcatggagagagagttcaccatgtatgcaacataccaatgccacattgggaaactgatcgatcaaattttggatcagagaaaacaggttatcactcccaacctttcaggccaagaaaccaatcagtcagtgaagattaatgccattgggtataatgccgaagatgaagtcactaaaaagcaaagcagagaagagattgtcacaggcttagaaaatgatgaagttgttcagtcacatgaaagcctattatatgagaacttgtatctgaaaaaggagcttgagagaaaagaagctttgtttgaaggcttgctttttgattttaggctacttcaggaatcagcatcaaataaaagagatatcaagaatgaaatggatgagctgtttgacgcattatgcaaagtacagctagagctggaactgaaagcaagtcaagttcatgagctttttgttcataacgagaatcttgaaaattgctccattgacttgaaaacggcgttgttcacgtcacagtcagatctagagcaggctaaacagaggatacaaattcttgcggagcagaatgatgagttaagggcccttgttagtgatctctgtaaggaaaaggctgcagctgaggagggattggacgaacaaagggatcttgtcaataggttggaaaaagaaatccttcacttgactactacagcagagaagcaattgctttctgcggtcaagtccattaaagaaaatttgaaaaagaccagcgatgagaaagatcagattgttgacgaaatatgttcgttaaataataagcttgagttggcctatgctatagctgatgaaaaagaagcaattgccgtagaggctcatcaggtatgtaacttggagccttttgtttctagatgaatcatttgatccttagcaatattgaagagttgacaagaatctaaacttgttctcatgtaggaatctgaagcaagtaaaatatatgctgaacaaaaggaagaggaggtcaagattctagaaatttctgttgaggaacttgagcgtacgataaatatattagaaagacgggttcgtttgctttctttttcattctctatatctgataggtattgcatgaaactcttatacctactaatatgtgagctattttggcttccaggtgtatgatatggatgaagaagtaaaaaggcatcgtaccacccaagattcgttagagacagagctgcaagctctcagacagagattgtttcgatttgaaaacttcactggcactatggtcacaaccaatgaaagcacagaggaatataagagtcacatatccaggtcagccaacctaaatcctactcaaaatattagtttctcttgcatatctttcttggtgaagactgactttggtaaaaataaatgtaaaataggtcgacagggctgcaaggtgcgcatagtcagatacaagtcctacagaaggaagtagcagaacaaaccaaagaggtgtgttatattattggaatgctcggctcaatttgtccatgacatttcctgatattagcgcaaatgattattctttgtttcattacttctacctttgtcttccctcacttacagattaaacagctaaaagagtacatctccgagatcttactgcattctgaggcccaatcatctgcttaccaagagaaggtattagatgtgtagactttagcagtcctctgcacttggcttgattgttgaataaattagcaccagcagattactagtttccgcgctacacattctgctcatatttgtgtctctgttggcgttcttgctaaaaaaaagccatgtcatgatttgaaaaaagaatcaagaatagtaactatttctgatttctatcgtgatgatctgaaggaggcaaaatttgataacaatggtgtatatttcgattagcacctggaagagttgttttccttatttcgtagctcatatagtttctttgtttccaatctcaacagtataagactctggaggtcatgattcgagacttcaaactagaggattcaagttcgtcagctgcagagaccatatcacataaaactgaaaaaagctcaacaaggagtagaggttcaagttcacccttcagatgtatagttgggttggtacaacagatgaaactggagaaggatcaggaattgacaatggcaagggttcgtgttgaagaattggagtcattgctagctgttaaacagaaagaggtttagcctaccttcatttgattgttatttttgtgtggagtgctcacagatctttaaatgaatgtgttgccagcagatgattttcatttcaccttgatttcgatttaaagtgactgatcagtgaatattttctcgttggaacagatttgcacattgaacacgaggatagctgcagctgatagcatgactcatgatgtgattcgggatttacttggtgtgaaaatggatataaccagctatgctgtaagtatatcagaatatatgccatcttcaaaagacttcataggcagtttttctgaatgtatcggtttcttcattgggatatttcaggagttgattgaccagcaccaggtccaaagagtggttgaaaaggctcagcaacatgctgaagagatcctgtccaaggtgatgatactatatacttgacggcatctatttaagttacttggtattcaattttgttattgatacctttctttctctttcaattttaggagcaagaagtcatgaacctgaagagacatattgattatctatttaaggatagagagaggttaggcctattctacttatactagaactgttctgtcacgagccaaagtgcttatttttctctcgggatgttcctgcctttttttggacagttgcatgtcagagttgaacaagaaagatacagatgttcttgcgacacagatatcattagaccaactacaagagcgagttcagttgctttctatgcaaaacgaaatgcttaaggtaattaggagtttaatctacctatattctcaccaccagttctatttatcatatttctattccttaactcactgattctttgtatcttccgttttgcagaatgacaagagcaatttgctgaggaagttagctgaacttgatcgaacagtccacaatgcacaggccagtaaccatcgtgttccacagacaacaaaggtatatgtataacgggctgcctttgcttactgcatgtggctgaaaccaatcataatggaaaagaactcaatggttgattctaagattctgaatttcgttttatcaaacaggatacagcgtcatttaaacttgctgatactgattataccaagagactggaaaacgctcagaagcttctttcccatgctaataacgaattggcaaagtatcgcaaaacgagcaataaccatccatctacaagaactcaaggacagagctctggtacaagatatcggtaaagagttttttttttaaagcttctcttctcctgggtttgttcttgagagtatatatcgcacgagtcaaacctatgaagctagtcaagcaatcagaacaaggcagagtgttttatatggcttgatcgtccataaacaagtcaactttccagtagcttgatggaattacgttcttgacttgtttttggttaactttttgtgtgtgagtgtcttaaattggaattgttgtgtataagaatgcatataacatgttgctgcaattggcctgttgttgtatttgtatgtttatatgctccgaacatttcttattgctaataaaataatggttttgttcctcatctaacaacggagtaaacgtgaatcaaagatatgatcggagcaaatagcacaaaaagattaccataaaatcaggctacgtctgtctccacttcaacgactcatcctgagacaattttcataggagtaaaagacacaggtgaaactcagaccgagctttaagatgaaattttgcatgatcaaacgtgggagagagtgtatgactatgagttaatcatgatatactctcttctcttcttcttctcttgtacttggtttgttctagagagagtatatatatcgcacatgcctacatgagtcaaacctatgaagatagtccagcaatcataacaatgtgttgttattggtctgtttttgtatttgtatgttaatatatctataaatgaagagattgaatcggtgaatgtaaatacgaggtaacatcaacattttcccattgctaatagaattatagttaaaacttttgttcctcctctaattacggagtaaacatgaactcaagattactcgtcttaaatttgtagataactacgacaaaacacaaaaataagaccttagaggacttatatgttcggagcaaatggcacaaagaggttcccatgacttcatgctgcatctgcctccatcttcgaagactcatcctgagacaattttccagaggaacaaagacatgtgaagctcagaccgagtttaaagatgagatcttgcatgatcaatgtggaagagtgtgggcaaatggttatccagaaacagaaaagcatcatcttagcaaaaaaaactatagaaagcaaagcaggaaggagcatcaaaccacacaccttaatacagacgtagatgtaatggacatcagggtttttgcctatcgcagattccactgaacttccatcagcatctagaggaagaggttttgtcagttcccattttggggtgtctaacggttgatcggttaaacttttgtctgcattaaaaagacagctagtctaagtttagtagagaacagtgaacttttatccacaactaagtacaagatacaaatttaacgatggtttctgagtgaaagctgacctataacatggagtttggttgtccaagagcatgattctttaaacaggcgaagacggtaaatcggagcaccatatgtaatctacagagaaccatctaaatatcactttgcattcaacaaacatagacacataagaataaaaagtgatacgaaaatattaccaggatatagactcctttatccttgaggaccctataggtttcatcaactgctttcattataggtgaaagaatcaagaaagaaatagaaaaagaagaagctagaacagataaacagaaaccattcaacatttcatgccaagtacctccaaacctcttcaagcatttgtgttgagtattgcctcgaattactcccacactaatacatgtaaaaagtataagacttagtgagaaatcgagcatctagagataacataagtaaagagaaagtagacctcactcaccaaaatggagtctaaggttcctgaaaacacacacacaaaaatccaaaatgttatacaaatgaaacataatgcattttaggctagtaatgatattcaaacaagtagtaagaacacctttatcgataacagcatcaaaagaagcatcttcaaatgctttcatatcacgcacatccatcttcaaatctgttttatttttcacgttatccaaaaatacacaagttcatgctaaatctagtaatatacccgattaaggcagacacagatatgtctcttcccaaattgcaacattaagtagaagaatcaacaaatgtaaaaaaaaaaccaaaaaaacaacgttacatttgagctgaggacgatcagagtatttcttaatcatggtatcaatcaccactgatgatatatcaatactgactacatcttcgtatccatcatccaccattccttcgctaaacgctacattaaaagttcgaaacaactaatgaccaaaacggatccataatacacacaaaactgtgaaatcaaaagagttgttttcttctatatacctgagtttccacagccaatgacgaggactcgttgattacgttgaggaacatagagattgatgagaggagctaaaggtgaatacttctggtaccaatcaaacggttcagattcattcttgtaacgatcgtcccaataccattgctcgctgtaagattgcgttggtgcctctgtagccatctccgtcgttaacttttccgatttcgcttcactctctgatcaaaaggaagaaggagacagaagaaagatacacgagcgaccacggtggtccaaatcttccacgtggcatatttatttaataaccgaccggttcaccggtttgattaaacatttaagattaaacccgttaaaaatcgaaataaccggaatacaaaccacttttcagcagtcacccctaaaagcaaacacaccaaaatcaatcagagggttacattgtttgataccatgctactcttctgcagtagcattgccactgcctttcttagttccttcctactgcataactgtggcaaaatatcacggaacgttatcgaactagaatacacaccattagaaaccatctcctggaaaatgtctaaggcggtattaaaatcaccaacttgacgaaacccatgaatcaaagtggtgtaagtaattacattagcaactattcctcttcgatacatctcgcagaaaagattcatcccatctttaacccttgttgctttacagtaaccattaatgagtgtattaaacgttgagcagctcttggatacctttctcgcctgagctagtttgttctgcttgcagagtccatggatcattgagttataggttatagtatcggggactagacctctacggatcatctctgcatataatttttcagccctacctaacgagctgaatctgatcatcatattgtaagtttgaacatcaggttgcaatccactgatgaggagattagtgaatatattccctgcttcgtcaaacttaccagccttgcacagtccatggatgatgatgttataaccagctgtatccatatccatgttactctcccgcatgaccttaaacattttcaaagccttttctagtttcccattatcgcaaaaagcagagaaagtattgatcaggaagctgctcggtctgggttatacacaatttcaacaccttgaagatccaattccactgttttgtgtgtgtttttgatgaagacacttcatctagattattagtgagtgactttgaaaatcatttggcttgtttaagactcttggtattgtttctcttcattgatatacaaactagaagatgcacactgaatcttatatatctgaatcaggaattaaatttcaacaagtaaaaattctttttcattatttccaagtgatgcttatcctcgtttatgtgtttttcgttcttttttttgggaatccccttgtttaaggggtgtagtatatatgcttgctaagttgatgtttattcttgctttttgattctgcaacctcacagggcataagtctaaacatggaaaaagctaaaatccttacaagcaaagtataaaggtttgatcctaaaaaacacaagattcattctataaatagaaatttaatatactgatgcttatctgtatattgactagttttctctctcgtttctgcatatcttctcatggccagttccggtgattatgatggtatcatctcactctccctctatattcttcacttaccctatctgattaaatacactgacgtaccagccgtgaatggtatatgtatatgtgcatatggtcctatagatagaccattgaatgatatacatcataggaaaccaagtgtgatagttaagatttcaacctttggatgatgttgttgccctgttttgttacggatagtgtaattagattgatttctccttccacttaaaggtaaaatgtataagtaaatttgcacaaaggtaacttttgtgagaaatgcttgcagaaattataaagtctatatctgatgccccaccaacacattacatggtcaagatagagtctttctcactccttacaaagcatgctattgagagatatgaaactgagagctttgaagctggtggctacaaatggtatgccatcattgttacacaaccttttctttagtaattaacaaaacccttttgtgattgaagattaatcatcataacacgtgctggtatcttaaaccctgtttactgttggaacatgcctcaactttttcagtgctttttgttgatgggattctattctacattgctttagggtgtggtcagtagttatgttttggaaaattttcttttattcaaaagtaaatgttacatcctctttttctctctaagtagtggactagtataaagtctctctggtcatggttttcaacttttccaactcatagtggatcgtttctcatgtgaaatctggacccatctttgtttctattttcctgtgtccaattaaatacggtgaatttagtcaattactgtgcattagtattaacatgtctaacataatatgtggtcttgcttgcaggaaactggttctgtacccaaatggaaacaagagcaagaatacgaaagaccatgtttctgtttacttgtctcttgcggactctagttcattaagtccagggtgggaggtttatgcagttttccgtctgtatttactggatcaaaacaaagataactatttgattctacaaggtatctttaacttcttcaaacagtatgtttctctcatccttgtcccactcttagtatgcattttgtgttgcaggaaacgagagacggtttcattcggtgaagcgcgaatggggatttgataaattcatcccaaccggtaccttctctgatgcgtcaaacggttaccttatggaagacacatgtatgtttggagctgatgtgtttgtttctaaggagagaagaagtgggagaggagaatgtttatcaatgattaaagatgctactagctctaaacacgtctggaaaattgagaatttctccaagttagacaaagagagctatgactctaatgctttcttcgctggagatagaaaatggtaacacaaatttgccaacaatcccaaagcaaccgtagctttaagctaataaatggtactactaatgcaggaagatagagttttatcctacgggaacaaagcaaggaacaggaacccatctttctatctatctgacccttgttgatcctgaaaccatttcagatggtacaaagatatttgtagagtttacaattcgaatatttgatcagttacaaggcagacacattgccgggaagggtaaacaccgcaaactcaatcacatacttgttatatgaatgtgaatgtgttcacctcttgatctgtaagttctctggtttacagttactaaatggtttagtcgatcaagctcggagcatggatgggtgaaatatgtatccatggtttatttcacgcagccaaacagtggtctgttgctcaaagatgtatgtcttgttgaagctgatgtatgcgttcatggaatcaccagtgcaatctaatctcatcatgttttaactcttacaataaagtctcacttgcctctctgtttaaggactcgtcaaagccaaaatatttgatattgataatgcaaacaaaggagactaatgtcgaatattattctcttatatgattttcttctcaaaataagtaagaaatacatattatgaatttaactttcttagcacaagaataccatataaataattatataaattcccagctgcttagcttttttcttcaaagttgaaaacaaaatgaataaacccatctcagagttgaaactaaagaggcagaaagagcctaaaatacagagaacaagactgattctggacagaagtgaaacagaggctgacaggtttcaagcttggaccttgttagacttgagtggcttgactacctcccaggtgaaatcagcatcgtcccttccaaagtgaccataggcagcagtcttcaagaacctaccattacctcctctcttcagatccaagttaatggagatcatacctggcctgaaatcaaaactctccttcacaatctcaagaatctccttgtctggtatctttcctgttccataactgtccacgaacacagacaatggctcagggacaccaatggcatacgagacttgcacaatgacccgcctcgctagcccactggctacaatgctcttagctgcttgcctaacgatgtaagccccactcctgtcaaccttggttgggtcctttccagagaaagcaccacctccgtgtgcaccccaaccaccataagtatcgatgatgatcttacggccggtaagccctgcatctccatgaggacctccgataacaaaacgaccagatgggttgagatggaagatggttttctcatcaaggtatttctctgggatcactggcttgatcacatgctccttaagatcagctgcgatctcatcgttagtcacagtctcgtcatgctgtgttgagatgagaacagtgtggacacgtacaggaaccatggctccgctttcgttgatgtactcaatagtgacttgagtcttaccatctggcctcaaccaagggcaagttccattcttgcgaacttcagtgagtttagctccaagcttagtagcgagaacgtgagtaagaggcatgagctcaggagtctcatcagtagcatacccaaacatgtgaccttggtcaccagctccaacctcctctggcttcttggtgagatgaccatgaacaccttgtgcaatgtcaggactctgttgctcaatgttaaccagaaccttgcaattgtcagcatctagaccaacgtcagcagagacgaatccaatctcacggcatgttttacgaacaatctgctcgtaatcaacgttagccttggtggtgatttctccaaaaaccatgaccatgttagtcttggtacaagtctcacaagcaactttgctctcagggtcttgttcaaggcaagcatcgaggatagcgtcggagatctgatcacaaagcttgtcgggatgtccctcgttgacggattcagatgtgaacaaaaaagattccatttttccgatctgattcacgaaagaaacctaatacagagcagagaaatcaaacaagatcaatgagaagtagtataaacacacataacaaactcgaatcaattaaaaattggaatctagattcaataaccagatctataaatcaacacttctctcaaacaaaaatcgacacttggttcaaattctacagaaatgcaggaatcttgagaaagtatgaatcgaagaaaagtgaacataccttaaaaggagattagtaatgaaggttgagctaaagaaatgtggtggtagtagtagtacgaaggtgaaggaggagcgtataagctttatatatacgagctcgtcgagggggttggtgtaagatcgtaatttcgtccagattcattcccagtttcatctaactgtgttcagacaatgagatctagatatctgacggttcagattagatctagaaatgtaagaaggttttaaaccgttggatttgcttcactggaccaccgcgtgcgagtacaacttgacagcatctaatgaagaagattgcgaatcacgacgattataataatagttatcggtactcaaattaatgctgcaaattagatatttttgagcatgtaaagtgaatttaaagagttaatgataattaatgtcgtaaatcatgaagaagttgtgtgattagagaagggtttgtgtgattgtgtcggtgaacataattagagattatacacacacaggctgtctctttactcttttatagaagggtccacttgccaccggtaaaatgacaacatagaattcttcttttgtttgctttttagtagtgtcggctagcttaggttgtcaaatatgactgactattgttgggtggtctaaatctgatcttgtctgatccgaaaaaggtaaaactgcacagttacgccaatatgcgaagttcatgtccggtctgaaaaggctagatttagttattgggctcaaaatgggccaaggccttgcaaataacgaaatacaccaagcgataaaatttgaagcccatgactatgaggcagttgttatttgttaagttagagaagaaattggaacaaaatacactaaaaccttctataaattaataggtcaagggactggcacctcctagaggattccgatccgctcttatccaaagatcggagctttacaaagaagcaccgtgctcaagccaaagcagcaacgaaggagaaattacctgcaaaaatgatgacattgtccgatcttccaagtgatttggcagaggaggttctgtctaagattccggtgacatctctgagaggggtcagagctacttgcaaaaagtggaacactttatccaaagatcggagctttacaaggaaacaccttgctcaagccaaagcagcggcagcaagggagtttatggtggtcatggtgatggattttcaggtttatttgatgggcatcaatctccataaggacgttgacgcaactataaacggtcaaggtaaacttattagcttagacgattccaatcaagtcgatatatcttacgtctatcactgcgacagtttagtcttatgcatcccaaaagactgcgctaggcttgttgtttggaatccgtattggggccaaaccttatggttcaagcccactagtcttcgccattttccgcactggtatatgtatgctattggataccagatgcgaagaggaaaccgagacgcgaaaacttcaaggtggttgttgacttgtagaccgacgaccaaaactatcacaaagaacacgatcgatcacctttgaaagtcaaaagatagatactcgcttcacatctatattttacaactttattatattccacacaaatcatatactatacatacattagtctccttttattaaataccagccgtctattttggtttttcttattacatgcttaaaaataccaaatgcacaaagaaggatacttttacccactacaaaatatggacttatctgaaaatttttatcgaacacatttttcttattgaaatagttacctatgtattagtacatatattttgttacgggaaattcaaaaaattttatatacaaccaatcaaatggctaattaataagtggattaagacctttgacctcaaaacacgaccaagtaaaataacttcaagttgattgataaaggcgtactataaagagtagacaaattgctaacatgcgcctaagcgcaccctatatatcatttactgtaaatttccgccgggaagaaaagtctgcgtttcttcaccaaccctacacgaaccaagatagatagaaaccttctccttcttctgcttcttttatcatcggagaattcgaatcttcttttcctctttttgagattctctaattatccttttggaagaggtaattcgctatcttcttcttcttcttcttaccaactcgcttaaatttctcttttttgggtctttccccgtatttatctgtaaaatttgtttctagggttcgatttcatgccgattagattgtgttaacggatttttcggagtttattgatagttatttcagtttgaaatccattttaggggttacgatcgttgacttgtgataagtctaggtcaccaaatgtatcatttcttagtgtctcgatttttatcgaattatgctctcgtaatgaaacttcatcatcatgtagatgaaggattttactcttctgatacaaaaatttgttttttgtgaaaaaaaatctgtttccttttttgttctgcttaaaccctataattagaaactttcgtcgagcatttctctataagtttgtacagtttgctctatttcatttggggaagaaattagttacttctaaattttcgtatgttataaagtcttgttctgcaacaccattactgacgtttttgcgttatgaatatactgatacagtttcgtgtgagagagaagcgtaatgggctgctttggttgttgtggtggtggtgaggatttccgtagagtttctgaaactggaccaaagccagtgcataacactggaggtagcttagtttaccccatatcagtatttctcttttggtggctaagttaatgaactttattaattgttcttaaggttacaatggaggtcaccatcaaagggcagatccacccaaaaaccttccagtcattcagatgcagcctatctctgttgcggccattccagctgatgaattgagggatataacggataactatggttcaaagtccttgattggtgagggttcatatggaagagtcttttatggtattcttaaaagtggtaaagcagctgccattaagaaactggattctagtaagcaaccagatcaagaatttctcgcccaggtagatgctatagagtatattattgcagtcttgttgggcctagaccttatacttcctatgctctgatagttctgcacgaagtcactctgttgtggttgttttgtcgtatttggctttgttactgacatgaccaactttaacaggtatcaatggtttcgagattgcgacaagaaaatgttgttgcgcttctgggctattgtgttgatggcccactccgtgttcttgcttatgaatatgctcctaatggatctcttcatgatattcttcatggtaagttactaatgtaaaacatcgaaggaagatcaataccatttttccaagatcttcagaggagaaactaatgaactgtggtgaattcactggtgcaggtcgaaaaggtgttaaaggggcacagccaggtcctgttctgtcgtggcaccagagagtcaaaattgctgttggtgcggctagaggactcgagtacttgcatgagaaggcaaaccctcatgttatccacagagacatcaaatccagcaatgtacttctgttcgatgatgatgttgccaagattgctgattttgatttgtccaaccaagcccctgacatggctgctcgccttcactcaacccgtgtgctcggaacctttggctatcacgctccagagtaagctcctttagagatatcatttatctggaacagtgatattttgatttgtttacactcaagtcgtgctgagaatcttttgttatcattatctaatgttctgatgcactaagtccttcacttggactaagctttgataatcatattttcatacatttacacttctgtatgtcttgcatttcttcccattgaccaaactagattcttaaacatatttggttctgcaatttaggtatgcaatgacggggacgttgagcacaaagagtgatgtctatagttttggcgttgttctgctggagctcctcacaggtcgtaaaccagttgatcataccttaccacgtggacagcagagtgtcgtgacatgggtaatacatcggtctctgcttcttcttctggttgactcatatttataagaaaatcttagaaaatacatgatttattcagtcaattaggagaatgaccaaaaaaatcctctagcaacttcgcaacacctctttgcatctatagaaatcattgatttggtgtagtcaattcttttctagaaagaaatttcttaaactagaatttattaaataagaaaaaccaagtgccaattgtttttttaagaaagaaattttcctggataaaggtgggtttctgtacgtgaagcctttctgaagcaaactctgcttacttgtgagatattagagactctgaactttccctatagacaaaaaccagtagtcaatgataacgcttttgtttgtctcaggcaacccctaaattgagtgaagacaaggtgaagcagtgtgttgacgcaagactaaacggagaatatcctcccaaagctgttgctaaggtaatttcccccaaaactttgtcatacttctcactgttgcagtagaaaaggtttaccttaggatttgactacttctccatccgttgcaccccgcaatcaactacaacagctaaaacttgtctgcctggttgaaaaaacaaaaatgaatttgatttgattccctcttgatgtgttgttccctatgatatgcctagatttgcaacccaaaacctcgagtctgattttggttttctcttatgactcattgtgatcagctggctgcggtagctgcactgtgtgtgcaatatgaggcagacttcaggcctaacatgagcatagtggtgaaggctcttcagccgttgctcaatcctcctcgttctgctccccagactccacacaggaacccgtattgatatgctctagtctgatatcaccctttatgatcatcactatttcatttgtttttgtttgaatccgatttgtgtaaatttgtgaaataggcgtttattctctcataaaccccctgccacttcactgaaaatcttacttggaaagacctgaatgttactgtatttctatattatttcatgcatgtgaatgtgatgcaagtctctactaatgctacgatatgcgaggtaaagatataccaatactctgtttgtgcgtctgtctgtacaagctcaactcttttcgatcttgaatgcatcttaatcactaaaggaattattgggaaaaaatctttaaggatc

SEQ ID NO: 432 - DNA, 83233 bp, Arabidopsis thaliana
gatctaactaacagaacaacacatgccaatcaaattactaaaccatgagcttcataaacccacacataaagttacagcaatcgattgattgatcaagtaaccactaagagccctatcaataaatccaggagatacaaactacatggccaaaatgggaatgagtaaactgcgatggagttacctgtaacgcaaaaatgccttctttctcaacagttttaacctgagagacgatattatcatcaacccaaagaatagaaatcggaatcctctttccccatttgtcccagagcgcagtcatcccacacttaaccgcgatgatcccagtcctcttggatctactagacatctcaccttgtttcgcctcaatgattcgggtctgagccccgataatatcagatccaccaccgtccatcaacccagtatcggagctgaatcgtcggatgagaaagaagctactacaatgaggaagagattcagaggatgaaggagttatagaccgtattgatagaaactgattgattcgagaaaggaggcctctcggtacggccgccatgatttcgaatcgaagcgaccttcaatggctaaagtctaaacgaagaaggagagagatgcagaaaccagaactctcaaggcttttgcgtagggttttagatgggcgacaaaatgataaccaaagcctctatctcagaaagagagtctcaatattatttatttccctctttttataatatgtggacgataataaaaacaaaatcctacgtggcttatccattgcgacatataaaacaaaaacaaaacggtacatgaaaattttgcctcaattttcaaaatcaatctcaaattctcaaatgtctgtgattcgtccttctccgattccaattccgagatgcagatctcaggtactgcatcgtcgtctttattcgattcaattgattcagcgacgacgtcgacggtggaatccgaggtcggaggtggaggatactgcgattgaatcgacggctcggtctccggaggcagcgggagggaaaatggtggtggagcttgttggagctttcaacgaagtaacggagaggatgaattcggtttggttgtcgacgtcttcgtctaggttactctttaaagctctcaagctctcgattccgattttacagtctcttcctcttgcctctgatggtcgctctcctctttctaaggctctctcactctctatcattctcgcagatctccaggtttactctcgatccttgcatttttcacagtttcttgtttagatgaattaggttttgttgttgattctgtgacgaaattgaagcattaagttagaactagaatctgagattaagtgagttctgtgacattgttatttgaaaagctctatcaattgatatttgataaattatgtggtaatggtagatggatgcagaagttatctcggcgagtatattgagtgaggtggtggacgcgaatgcgatatctatatatgaagttagagaccatattggtactggaactgctcatctgcttcatgagatttttcgtgtgaagaatattccttttaaagttgatgtgttagacgatgaaactgctgcttcattgagaaagttctatttaacctactatgacatcagagctgtgattatggatttggtttcaaagcttgatgagatgaggcatttggatcacttgccaaggtatcgccagcagattctctctcttgaagtgttgaagatttattctcctttagctcatgcggtgggggctaatcacctgtcacttgagctcgaggacatctctttccgttatctttttccgtgttcgtatatatacttagattcatggttaagaggtcacgagaacgggtctaaaccgttgatagacgtgtacaaagagcagcttcatcggtctttgaaggatgatttggttttggctgaaatggtgaatgatgtatatattaaaggtcggtataaaagtcggtacagcatgatgaagaagctcctaagagatgggcgtaaaccggaagaagtgaacgatgtgcttggtctacgggtcatattaatgcctaattctgtagtaaacgatgttgaagttggcgaaaaagcctgttacagaacaagtgagattatccggtctttgtggaaggagattccgcatagaacaaaagactacattgctaggccaaaggaaaatgggtataggagtttacacatggcagttgatgttagcgacagcgatcagataagacctttgatggagatacaaatacggacaatggatatggatggatccgctaatgctggaacagcatcacattctttgtataaaggcggtctaaccgacccaaaagaggtaagcacttctgtgattttttagtttggcaaatttaggaggttgagttgtttgtttaaattcatgtttaggcgaagcggcttaaagcgataatgttggcagcagcggatcttgcagcgattcgtctcaaagatatctcatcaaataaacaccaaagcttcaagacaacaacgaaccagagagacagagtgttttgccttctggacaaaaacggggacggaatgatcagcatagaggaactaatggaagtgatggaagagcttggagctccaggtgaagacgcagaggagatgatgcagcttcttgactctaacagcgatggatctcttagttcagacgaattcgatacgtttcagaaacaagtccgtttatttttgttttctaacataaatttttcttcctctcttttattttataagtgacttactgatgaggtgtgtggtttgtgttttgcaggtagagttcatgcgtaaatgggaagatagagataacgagtacaagagtcttttagacgagaagcttcatgatcttccacatcaagataccacaggtttgatacagttatacaataaagagcttgaggatcgtctctcaacccattaaaatatcaaaccatttttctacattctaatattgtgtatatatgtattcctaattaattaattatctgttgacaaaaatatgtatttcaatcacacacattcaattttaccatacatttatttatcataacaaactgcttgttaattctatagactactcccatcttattgattaaggaaaaattaatccttttcaaattagagatactaaacattttttaatttttaattttatttaataagatcatagtttctttctaatgatgttgttctacacattttaaaatatatatatatatatatgtatagttttcttatatatattatttatcatatactgtatatgtatggttttttatatatctatatgtgttttaaaatttctatttttatttaataagatacatatagtttccttattattttaactttaacatttttgaaatcgtttttaataagatatttgtatagtttccttatatttttttaaaaaaataataataaataaataaatttttgtttaacacgtgtcaaaatctaagattgattagtttgacatgtggcataatataaccatattaatttagtatttcctcaaaccaaatttcaatcttacaaattcaattttgcaatacaacttaaatatttattttagtataatataaatacaatttaatttgattgtataaaattcataatacaatttgattttgcaatacaaatacattttaattctatacactccatcttattgttagtttttctttttagttaagaaaattataatttaatttatttagatatagatatgatctaagtttatatgtaaatatatttcttttttaagttgttttttttaagaaaaaaattaaaaaaaaattattttgacacatatcaacatctgaacgatagacttgacacgtctcatgattatgtgagatactaattttgaaaactatattttatataataaagataggtgttaattgttaacatataatttatgattgacacaattaaatttttaaatcctatcaaaatccaaccaaatctaaaatcattaaaaataaaaataaattaaaatccatgattcaataagcccaaattataaactcaacttatttttgtctacataagacgagcacgtacgtcaaacctaaaatattagaaccccaatttttagtctgcagcccttgtacgtagcttctttattccttgtgagatcgcaatgatgacattacaatcttctcccatgtccgttcttaccgaagatttggtagaggatatactctctagggttccagcgacatctctagttcgattacgatctacttgcaaacagtggaacgcaatattaaatgatcgtagattcatcaagaagcactttgatacagcagaaaaggagtatttggatatgttgttaaggagtcttagggtttcttcgatgagtgtcaatctccatggacttcatgacaacattgatccttctatagagctaaagcgtgaacttaacctaaaaggtctcctttgtaattcaggtaaagtcgagagttttgaagtctttcactgtaacgggttattgctattcaccaacactagcactatcgtggtttggaacccttgtacgggtcaaaccaagtggatccaaactgaaagtgctaacactagataccataagtatgctctcggatacgaaaacaaaaatttgtgccgtgattacaaaatcctaaggttcttggatgatggaactaattttgagttggaaatctacgagtttaattcgagttcatggagggttcttgatagtgtcgaaatagacttcgaactagacataggtagccaaggcatgtcagtaaaggggaatacttattggatcgttatagatgatcatgaagtagatggagaattagtcaattgtttcttaacaagttttgattttacaagagaaagatttgggccacatgtgtgccttccgtttcaaactagttggtatagcgatgtgatctcactatcttctgtaagagaagagcggctttcagtcttgtttcatgaagaagattctttaacgatggagatatgggtgacaaatgatatcactgacaccattgtcacgtcttggagcaaatttttaagagttgacttatacactcatcggttttataatggtgtaacttttttcattgacgaggagaataaagccgccgtgtttagtgaggatgtacccgatgatagtgatgacatacacagcattgtatacattattggacaagatagattgagaattgtggatcttgaagatggaccattttggccacaaatgttctgttatgttccaagtttagttcaaatctagcaatatctcagtattcgttcgtttaaaataattcaattgcttgaacctcctctataaatttcttctttttttgttatcatcgtcatgtccttcgactaattaatgaattgatcctttttctcttgtatcattttccttttttcgttactttatggttcttttcttcttttgcattactttcaatttttccattttcctgataattatgaactttgctaaagagagaagagcacccaaaaaaaaaaactaagaaagaaagagcacaaataaggaaattcaaaacgtttttaggctttaagttaaagcctttaacaatcctcacaaaaatacaaaagtatacgatatgtaaatctgctattttagtaaacagaatccatctaggaaaaaggaaaaaacaaatatttgagggaggtcatcttatatttgtctatatatataagactgcaaaacgtacgttgaaaccctaatttctatgtcattctacgttgaaattcacaagagaaactatgatgatgcctcatctttcagaggatttggtagaggagatactctctagggttccggctatatctctaaaacgattacgatatacttgcaaacaatggaatgctttgtttaatgatcaaagattcagtaagaagcaccgtgataaagcaccgaagacatatctgggtctcacattgaaggattttaggatttattcaatgagctcaaatctgcatggacttcttcacaacaacaacattgatctacttatggagttcaaaggtaaacttagcagtctaaacgatttaaacgatttcgaaatatcacaaatctatccctgcgacggtttaatattatgctccacgaagcgtaacactagactcgtggtttggaacccctgtaccggtcaaaccaggtggatcaaacgcaggaatcgtaggatgtgtgatacctttgcttttggatatgacaacagcaagtcttcttgccttaataactacaaaatcctgagggtttgcgaaaaaataaaaggacagcagtttgagtatgaaatctttgagtttagctctaattcatggagggttctcgatgttaatcccaactgcatcatagaaggtaggagtgtgtctgtcaaaggaaatagttattggtttgctacaattacaaaaacacactacttcatacgacgttttgatttttcatcagaaacgtttcagaaacttcctcttccgtttcacatatttgactacaatgattctagggctctatcagcctttagagaagaacaactctcagtgttacatcagagttttgatacagaaaagatggatatatgggtgaccaataaaattgatgagaccacagattggtcatggagcaagttcttcacagtgagattaatcaataggttagactatcctattagcatgatgatgaagtctcccctaagtttcttcatcgatgagaaaaagaatatcattttgtgttatgataaacacagagaaaatacctacaagtcattggtattaattgttgggaaggataaagtctacagagaattctactttccagaatcatacgaattaggtaggacatatctatgcaactatgttccaagtttagttcaaatcaagcaaagtggactgatatctacaaggaaaagaaagcgaaaagatttctcaagttaaaatcaagattgaaggttgtaatttgttgcatctcctccgttttttttttttaatatgtattggtttccttagtcaatgtcctttcattacttaattaatgaattgatcattttttgttttcgttactttctcgttcctttattctttgcattattttcaaattcaactaatgaaccaacatatatatagctggcaagtttgataaactctagactgtttggtataacgactcgtggtttggtacccttcagacgcattatatcagacaacggcggtaattcaacaattattaaaaaccaaaaaaaaaagtcatgatatgatatcattttttttttccttctcaaattattatcaattcttaacgagatacaaactaggaacaaactctttttctttttctacaaatcaatacatttatcaagatttcaagttagtggaaatgttaacacgctaaaaaataaaaattaaattggaaaggaaaaaaagaagaagaagtaaaattagcaaatagagtccacgtaggatgttaaaaaaaaaaaggaaaagagaccacgtaggaagaaaaggttaaaaagcgtaattaatcgttacttgtttgtctattaagaaagtcaaaaccctagtttcttagggtataaaggtcggtatacagggccgaagtcgctttcttcttcttcctcgggacaagatgatgtcaaatcttccactggatttagtagaggaaatactctcaagggttccagcaacatctttgaaacgattacgatctacttgcaaatcatggaacaattgctacaaagaccaaagattcacggagaagcactctgttatagcagcaaagcagtttctagttctaatgttgaaggattgtagggtttcctcagtgagcgtcaatctcaatgaaattcacaataacatcgctgctccatctatagagttgaagggtgtagttgggccacagatgcaaatatctggaatctttcactgcgatggtttattgttatgcaccaccaaagacgatagacttgaggtttggaacccttgtactggccaaaccaggcgggtccaacacagtatacattacaagactaactctgagtttgttcttgggtacgtcaacaacaactctcgccatagctacaaaatcttgaggtactggaatttttacatgtctaactaccgagttagtgagttcgaaatctatgactttagctctgattcatggaggtttattgatgaagttaatccctactgcctcacagaaggagaggtgtctttgaaaggaaatacttactggctagcttccgatgaaaaacgagatatagatctcatactaaggtttgatttctcaatagaaagatatcaacgcttgaatcttccgattctgaaatctgactatgaaactgaagctctatcagttgttagagaaaagcaactttcagtattacttaagaggaatgatactctagagagggagatttgggtgacgaccaatgacaagattgatcacacgaccaaaaacttgttgtggatcaagttcttagcaattgatcaacgtacttgttatcattggtcttgtgtgagtttcttcatcgacgaggagaagaaaatggccgtgttttgtgatggttatataggaggcatcaatgagactagcagacgcatgttctacattattggagaggataaatattacagagaattatatgtcggagattctccaataagatcacacaggccatttgttttcaactacgttccaagtttggttcaaatcccgcaagctacagttatacctaaacgcagaagacgtaaaagaaaaaatcgaaattagtcaatgcatcttgctctctctttttttttttctttggcaatgtcatttttaattaactaaagaactggtcttttttttcaatagaaatcttctttgcattacactcaagtttgctttttaattaattactaagttgattcttgtatgaaaacagaggatctcatcgctgttcatgagaaacatgagtaatttgttaaatggttttacgcttgatctagaatttcacttaggaatctcctgattaatacaagcataacatagggtcctcaataacatcacttgcaacttcatcccaagaccaaatggcatgtctttgaagggaaatagtttttgtcttgctttggataaaggaaaccacaacaaatcatacttgctcagttttgatttttacaacagagagatatgaatgcctctgtcttccggcttttcagaatcttgatcataaaactacagctctatcagttgttagataagaacaactatcattggtacttcagcgttgtcgtgcatcaaaggtggatgtatggataactgataagattgatactaaagaagtgcagtggagcaaattctttacggtagatgtagacattggtggtcgtgctatgttatcgtatgacagtttcttcatcgacaaggagaaaggaatggccttgctatgtgggttgtgagacaagtaacagacttgcgagcaagaaccttgtatacattgttggggaggaccgtgaatacacagaaatccattttggcgaatggcctaagttcattccttttatgaactcatgtgagccgttttattttcaattatgttccaagtttggttcagtattagtcgatacaggtaaggacgtaatttcttcaatctcctttttttgtttattcgtttttgcgtttttgtagtaaaatcgtttgattaatctatgactagatatattattttgattcctggcttatttgcactacattcaagttccaactaaaacaagaacaagttgtgaatttgactaactttaaaactacaattgttacattccaggacgctaaatgttgataggtcacatgactcatgactcttgagagtattttatgagacgaaagcaacatagcataatactaaaaatttatatacgtagatcggttggtgcggaattgaatgatgtacagatacaaactaaacacatgtatattatttacaaaaataatgaagagattttttatgggatcttttttgctagtaggcagatttgccacaccaaataataataaaaacaaatacaaaggtagtgaataaaatctctaattcttgaggaaagatctacgccacggtttatacttaaatgcaattactatttgcactaatcatataaatcgagctccttttatatatacttaagataataaattatatgaacatggatggtgtgttccatatgataaattattagagctatgtatatctcttcagccgaaaacaccaacacctaagttactatctcttgctccggcgaggatgtgcccacgtcttttaatagtctctcgtacaactgcaccaaccccaatatcaaacataaacatttttatctttgatatgtgtttcttcagtctaattaagaaatgacaatagtggcatacctgtctatataaacatgaatcgccataagattttcttagctcaaccacgttcagtgacggctttatctcgaaaacctgatatcataagaatttcttctattagtcaaataatctcactaaatagtctattgaacagtgaaataatgtttacgtaatagttaatatacctcagctgttactgataaaccaacttgacctttctggtttctttcttcttgttttactcttaactgaaacaaaatacagtttaaagtttataaacctacagatttgaaattccaagttgctaaggaagaggaagaccatgttgtgaagacccaccttggcatgtttcttttgtacactgaatcccatttctgtaacggctgtttcgattttctccagtaaatcttttgctgagctatttgaagtgaatcttattctcctctctgatacattctgagaaagtaaaagtataactcctttttattatacattggctcaagcagagagcagatctttgaaacagagtattagaagattagttacctcttgttcaaagaaaccggacaggtcaagaaaggaagacattccgattaactgaaacgcattgatgatggtcggtgaatcactgcccttcccttcttctgatccctagaccattcaaaagagagacagagaaatgaggacattgtacttgactcaaatgcagttgcgatagagagtaagggtggcagattcttacgagttcttggattgagaaagcatcatcgtctgtgtcaacttcttcttcgtcatcatcatcgggaattgaaggaatgtactcaagtttgaaccactcgctggctttaatacccacaactgtgatcctcgtgactggatttggatcaagcattctcttaatcatggttcttgcacccggggataaccatcttggtattggtgggtctcctttacatatctagaaatcaaatcaattatcaagcttatttcttcaaaatgtgtattgaattggcatatatataagaaaaaatgaggtttaccttctggtaaagaactgcaaggtttctgtcgtcgaaaggaagacatccggttagaatcacatacaagattacaccacaggaccatatgtctgatgctgcaccatcgtagcctctgttagctaaaacctcaggcgcaacgtaattaggacttccacaggttgtatgcaacaatccgtcatcctaaaatgccaaagagaaaattagttgtaactcgaacggattcaacaattataattctgctgtgatatgctatggttttaagatgatattttcaagtaccctaaaatgctgaggcagagcactgaggccaaaatcagtgatctttatatgtccctttgcatcaagaagaacattctctagctgcaatatagaaaaacatcagtacactattccataaggtttccatggtttgaaacacagtgagagaatcacagaccttgagatccctgtggaaaacacctttgctatgacagtagctgattccatcgataagctgctgaaacatttttcttccatcagtttctgttaattttccgttggaaacctgagagttatcatcaaagtgtgagtttagcaaaaatgacactcgtcaaaaaaagaaaaaaaatcttttttgctttgagcatagaggctagtaagagtcttacaattctgtcgaacaattctcctccggtaacaagttccattaccatattaattttcgttttgctagccaagacctgcatgattaccataaggaagaggccattagtttcaaggtaaaggaacagtgagttctgaggtaagatgtttcatgtttgagaatccaaaagattagtcacaagaaagaaaaagaaacatttagaattcgaattgcattcatatccacagattacataaaaaacacttagttgtccaagacacgacaaagttagtcacgagcttaaaaagtggaccacgtgtatcaaataagtgaagatccacaatggttgcttaaccaaaagtcacgattaatctcgtgttaaatggcaaagaggaagaagcaatcgaaataattagaagtcaacaataaaacgcaaagatacagcaagcaatgacccatacaataatcatctgaaataatactatatgaataaaataaaataaaaagtaaaactaagcataagatcaaagagggtccacatgataaaaagcttaaaagggtactaagattaagcaattatatgatgatcaagcgacatatcctgcatttttcacgataattttttttaggaccccacctttgaattgaacaggtcagatttgtgttaccggccaagccaccatatcaaataatggaataattaacttaataattatgtaaaatgatgcggctaattggcaacgtgaaaaacaagctaaatgaaacatgtttgggtacgaaaccaaatgacttgtaagaatattcctaaacagtaaaaaaaaagatccaaaaagcaaacaacaattatccaagatttgaggtgtttttaatcctcgtcagctccattttgatagataaagaaacaacaatgaagaaattaactaaaaatagtttactaaacctaatctaacaatctaaaatgacgaatcaaaatttgaataaccatccataagcaggcaataattcgatcactttctgtcatactcaggtatatactaaataaacagaaacaagcaaacagaagaataatcaaaaattgttatactaattaagcaataaacctttttacttcctaatcacagaatcatttcgataatccaaagatgattatacacaaaaatttaagatacggacctcatgtaatctaacaatgtggggatgtttcaacattttcagagtccggatctctctttttatctgcacagattcataagaattggatctgtcaaattacaaatttagtaaaagaagagaaaagaaaaaaattagaaatgatgatagagagatgggaacctgtaaggagaagttgagatcggcgatacgagacttgtcgatgattttaacggcgaaggaatgaccggagacggtatctttagcgaatttaactttaccgaaattaccctcgccgagcgtcctccctagctcgtatttccccagacgcattcccttctccgccttcttctcctcctcttgccttctcaccatccaatcaatctcctatttcaatttatttcccaacaaattaacagacaaccaaatcgatttctcgcttgaatcttccgattagattactattaattccgttattgaaagaggggaagtagattattgtagctgtgcaggtatgtgtgtgagggaaggagatatatatatatatatatatataggtgtaggtaaagagacgaggaagattgggaagaagaagaagaagagaagaaagtgccggttgaaattgaagagaggacgctacttctctttgtttcctcttctcttcttattatattcacttctttttatatatatattcctcgttaactatttttttttggtttttgttagccagatttttattggataactagaaacatattaatcttcacaaaagaaaaagattaatctaacaaaccatataagatttgatattatcgaaataagatttttttagtagggtacttatcgagatttattattattggtcaaataaaactcctatcaaatgaaattatgtctatgttcattataaggagaaatttaaaaaggatcttatttctgtcaacaatcaaaatatggaaaatatacgcaaagagtatattgatttatcagaataattctatatatgatgtatattgcgaatatgtgtgtattttatgtgtgtacttgtatgcatcaataggcccacgtcatttgttgcattagttttatgttgaaattaaataataatagatgaaaaaatatattcataagaacttttggtttaaagtcagaaagaaacgctacaaaaagattggtgcttgcagttttatagttcttgttactggagcagttttgatttggctttcggattttagttcttaaatgtagaaacaaacttgtatacacataaaagttcacaaggaatcacatactttccaagttttcatgttggagttacttaaaagttgaagtccaactatgatttcttaaagttacagtttagttttgtacctttgttataaaagaggagatcaaaagagacctaaacttaagatcaagttatatatacacactacaacaaattaaacaacgcgttcataacccattcgtttctatggaaattttgaacttatgacttggtttcatagacagtaggtcttcattgtcgtggcattttcagtttaagagataatttggtaataaaccatttatatacgtcgatatcgtgcatgaattgataattagatttaaaacacttttttacgatagtgctttcggtttggggggaaataaacatggtgctttcagttttatattgtttctgtctttgtagactaataatattagttgtagacttttacaaatttttaattcgcaatataggcaagcgtttagaaacacaatcgttaatgatacacttaaagttaatattttttaaaaaaaactatggtaatttatactatatttcatgtctcgtcctttgtcggctcacaattaattaaatcacatggaaccattcaatttatatttgtttttcttatgcggtttgtgtatttaattaaaataaataaattgtttttgagaatccaaaagtttcaataaaccagggcctgggcaccaggctaatctcttgaatttggaaaactccatattatatctttttattggatacatagattattgaagaatgtagtggttcttagctctcgtcagtcgtcccaacatatttttggtaatgaaaaggtcatatgtcacatgtttctctacacatctttttcccaaggtttttattaaaatttgtagttagtaaatgatgtggctgaaatgaatagatactatatagaaaaggagaaaaaaccaataattaaaattattcgagtctctcaaacgtgtcaaaatggccggtgatagtattgctgccggcagtgagtaacatattgattgatctatgttatcagaacctctctctctctctcttttgtgtgtagatgactaggtgtgttatatatataaatttaaataaataaaagagtaactcgttcgtggttatataaactttctcaagcaaatattttataccacaattttctcttgttatattcttttgctcgtgctcttttaatgttaaactaaagagatattaaccattgattaagaaacattaatattagcctttgattctacgtgttacaactctagcttcctatgtagagtctctcactacatatacgagcccaataaccctaaaacatattaattaaagagatattaacccaagatggaacgagaaatcatatgtaccaaatcaacaatggtaatggtaaacaattaatgaagtatttaaaaggagaagttttgttttttcataacaaatttcgtgccaaaactcatgttaatgctcatagctagccaatagattgtctgattctcataacatttaagaattgaaaacacatcttaacttctacttagttgtttggacattgcaaatggtgcgtagtcaaaatatacatgaaaaatcgtctttaaacatctacatgcattagtctaataatttcataatgatattacgatattattaatccgactagaacaaacttataccatttatgcagtgacaatatatgttcgaaagatcacaacctaatatttccgttaacaaacttatatatttttagtaatatataaaaccaaatcagaagatattgttccaaatatatctaaacatattatataatatgttaaataagcgcaccacatatacggcttgagatacgcaaaatcgatatgtagtgtccacctaaaataccaattctggttggtcaagtggctatcgtaataacataatttggtccattcagaaaataacaaaatttaatacggtttcgatttttctaaagttgtaaaaccttgatatagaaattaagcacatatttaatgacgtggcaagggaagagaagacaagaatgagatttttgagagtgggaagtaccacgtgaattgaaccaaccaactgatgactgactggtgtggccatttcagccatgtggttgctctcttctttctttttccaacctttattattagtttttttgttttctttctaaaagagagcaccggaaaacttatgtttttttcgttgattttcttcttctttatactatggttgaattagcttgacaaaaaaatgaaaaaaaaaaaaactggttgaatttttaaaattaatctttctaaaaaataagaaaatggtgccaactggcaactggatattgaataatgccctaacttaggttatctcaacatattaaatgacaaatattatatgatctatgtatcatccacatatttatataacgttgtatattgtaccaatggttaattagttatatatacatatcacttatggttacaatgtattaaatatttccaatacttctcaatttttttctttctaaaattcacatttatcaatgaaaccataataatagctataacaaatatttaggaagatttattaagatatatgaatatttaaactttcattttgctacggaatttttgactgattaattagattagttgtgacaaaacaaataaaaatatacgcactccctttattaaagagtgtcattttgatacctttcacataaattaataagactattatacatgtatcgccatatttaataaggtactaatgatttgggtttaggggtaaatcaatgtaaatatcacattgaaaatgtaaaatgacaatatttgtgaaataaaaagataaaactctagaatgacattctttgcaaaacagaggagttcatctgtcttacatcacctatcttttcaccataattaacgtaataaatactatcatgctattagcaaagtttcatcgttttatcatcaaccaatgggttaccacttagtcttaccaccgttaatggggtcgccattggagtgcgacttcttgtcgcctaagaaaccatttggattttggccgcataaaggatgtgttagcgtgtccatagatttaggtttgtatcaattataactcttttatattgagaaaaataaatttgaagaagaatcaataacataaaccattatgttacgtgttcggacctaacgaaacgaatcttgttctatacgaaacgaaagtctagagaccaaaaatagatttacacgagtattgcaacaaaaaacaaacaaaaaaaaaggacgaaagaaaaagaagaagaagaaggaaaacacgatagctaggcaaggagagtagccacatctcgacattcttgacctcaaaaatgggcagttgaactcatacgacatttgtgtgcccatgtgagagtgatatatatgtatattagtatatattatatagtatctaaataagtggccctcgtgtttgagtagaattaatgtcttcgcatctaaattaatttggtcctattcttatatggcaacgatcaattatgcaaattcttaatttaccccgtcaataatcattggttgaaattgtggtcatattcttcgcttagaaaactaattatcaatatcgtatttacgtgaatactcggaaggttttggttgatgatttaaggttgccgttctgagttctgacatcctgacttttgaacatttgtcatgttatatttatgattagtttgttatgttgtattgcagttctgatcgaagatatacatatagtaattcgagtacattcaatccaatatttttgtgaaattaaacatatcgatatatttatccacatcttaactatattgaatcattgttaaatcttaaactaacaagagtatccgtataaatgaaatacaaattctatattttttttaaatcatgtatttccaactcgaattgattagtgataattaagtagaatgccttgtatcttttacataaatctcatctcattagcaatgtgaaattctaacatcttgatttcgttattcacctagatgtatttctcactagatttatatggaatcgattaagatgtgaccagaattaaaaaaactgtagaaaataaaacctatgtttatattttctacagttttctttaatatctcaagcagacttcaataatttttagtcttttaccttattatattactgtccaagtttttatggagttttgaaattacatgttgaattttgttttggaggttttaaattacatgttgaattgtggagaatattctttatctcgagacgttaacgtacttaattactatattagaaaagggaaactttctgataatcaataacgtaatttcgtaaaggatcctagattccagagcaatagttacacgtcaatttagacggtgtttaaatatcatattgtgattaatattttaacaatattaagcgtagagatttctcaaaagcgaccccctaaacaattcctaagtggataattgagtctcctcctcttacaaatcttatccaaactcaatccataaatacagtatttgtcaatccacatatacagtatttttctatcgatgttttattcatataaaaagagacaacatgacacaaacctttccattgacgaagaggcaatttctggttgaagtataccccaagtccccaacatggccaaattggatgcttaattgatatacttctatgatacaaactcaattcggccaaacacaaaaaaaaaaatatatatatcatacaaatttcggtttccaaaagagaaatccaaattaaaaatgaagatcaaaatcggttttctgataattcacactatacgtttatgctggtacgactagtttatgctatagctacatgtatagcaacataaccagaatagtcaccaacaaaaaaactattgaagtaaacgcaataaccttaaaatgtaatattttctattagacgaataattagtagcattaacaaatttaaaagtaatgtgatgaaatataatatgttacgctaaataatagtgttgcttgacgcgctatggaatctccaacccttggcaacaagaaagaagaaagcaaaagccatcgtgtcacaattttgacatcaccccaaaaagtgaacgtagaatatattaattttcaccttagacgattacagttccaataattgtaagcaaagtaggaacgaagagtcttgtcgaggttattagtttaattcaatttcgaaaagtgaaccaccttatgattaaaaagagcgtaaggtattgttattataagtttgtgatgtgagcaatcaacttcctctcaccagccactactcgaccactggagtgggggcaaaagccaaaaagattaaaaaggcgaagtttaattagtaatatacgatctacgtgtctggacttatgctaatccatgtggccaaacattagtaataaataatggcaagggctaacttaaagttaacgctaatcggtaaatcactaaattggttttggatcctcttctcgatactacgaaacggtgtcgttgtaacaacaaagcctacttgctaaaaacatccttgcaaccatcattgtcttctgaccaaataacgagcatccttgcaaccatcattgtctactgaccaaataacgagttcgttttagcaagtgtgctgcttctgaccttagaagacttgggccactatgcctcactaatgggcccgattagttgcatctagcctcttcattcagaacgtaatgtgtatattccgaaagatcaacacatacacacaactaaaccaaaaataaaaaagaacatgaaaaagattaaaacatgattacatatttaaacacctgtaacaagaaaagcaagatcaacatcttaacactgttcaagtcatcgatgagtttctcccaacttctcagagctcagcatcatcgtcggtcaagctctctttaacacgttttgacttgtgagacacggtatctttagcttcctccgatttacgcgcagctgagtcgtaactctgcgacgccttatctttcgcggactctaaagtctcatcggcttttgattttgcagtctcataactttctttaattttctccttcgcactcttactctctctctctgcttcctccttcaacttctccgccttctccttagctgcactcgtcatatcgctcgccttctctttcgccgtctcaactgtctccgccaacttctctttagcatctcctgctttgcgtttagccgcttccttagcttcttttgccttctcagataccgtctctcccaagttagggctgttgatgtcttcgttcttgattccgattttctctttggcccaaccggtccaagactcatcgttttcgtctcccgacaagctatctttaacttgctttgacttgtgagacacgtcatccttaacttgaccagctgagtcgtaactctgcgaggccttgtcttttacagaagccaaaccctcctcaactttcgatttagctgtctcgtatgccgaacccgctttctccttcgcggctccaaccgcttcctctgctttgcgtttagccgcctcctttgcgtcctcggctttttgactcgctctccaagcgtcgtcttgaacggtcgtggtggtgtgagtgggttggatgttgtcttcgtgcttgagaccgatcttctcctttgcccaatcagtccatgattcatccttagccgcttcttcctcgatcgtagcttggacacaacacatcgttgcaatagccataagtaccaaagataccataaccaaaccgtacactttcctctctaaccccatttttgttacactaatcgaacacaaaatattatatggttatataacttatatcaagtttcagaagaagaaaaaaacctctgtttactgtgatgtgttctccgaggaatggtgctgtgattgcttctctgttatgtattagttgaaaaagagataggtttaggacgcgtggctaagtacgtggcgagtaccagcttcttttggcttctcgattttggattcgtgttaagtggttcttgacacgtgttacacaaacaacgaggcaagcgattgctttttgcggaaaaccgactcgcaaaaacaaagagaggcttcaactgaaacacatctgtgaagctaatgggcttgtatacaataaccagtgggcttttcataaacaagtttagtgagcttttcaatgaatagtaagggcttattgtaagtaaaaccctaatttctatacactcttctacgctatcttccattcttcctccagctatcatatcaaaaacaatgagaaagaaaatgatgatttccgatcttccacacgatttggaatcggaaatactctctagggttccggcgaagtccctagcaaaatggaagactacttgcaaacgatggtatgctttattcagagatccgagtttcgtcaagaagaactttgataaagcaggaggaagggaaatgatagtactgatgaattctagggtttattcaaacagcgtcaatctccaagggattaacaatagatttgatccaagtatggaggttacaggtaaactcatcaagctaaatgattcaaaaggtgtcgatatttctgctatctttcactgcgacggtttgatattatgcactacgacggaaagcactggacttgtggtttggaacccgtgtaccggtgaaattagatgtatcaaacccagaatattttaccggtgtaatgataggtatgctcttggttacggaaacagcaaatcttcttgccatagctacaaaatcttgaggtcttgctgttattacgtcgaccagaacctcagcctcatggctgctgagtttgagatctatgactttagcactgattcttggagagatcttggtgacatcactcgtgacatgatcgtatattccagtggcgtgtctttgaaaggaaatacttactgggtttctggatctaaagaaaaaggttttttcatgcggtattttgattttagcaaagaggtatttgggcgtctccctcttccatatcagagttttaatgctaaccataccgcggctctatcagctgttgggaacgaaaaaatcgccgtgttgcaacaaaaaattcttgcaatgtcagatgagatgaggatttgggtcaccaataagattgatgaggccaaagacttgtcgtggagcaactttctcttaacagtggattatggtaaatttaatttaccatgtctagtgaatgtgacaagcttcttgttggacgaggagaataaagtggcagtgtgttctgacgtagacacgaaagatggacttaggagcagaatctacattgtgggaaaggatttctataaagaagtttttaaagatacaaggggatcagataacaattggccacttctcctctgttatgttcctagtttggttagcattcaggaaaatatacccaacaaggcagaagaaaatgaaatcaaaggaggttagtcaattattttctatttagtttagaaacacgaaggaactggatgaagtttttcacatgtccttcttttacttttgaaattggacggttggtttattgatctttacacaaatacagtaatgttctgcttatatgtatccactttcacatcatttgatgggtcgtcttggagagagaatatcatcaggtaagtagaatctttattcagtgaaaccatttaatcacaactatatatttaagatggttaatctcctgatccccatattttccaactactctattgaagtcttgcagtcagcttataacctccacataaccagtgattggaactttgaggaaaatcactctttgtcaactccaatgttaaattctactatctcaacaaacatcagttcattctttattttattttgttttttttcaaaaaacaaaccaaaatatagatcctagatcctaaaacttccaaaccaaactaaaaatcttttcgagcggaaatatttttaaaaatccaaaaatccccaatttcaaaaatcggaccgaaaccaaaccggttaagtgattaactgaatgtcctactctagttcaaagaagagagacttcaagaagctaatggacttttaaagaaaaaagaatgggctttttgtaaacaaactatatcaaactttcaataaaatggtcggatttgtaactgatgccctaattttatatacattgattccctcatacgctgtcttcctcgagctaccagttcagtaacaatgagaaagacgatggtgatttcggatcttccacacgaaatagaatcggaaatactctctagggttccgaccaagtctctagcaaagttgcatactacatgcaaacgatggtacgctttattcagagatccgagattcgtgaagaagaactttggtaaatcagaaaggaggttgatgttacatagtaatttcggcgtttataaaattaccgacgatctccatggaattctcaacagcggtgatccatctctcgagtttacaagtaaacttagcaacctaaagatatcagaagatttgacaataaccaaaatctttcactgtgacggtttaatattatgctccactaaggaaaacactagactcgttgtttggaacccatgtaccggtcaaaccaggtggatcaaacccagcaaacgttaccgtagtgatgattcgtattgtcttggatacgtaaacagcaagtcttcttaccacaactacaaaatcttgaggtattgcttttattacaacgaccaggatgcttgtgttagtgaatttgagatctatgactttagctctgaatcatggagggttcttgatgactactgcactcgtgaatggggcttattctgccatggcatgtctttgaaaggaaatacttactttgttgctggagaaaaagaaacaggctttttcatgctgtactttgatttcaagacagagagatttgagcgtctccctcttccgtatcagagttttgattctgaagataccgctgttttatcaattgttgggggagaaaaacttgcggtgttacatcaaaatattcaatcgttttcaaatgagatgaggatatgggtcaccaataagattgatgaggccaaagacttgacatggagcaacttcttcttagcagtggattatgatatatttaacttaccaagtgtgaataatgtgacaagcttcttgttggacgaggagaataaagtggcagtgtgttgtgatagacacatagatgatgaagataagaccagaatctacattgttggagttgatctttataaagaagtttataaagagaggacaaagggagctcatttcaattggccacttctcatcagttatcttccaagcttggttcatattcaggaaaaatacccaaaagacaaaagaaaaggaaacaagaggaggttagttaaacgaattacttaagctttcttattgttttggtgatgtttctttgagagagtttagtcaataattcaaggggttgtttctatttagttgataaacagagtaactggattaagcttttctcgtccctcttattttgcgtttgaatttggatggttggtttgatgatctttacacaaatatattgttcttcttatagccttatctcttatcagatgattgatttttggagagtatacatcaggtaagcagaacctttaatcaatgcaaccatttaactacaactatacatacaagggaagcaacttcaaatctttttctaaccatcctaacttaaggactgaacatgctttgatatttgcaacgaaatggtgatcagtcatctgagaaaaactcacagtataaactctaaacctaaacctactgcaatattggataatgatcgaaccattgtggtagtgagagtaacaagggtttctcaaccatttatattcagctactgaaatatctgtcggtaacacaagaccaacgatacattgaagactaatgctactatatcaaatggaaaatagaggtgatgctttattacattgcgtttcttacagtgacctcaacatctaaataaaagcaccattctgtgaaatccaaattacaaacagaaattcttttaagtctccgatggaatacacagtgatttgggaataagtttagacaggacgcttatagagagtgtataacattgcattgaccatatatattagagaaactaaaaatcaatatatgaaccttcataaatcataccctgtttcttaaaatagcattaaaaaaaaaatgaagacagaagcagaaacaactggatcttctttggcactttttgaagtccacttcttgtagcagcaacctcaagttctgtgacacaactctttttcgactctgaagaatccacattggccagtccacctttgttttacttttactcttgtctctcttttcctccgagtaatgcttttactctcgttggctattgactctgaaatagttgtacttgctaaatctccaactaagttacacttgtgatagatccaaacatcaagcgtatgctgcgtatcatcatccacaataaccactccaccctcatcagccaagcccaaaaccaaatcaggcgtcttttgtgagaagtttgaaatctatttcttgtagcaaaaacctcacgtcttgtgactctaactcttccttgactctgaagaatccatagtgaacttccttgagtaatttcagaacattggccaatccaccattgtttttactctcgtctctcttctcctccgtgtaagaatttgactcttctgggccattgactctgaaaaagtggtactcgttaatctctactaggttactcttgtgatgcgtccaaacatcactcgtatcatccacaataaccactccacgctcctcagccaaaaccaaatcaagcgtcttcacgtaaggagactcgtctcttgttatcactctatcaccaaagtagattctcttgggatcaatcagcttcaacaaggattcggcgtatactctagtacccattgtataaacatacattgtgaacaactcgttggcttccttcaaaaactcgtgaacaaaaggccgtagctttgtcaagtaatcgctgtccaacttccacagatcttcccttgtagttgaacacgcttcttcgattagacacttctctgtttcggaaagaagtgaaaccctaatagagtggagaagcgtgtggtccaagtcgagtacaaggtttagcttcttctcgttgagacaatagaattgcgtagtaaagcgcttcgtaaacgctgctgcttcgtggcttagctgcaaaccttgaacgagataatcgaatgctctgccatggcgtttgtttaccgtcgatttacaagcgatgcagactccgtaacgaacataccagtgaccgcagctactacgagatgacgaaagtgacgaagacgattcgttgatcgccggttcgaattccatagaaatgttttcaactgcaaacatgatttctctgattgagataatccttccttcctttgatttgaaaatcacttagcactgatcagattgtttttgagaacagaaaaccacagtaatcgagcaaaacgaaaccctaatttgacaagaaactgacagtagaaaccctaaacgaaaccctaattttaagggtgtttcacattaataagattaaaaaccacaaaaaattgtaaaccgcgtgatccaaataaattaccctttttaaaatcaattaattgtggtttattccgtaactaataaattaagaacaatatttatctaaaattctacacatttgagataaaattattagatttctgatttaccaatctacacaatgatatgtcaccatctgtaagcagattatgacacgttttaacaattttacatgttaatgtaagttataataaactatcaagataatttacttattttagctaggcaaactaaacatcaaataaaaaggaaaatttacaatagtctgaattaacaaaagaagaaaaaaaaagaaagtaaaagacagatatacagtatatgtagaatttcactttctgaaatttaaagcataattatttttttgaacaaaaaagtaataattatttattgctctgtaactttctggtattagtaaaaatcttagttgtcatgttttcaaagatttttatttatgttttacgaatttacctatgaaatcaattaaaaccctaactaagattttcgttaccgtcgctttctcctaagtaagatgaggtcagaaatcacaagagaaacaaagttgctcttcgatcttccacaggatgtgatagaagagatattctctaaggttccggtgacatgtctaagaagaatacgatctacttgcaaaagattgtacgctttactcaaagatcgtggattcatcagaaaacattttgctaaatcagcaaggcagtaccatgctcttatgctaaagaattttaggttttattcagtgagcttcaatcctaatggaactgagatggacgtggcttccttgtttaatggtgaacgtagcctaatcgacccctatagtagttcagaagctattatatctcaagcctttcactgtgatggtttattgctatgcaccaccaaggaaaaccgattagtggttttgaacccgttttcagggcaaaccaaatggttgcaaccacaaaatcgttgtaagatagatgaggcctatgttcttggatacgacaacagtgacttgtgccatagctacaaaatcttgagttttccggatctatacgaacaagaattggaaactatcaagaatgcagggagggatcttgatgtcactcccgaaggcgacttagaattgaaaaccgatgattttagctctaattcatggaggagaaatcttggtgtcactccccacggcggcttaggattgaaaatatatgattttagctctaattcatggaagaaacttgatgtcatcactcccgaaggttgcttaaaatcttatggtgtgtcactgaagggaaatgcttattgggtgtacatgtctaaacgaagaggagtcaacgactactctctacttagttttgatttttcaacagagagttttcaacatttgtgtgttccctttcatcaggaagcagattgttttggtactatggctctctcagttgttagagaagaacatctttcgttgttatatcagagttgcgagactctaaaggtggaaatatggatgaccaaagagattgatacaacatttgtgtcatggaaaaagttcttaacagtggatttagaacctcatctacctcatctccttatgttttcgtgtcgcatgagtttcttcatcgacgaggagaagaaagttgccgtgtgttgtgacagagataacaaggtacacgttgttggagaagatgaatacagagtatcttctggtttttattttctagattttgaaggcataacatgttgcctgactgtctttggttatgttccaagattggtttgaatccggcaatgtaattcttttttgtttcctttgttatgtccctaggctattgtgagaccagtttttattttatctttaaaatctcatccgtggcttctttcctagagcttataagataaaagttaattatatgcttttctttatcaattgaagcgaaggtgactaatttaaggccccaaaatgtttcttttgcatttttgtatccatgttataatagttagaatctttataacatggaaacgtgaacgaaaacaaacaatcggagcctatgttatggttcaacttgcccagttttgaatctgaatagttttactcatttgttgtgttttagtaaacgttgacatatagatatgaagatagataatgatggcatctttaggatctaattaataaattaagatgcagaatgagcatttaaggataagatatatccatatgaagacatcttgtgtgtctctaataataattgcacactgcttttttttggctaaagtgtactgatgcagtgatgctcttataagagcaaactagagagaagtaagtttgcaatgcttttgtttttttggtcctgagacacaatattggcatcttctttaacaacgttgttattgtcacatctaaatatgatttcaaaaagaaaagaaaaacttaacattcttgttaggtatagtcttttttttttttgtaaaaagccaaatacaaaacatattttcacattaatcttacctctttggtaaaagaaaagtctatcaaacggatcaaactagatgcgcacatccatgaaaacattgaagattaagaaaacgcagtcaagttgggaaagcataagtagattaaaacaaataacatttttgaaaatcgaaaactcagatgcaacgaatttgttttggtaaaccggttagataaattttggtccaaacaaaccaaccatttagagtgttagctgataagtacattacttgtgtatcaaaattatacctaaataaatcttcattgctttgtttcacaggagaagacacgaattctcactttttcttcgcctgatcttcactcttcttcgattgtataagctcttcttctatctaatccttgttctgcgattgttctaaatatttgatcctgtttaggttcgatttcgtgttccatcatcgtcttctagggtttaactgatcgccttgatctccaatgcttcgattatatattattcggctagttaggtttcggtttttggttcagttttgatccagtttcctccatagttgtgataatgagttttaatcgttgtttcattgcttttgtatctgctttctccaagttgttagtgttaaagccctaattaatatctaacatactgttgctttctttcttatgtaaaatcaggtcagaaaccacaagacaaacaaacaaggatgtttaccgatcttccacgagatttagaaacagaaatactctcaagagttcccgccacatctctacaaaaattgaagcctacttgcaaacggtggtacactttattcaaagatccggaattcctcaagaagcatgtgggtagagcggaaagggaggtgatttcgctgatgagtctcagggtttattcacttagtgttaatctctctggaatccacagcagcgttgaaatgacaggtatgttaaacagtctcaaggattctgaagatgtcaaaatatctgacatcactgagtgcaacggtttattattgtgcaccaccgatgacagtagacttgtggtttggaacccttatactggtgaaaccaggtggatcccttacaaatccaactcaccttatgaaatgtaccagaagtttgttttgggatacgacaacaccaataaatctcgctatagctacaaaatcttgaggtgttaccacggcttgatcgactttggttatgagtttgaaatctatgagtttaactctcattcatggaggagattttatgacaactctcctaattgttcctttgaatctaagggcgtgacactgaagggcaacacttactggtttgcttcagatactgaaggccgccacatcatactcaggtttgatttcgcaacagagagatttggacgtctctctcttctttatcagagtggtggttatgttgataatgttgtggaaactggggttttatcggctgttagagaagagaaacttgcgttgttatatgagaggtttgatgagctgaatgattcatcagagatgaagatatgggtgacgaatactaaaatcgtcgaggccaaagacttgtcgtggagcgacttcttggtagtggattcctctaaatttatggtaacaaggatgacgaatgtgatgagtttcctggtggacgaggagaaaaaaatggtggtggtttgtgatacagacattgatcaacatatgaacagattttacattgtcggagaggatatatacaaagaagtttataaagatattgcacagggatggttttcctattggccacttctcatcagttatgctccaagtctggttcaaattcagcaaggtaaagtgattcccggaggcaaaagaaaaaggtgattagtcaatttaactagatcactagggttgtctctgtttagtttataaacagatttcctttgtttatctctttagtcctcttttgcttttggaactaggttttggtgatctaactcaaatgctttctttatgtgtggtttttagtcactttcacatcaaaagagcaatccaattatgattttttcataaatatgtgtgagtatgtaaataccaaagctgaagagatgaatgaaaaaagtagagagggataattagactggtgaatatatcatcacatatacaaccttaattagtggtacttgagacaaatatatatctcttggagaacacacaacaaaaatgacaaaatatcattgaaacttacatttgtagaataatcaatattggatattgcaaatcgatcatttacacacaaaaatataaaaacacaaaagctgaagattgaagaatatagtttggtagtaaagacatatgtctgattattttaggactaaagatatgatgcaaactatcatactttaaatactataatttatttatacttgtaaattaattaaactatataattgaagccccacttccgcatacatgcaaagtatgagaatttattctcactctcaaaaggagttcttcacttttacagccacgcatccatcggtcggtcaccgatgcattttctttagagagtaatgttattttaaatctcgtatcgatcatattgtatgtaagctatatacgaatgtgtacgtacttgttaagagcatgttataatttatatacacgagaggttgtacttgtaaatccccatttcttagctacttcctatattctcgatttcttttttctttttttttttgaattttatgttaaattaaattcaaaaagaaatggccaaagttgttacaacaagtgctactgagagtttaagatttttaatctaaatcacaataagactttatgaaagagtttcctcgcttaagatattatattctctctttctaccttcctataaatatgtgaccttaaatgtatacatatgttccaaatagtgattttacgtataactataagatatatcgagatgggtaagagcaagaaaatgtcaacattatcagtgataagagctttattaccgtgctgttcgaacagtggagatgattggagcgacgaaggagtgatcataaggtcaagaatcatgaccagtgatgaagatggtcggctttggatcgctgagccaggggtcgatagacgagccacttcttatatcgctaggttctacgaaaaccgagtttctgatcctaactacaaaaccctctctccttgaattgttttccatgcgcttccttgtctcttttttcttttcttcatgttttgtattccttcgctcttcatgttttttttttatatatcttatgtaaagttcatggtaaaataataacttattccaccctgtgtttgttagaattatgttttagtttctgtttgttgatatatatgagatttagaaggagttgacttccaccgtctttaaaacaaaaacaaaatcattctagttattttctcatagatgttttcatttttagagttacttgatttttacttcaaatttctttttttatttcttttttttgtcatcatttttacttcaaatttcattatatatcatcacatataactactttatctaaagttcctaattcgatgacaaagagagagaaggttgtatacacaagaaaatgagagaaattgtagccaaaacatctctattatcctatgtacaattttatttttattccattttcgagtttgtttagccttccaatttcataaaagagaaaacaaccacatttcttatgggaaaaaatgaaaaaggagaagatgctaaaactgttttaaaattaaatagaaatccttagccttaggcctggctaattctgtaaatagttaaaaagcccatgggctttcttttgccggtttaaaccattttgagaaacctttatcccttatttatttgtcggcgtaacaagtccacactggacctttacttcaagtacagtacagtaagaatcaccaacaaccatagaatatcttataataactttattgttttgcagaaaatgcgaaatagaagtcattagtcaaagttaattgaaatatttaatcttaaaaactacaaaaaaacgttacagaaacatattatttcaaaggaaaaagtggaaagtgtgaaggagagaaaaaggggaaagaggaagtcagagttggggagccaccggaaaaattcgtacaaagtcacctaatttacggaccgaccaaaccgccactctgttttcatcagtcaacttactaacaaacaaacagtttagctatcatttttctacttcttcactcttttgatttttccatttcaatttcttgttttctaaaacgttacttcttgtaacagtattattgaactcaccgacttaaatttttcagaaaatatcgctaacacccatccggtcaaaattagaacggtctgtccgctgcattaggaatagaacaagttcaaaattatgactatccaattttttgtatctttttcaaacataaatttgaaactgtatattaatgaacaaaactagaaatctaagtatattcgaagattagttggttcagttcagtaatccaaaatataagcatgcttactctttttacagtttaaaatttaaccatttgacatctaccaaaaaaatccatataatcatccacttttttgggtatattaaaacatccatataatcatcaggattcgaattctgtaaattgcaggaatttaatttgccttgtttttttctttaaattgtcatgacggattttataataggtaaagaaaagtaatagtagaagaaagaaaccacatctataagttatgaccaattattaaccccaaaaaaagttataaccatttgattaaatccatcgtgtctcgagggtacctccgaatgtgtgatcatagaaccacgaaccaaatcatgttctacaaatatttatatattaacttttttctccatataaatatcaaattaaaaagttttcgagatagagaaaataattacgcaccaatgagcagggtccgttggctgtcatgtgggatgctataaacaaatttaaagaggggagtcagatttgtttatattttgcagaagttatatacatatcttatatatataaattaaaacaacagattctattgtaacgagaagatgatacatgcactgccacggttcctctcatgcagaagatgctttttaaagcatttattaattttaaaatcaacatcaaaacaacaaaattaaagcataactttgaagctacgttaattttactacttattagtaatgtgtagggttcccttttacttaaactaaagataaatgtatcgtatatatgcaaaaagaatcttgtaatctggtgcgtggacacgactaattttgattatcaaagaaagaaaagattgagtgcaagtaaaaaagaggaagaaagttttgtgcaatgcaaaactattgttagtaatttatttcaagagactttttgtgtactttaatagatcaactgaataagtatacgtagtgatatatacttgtaagaaaaatatattatatattaataatttaacaaaaaattataaaattataaatacaaagagatgtatgaaaagagagtataggagatagagaagcagagaaacatgtggaattcacatgggctattgctgaccaatctgtgcccacctcaatcccctaagccatattggtcctttaaattttttacatttattcatagccactaaatttgattaactaacttaacatgcattagttttttttttttttttttttggttttaatgtgaagaagttgtttttcttttgctgtggattattattaactggtacccgtacctacatatctatattattacgttctaatacaatttattaataactggtaacgggtacctacgtacatatctatatgattagtgtgcatcaagtatctctcgctcataactcatactaagattttaactaggtttgctagataagctattgaaatgatgatgatcatgggctgaaattaagaaagaaagaaagaatatctacattgatgtactaaatgaaaaaagggagatgggcacatcaaataggaagtggatgggaatgagaaaatgcagaaagcagcacttggagatttcaattgtcagtaccgagggggtgggaaaaggcacactcgtgacttcatcttgatttagttcggtttgatttggtttggttttgcgtactattagcctattacacacaacttgtcgaattgaatgtaaaagatagagaggaagagatcacgtggggaggcatgtgggagggtagggagaggcctaaacgatgttaaatggataacaaaaagtaaaaagttaaacaatgaaaacaaagttatgttttttgaaagctcctatcgcggatcttgcctctttctctcccctttgctttagcattactaattactctctagtttattaatgataataataataataataatataagatagagagagggagagagagtgtgtgtatgtgtataaatacacataacaagtcgttctcgagctctctcaatccgaatctttgattgaaagaagaagaattactttatttcaagaattgagtaaacactaaaaaaatggcatcatggaagaaaacaatcgcaacaccattcaagaaagcggcaacattcttcaaccaacctcaacaatcaccaaagaagggttgccgtggaagaatggatgcgcaagccagggaagagcacgagaagagaatggttcaagagcttcaaggagaagtcatggcttgtggttacgacgacgtcctcgtcatgtggtctattcttgacaaatctaactcctcaaataacctctcttcttaaccccaaaaccaaacacaaagaaaaaacggtttcatgatcaaacattttgtacatatcttaaaagcggtattagcccaccacaaccatctcctcctcttcttcttcttcctccttatcctttttttttaaggtctagtgaatattttttccggcgagatatcgtcgagaattttagatggtactgtcttcccctttgataatccctgaagagtaaatcacggtgggaatgtttttttgtatttggagaaaaaatgtctttcttgaattcacatatcatttgtatgagatgattagcattattttgaatgagaattcaagttattagttctccataatgtaaagtcaggtattgacttaagttgcacatgtcataaattatcaatcagaaggaaaaaaaaaaaaaaccattattgagttcattacctatgatgtgttccaatgtaacagtacaataactcgagccaccgaccattaattttgtttggaccaactaaaatgattctaacaaattgtaaactacataatgataagtaaatagaattatttcttttcttttctcttagaagaacttagaagttagtgataatttgcacttttggtaacggtctaatattgtctcaatgtacacaatctatcgactgagttgacgttcctaacttcggacagacataaagagtacaggctttatgctcattagtcattactcttctcagtcaataaaaaacaatttcgtctctcaagtagacccaaatccttttatagccacaaagagaataacaaacatttgtaacttgcaaccttgattagagctggacaactacatctttttttggtttgatttcggttagattcagtttatgtaaacaaatggatctttttttaacttttggtcatttagagaagtatataagttgaaactcaaagtataacatagttttcttcaatttcagttaggttgattgctatattggtgtcgaatattaaaaccagcttcaaatttttaacttattcatcaaattgattctataataaagactcagccgattcaagacattaacttgtttatccatgtaaccttcaaaggatagggcacaagtacaactcataaatgtacacaaccaaaaactgatcaataatctctacacaaaattacaaaacttccaacaaaaataaacccaataatttttattttcgcatattaattaatttagatgacagcagcttgagcttagagagggacccaatcattgaatcaagaaaaagagaaaaaaaaaagggcaaagagaagagaatagaagaaaaagtacgaccgtatatcgacagtgaggttaatggttgatgatgagatcttattaaagtctcaagtgggtcacttgattctcacaacgtgtcttgtcctttgaatctccttcatttttctttctttctttcattactatattttttttaatcctctaactctctctctaacattctttaacatgctcaaagtttgggaaacatcttaatcaaagagtgaagaaatggtttcactcaactctgcaaacctaacatgtcccattgaggttatatcatctaaagattcttcattccacacccactggtgtttcacctaaccaggtttactaaaccgaaatctcatacttaggccagggcactcatacacaccggatgcatcttaaggattatgtgtctcataaaagattgtcttaatatcattaactcaagttaagcatgatacaacatattttgagtgttgccctaagaaatatttatacatgtaaacgaaactcttcaccttgcatgtctctcttccctggcttcaagcgcatcaacttcctcacttgttagcagatccacaactggttcataaacatccaagtctttccttttcctgtcaagatcatggacaaaatttgttatttttggattctgttatagcttttgcttggtcttgcaagtcaaatttgttcgtgtccataaatcttattttttgaaaaactcccatttagtgataagcaatgcaggaagagaacttcttcaatttccacagagtttattttgtaatcaaacaatttccaacctagtgattcggttttctatgttcaataacaacatgtaacatcaccagaaattactattagaacaatctcagtagggaccagctccaaatattgggataatctactatcaaatgatataatgcatgaagaggtggcattcaagagtatgtgtaagaaaaacgctcaggatgtgtcgcaaagttaacttatcttataaacgatctagctgctagaagtcagtcgtccaacagatcttaagaagacaatgcaacagagaaaatgtatgcattaagtgggtaagaaaatcacttaccgaactacactggacttaaaactgaataacttcattaagtccattgacaggccacttgccttgctgcacatataagatggaaagttattttagaattttttgagctaggctctaatattaccacaaggtaacttggatagacaaataggggcaacgtgaacatacctcgctgaaccatgatcagatcctctgcggcctttcttgcttaatctactctccctagctgaagccacactttgaattgcaatctggcaagcaaaaacaacgacatggtaactcagtaagtttggcattcttgttcaaaatagaaaacatatatagagtatacagaaatacagagagagtagcttaaagttacaatcaaagttttaacctcgtaaagttgttcccttattgcaaaggcaacagcaggcttcagagagaaggagaaaccaaaaatcacttgtatcaaacgtttgaaacttaggttcattagttcagataatgaaatgtaaaaaattgagtggttatcttactccaacttcagggtcttcaacacctaaatccttgcacaaggttcttgcaaattcctcaggatcactctcaaaattgtttaggtcctgcaaaacggcaatcaagctgcactgagaaaaagagtacaaacaatagttgaaattgttcaaaatcaccaagtattctcacccataagaactgatccttgatgagagtatggttaactcggagatcaagctggcacaaaaaagaaagaaagatagcttatcagcttctagaacttctttttttccaacaaatcactcatggacaaaagagagagggataaggatatctagcgtcataaaaccttaattggtatgattttttcaccagtgtacatgtcttgtccttcataagcccgaaagtctgagagctgagactgataaagcaggaagttgaccaatgtaagtagagatttctgaagaaattattccaatacttacaaaaacagaacagaacataactgaagcaagagtacattcatcacaaaagcacagtcttacagatatacatcccaaagtacaatgctataaacaggcctcttctcgagtaaaaaaacctaaagagttaaaaacaataagtcgaaagtgtgattggtttaagactaataggtgaccttaaatttaagctcatctctatgacaagcaaaagaactaacaacaaaatcagagcagaagaaaaactaaagataggtcagtgtgaactagtttagaaacaacctgaatagattgggcaatctgagtgacaaatgcatagggaagtttcaagtctttaacagttcttttggcaaagataacgacttcattatccgggtctgtatccaaaaccaaaaacaagaatcagtgaatcacatacactgctactgtaataagatgcgagaagatggaaaacaaaaaaaaaggtagggtttttaagagagaaacctgaagggttccaagtgaaagcatctttgtaacgctgaccttcgaattgaatgtccaatcgaataggtaccaagttttcagcagtgggcctatagctccgattacaaatcgattcatcagaaaaaacaaaaacacatgaactcgatttcgatttcaaaacaaacaaagtagaggaagcgacgaaacttacatcctgaacttgacgggacctttccaaccagtagacactaaacccttcatccttaaacccccaaatttcacaaattgagtttcgaagagagtcagcgagagagtgtgggaaatttcaatttctcgatctttttccggcgctagcttaatttatttcagaatcacccttatattctaatgtctttacacatttcacctctaatttggaattttcccattttgggacgaattatctggatccgatcctacgatcaattgcagcatttgggctttaaacgagcttgttagtcatttagtgggctttaaatgggctcaacattaaaattgtacattggtgacaaccaacgagacggctgccggcagatcaaagagaatcattctcttcctgacaacgttcctctattccatgttcgtgctccccataacaacgttcgtgtacttttttcctagtcatgtaacacattcgaagaaacacacgattacaaacatataaaaaatctttgcattattattattcagaacaaaaaagagaagtcttggatattgtgatttatttataagaaaaaacacactcaaaggtgtcatataaataaatatatgcatcaatcaattctccaacttcttcaaggcctttgttgcaatatgcagcaatagctccgtcccgcctcaagtctcttcatcaatgcctaaatcttacacgtctcgtaactgcgcaatcacagccttgaccgatccaagttttaatacctctccggtctcgtgatctttagtcttctcacggtttcaagaaacatactaaacaaaaacatcgatttcaaaaattagagaatagctataaccgaggaaattataccaatgtaagatcaagatataagattcatactcccatggaatatctccgaccatcatccaatctccatccttgtcttcatatgtcaaaacatgatgttttcgatctcgattaccgcctgttatagccaagacaatgcatggatatacttcaaactgtttgaatttagttgaatgttgtttttacggaattatgtgttgttcattaattacttacagatgattgaagtatcgaacatgtgagagagattttctaatagactctcgtagcctgagaatacgcaaaggtcgagttttcttccaatgggaacaccttccatataaaccttaacaaagagagaagtgtcatcaccacgacgaagaagacgacgaccctttagtgtatctcttaatctagactttatcggtggccaatcttgtcttgcttctctacaaaaaaataaagatttaaaacacaaatgtgaacaaaagaaaacagagcaaaaacagaacataggaaaaaacagagaagtgatgtgaataagacctttgtggagaagtagaaggaaatgtgagactaagggagagattaacagaagattcagaaggagaaggtttagtactgtcgacagaggatgaagaaaatgaagaacaagagttagagacctccattaatgagaccttgaagctgcagagctagcttcatgcttccttctcttctctattgagagtgctcttcatgtctctctctctctatttctatttctctctgtctagttaaacaaaaaaggactagtaggtgattctattgcatagattttgaatttaaaaattgatttaatcgactttgaaatttaatataaataaataataggaacataaggttccccacatttaactatgaactttcaaccttctaaatatgaacacacattgatttctgaaaaccactgtaataattacccgattagatacttaattcatgggtttagatctttggagttagttagtagtaaaaatgtgaaattatggttttgagatttgtttacatgtaagattcgaagtttccgtaaaaaggtggtatccaaggaaagtgtgtctaaatgatgttggagttaatctgttaaggctttgattttaatttctcaactgctcagattctttaattaggagagataagggccaaaaaaggctttattgtctagccgtaaacagaaacagagcatcacatcactttcactttcttacacatcaatatttgaaagaaaaaaactgagtctatagactatgaacttgggggatcaattttttagacccttctgttgataagaaaactcaattgtctcttatgacacattaatgtaacagaccattgaaaattgcagaaccaataaaaataaggtagacttgaagagttttgtgtatattgtttttgtggagcagacagtgttcttttctttaactatacgtttcctgttaatgtctctttagctttgtggattgtctctcttagaagcccaaatcttttactcttttttgaaaatcaaaatagaattcgttgatttatgataacttcaaaatataaagtagacataaattgttacatcacataatgctcattggctgtattgataataatattagattctagaatcatcatgggaagtgcactctaatagttactttgtaataaagcctaccttggatgttggatcgataagactcctattagctattatacgatctgtctttggacatgcatgtctggtctctagggatccttcttgttagaatttcgatatatataactttataatgtctagtagtctaatgatgaatgtttactcctctttatacttataataataattaagactactataagtctataatcaattaaacttttatcaaaaaaatatgtccaaggagttattactcgcatacctcgacttaaaagagttttgtcattagttttcgttgaagtaagtaagaaccaaagataataatcaaactcctgattttctgaagtttcttaaaatggtattcaaattttggccataactctcaatatattaagaccgagcatgcgaacgagaaaaaatatgatcaccatggtttgcagctcgattacttctaagttctaaccatggtaaatttaaacgttttgttgaagtaatatagagaggcatgcaatagtattgtgccaaaaagttatagcaagagagatcaatatcatgatatgtactcctaaattaacgtggcatgttcatgcatagacaaagatgcaatcatatctccacgtttgcatacagcttcaaataataaaatcatatagtcatacaaacaaaatgaatgtccgctgcttatgaaaattaattatttggatagtacttcgtataaaagttacatcaaatgattttagttgattttaagacaaggggtcccttgagtgatacacaaactcatcatgagtattctgatccatttcatgacgaataaattaaaacacaatcagaaggttgatcatgggttgggaaagatgtattggtcggtcgatatgccacatgttatattatgttttatacttattcctgaatagaaagatatgtatgagtcgaaatatacaaaagaaggatgaaacttgttcttctttataaccttataaaatgttcacattgtttatgagtgatttcccgcgtccattccatacgacttcatgattaacatccctcaatatattgattatgacaatgttcgaaaaaactgttagatgccaggcagacgacgattcaaccggccaagttttgtttccgcgcgcgcgcataagtccactatctaatatgcaaccattacggtagaagtttacttggtccattttcattgataacaacaaaaaatcgtaaaactttaaaattatgatgaaaaacgtaaaaaagaacatgggaaaatatatggcggaatcacaaagcatgaaaaaatgcttcggaatgattgactgaatttacaattggtagaatttaattttaagagataacatttaaaaattcaaaacattagttagctgtctttatacaaaagagttatttgtgtaccaaaaaatagaaaacgagatatatgaccacatgatgagtttatgcatgcctattacgccatgcaaatagatacacacacacatagttgtgcctctgactttgtctgcaagtacgtttgtatggttctagacagtaattattgtcctaaacccacacgctctgtgaatactcactaaaggttgttttccgtagaaatcatgaacaaagactttaaaagcaaaacagaacaataaatcaattaataagttcaacgggatatagtggaaaagaaaacacagatacacaccattggattgaaacagttgcatttgtggtcttacataaacctacgtgttcttttataagccaaccaatacttttctctttttttttgtttgaaacgagttgcagactttgagtggccccaaagaagaaagaaaagatgcaatttcctttggtttgatattctcttcaacctcttacctctctattctcgtctttagcaaaatctcaaaagacaaaaagatattgatgtctctccaacgacccaatgggaactcgagttcgtcttcttcccacaagaagcacaaaactggtaggtgttgaaagaaacttatctaatatttaacttaatttggtttagagaaattggtttgtataattctcagaggaaagtgatgaggagttgttgatggttcctgacatggaagcagctggatcaacatgtgttctaagcagcagcgccgacgatggagtcaacaatccggagcttgaccagactcaaaatggagtctctacagctaaacgccgccgtggaagaaaccctgttgataaagaatatagaagcctcaagaggtaatcaatgatgagtaaaaaaacttttttttcttagcattcgatttgtggaattgaaatggtaaaaaagaaactgtggtgaaaaattacagattattgaggaacagagtatcagcgcaacaagcaagagagaggaagaaagtgtatgtgagtgatttggaatcaagagctaatgagttacagaacaacaatgaccagctcgaagagaagatttctactttgacgaacgagaacacaatgcttcgtaaaatgcttattaacacaaggcctaaaactgatgacaatcactaaatatttaccctttaatccattgttcagtgttgtatgattatctttctttcttttttggttttggtttgtatacactttttgttcgaataacattcactttgagcatcattgtcattcagatttgcaaaataaagtaaaaaaaaacgaaaaaaggcaagaagagattaggtataaaaactagagttctaaaatgccgtggtgggtcccacatgttcttatgcgagtgaaacgaagaagtctctggagaatttgttttcgtagagaccaagctgctgctatataaatattgtgaaagagatgagattttaattacttgtaagtgattcagagagatcagaagaaaagaataattacgaagaaatggagaattttggtgaagggagaagaagtggaggcggaatgttgccgttgctggctctaagcgccgtcgcggagtactatagactaccgtggaaaccaccggtgacggcgagtctcctggccgcgaacactctcgtttatctcaggccggcgtttatcgatcccgttattcctcacatcagtgaggtctggttcaatcctcacctcatcttcaaggtaaaccaatcttaataaattccttcattcgccaagagaaattgattgcaatttgaccgatttcgatctgaaattcgaatttgagtttcctgggaaatttgtaccaatatctggagaattagggattttgttcttcgatatctaattagatcattcttgattgattaattctattctctgttaaagtttttttttttaatcttgatgtgtatttgttgaacagcataaggacttgaagcgtttatttctatcagcgttctaccatgttaacgagcctcacttagtctataacatgatgtcacttctctggaaaggtatcaagcttgagacatcaatgggaagcagtgagtttgcttcaatggtctttactcttattggtatgtctcaaggagtcacattgttgttagccaaatcgcttcttctcttgtttgactatgacagagcttactacaacgagtatgcggttgggttctcgggtgttctctttgctatgaaagttgttcttaattctcaagctgaggattactcaagtgtgtatggtatcttggttccaacaaagtatgctgcttgggcagaattgattctagtgcagatgtttgtacctaacgcttcgtttcttgggcatttgggtggaatccttgctggtattatctatttgaagctgaaaggttcttactcaggctcagatccagtcactatggcggttagaggtgtatctcgattggtgacgtggcccttgaggtttctgaatggtatggttaggtctcggagaaggaggattacggggagaggaagagtgggaagaggtcagactgggatagcaggacctggtatttggagatgtcagtcgtgtacatatgacaattctggttggttaagtgcttgcgagatgtgtggctcgggacgggctagaggaaatggatggtcactgaatcagggaccagcactttcttcttctaatgatctccctttagatgagctgcgccgtcgaagagtagagaggtttagttgatctcgggagcgcattcttaaagctgaggaaggattgtgaatgaagctttgttgaatcattcattgcattagcttatgaatagcagagttagtggtcgtgtttttcgatctgtttcttcaatttgtcttctcttttgttgttgaagatttggttctacgtgaactggtcctttgattagattgctgaaagtagcgagtgattcagataatatagtatcttcacaccaaacttacagtttcacagactttcgattttaacaaaattttatcctatttcaaaccaaattttgttgaaagaagaagatcacaaagcaagatataaatgttaatcagtaatcaatttcccttttttcttccttttgcctccttgcttgatttgcgctgagcttggaacatacgagcacacaagtggatctcgaattttatcagtagtttttccgagatccacttctttgtaatatccatcctctccaatgatgtaagctgtgttgtgagtgggatacattacatctttgtctttagcaaagactacaacaactttcttctcttcgtcaatgatgaaactcgcatctgcaattccaaacttaaaatcagtgagtggttgcatatccactgctaagaacaacttgctccacatcacctcttcaggttcaatcttagtcgtaacccaaatctccatatgtaagttgtccttacgctgaaataacacagcaagttgctcttctctaacactagaaagactcacagtatctacatccatagggtaacacggcaaatgaagacgcggcccaaatctctccgatgtaaaattaaaacagagcaagaaataaacactatgtataagattactgctgatttctggaaacttgtctgtagcaaaccaataagtatttcccttgagagagacacctcgtgcataaaactctacttcccagtcggaagtgacatcgagaaccctccatgaattagactttaactcgtatatttcgtactcaacaaattcttcttcggcaaaatcaacgaatcgcaaaactttgtagcgtaggcttgatttacgcttctcgtatcctatagcacagatataccagtccattctatggtcaggactactgggtttgagccacaaagtttggctcctatacggattccaaaccacgaccctagtgtagtctttcgagatacataacagtaaaccgtcgcagtgatatacttcagatatatcgatctgatctgtaccgtttaggctaacaagtttagcttgacggtttatagacgggtcaaagccgttgtgaattccacggaggttgatgctcgttagataaaccttacaatgcaagaccatgacaaccttaaactcactttcccttgatgttgcttcctgagcaaggtgcttctttgtaaagctccgctttttggataatgttttccaatttttgcaggtaaatcgcgcttctctcaatgatttcaccggaaccctagagagtctctcctccaacaaatctcttggaagatcggacatcatcttcaaatctttcaaatttgaacaaggatcgatgtaacacaaattagttaggtttgaaacttcagtaaaaagctctcatgtttccccacaggaaccctaactcaagctgggccgaaacacaactctgccctctaaaaatttcccggaattattcatctttttgaactcttatttatatgactgtgatgtcgtttcatttatgggctttattattgggcttttagcccaactgtagttaaaaactttttagtgattctcatttgtatatggcgggggagatgatcgacggtcgcttcttgcggtggagatggaggaggaagactctcctctccgactgcggcgattgaaccgagagagccaccgaagattcgaaacctacaaaatatagagggtgatgtaatccagcgtctgagctcgctgagaacagcctcgacgccgattccaattcagtacggtggcttaaagctccttcaattctcagaccatggccaaggctctgtatcttttgctcactggttctaccattgtgagttcttcactaccacctgctttgaattcaactacaatctatctacaaaattctctagccgaaacctttcaagttttagcatgagacccttagcttcaattgtttttctcttggacactgtctaactttgattcttcttggaattgattaggaaatggctaagaaagttggagaagttatagaaaaatcctgcgtagagaatgggatcacaaaggtggcctttgaccgtgcaatttacacttaccatggctttagctgcttcagcaaatagaacacggtctccaattttaagtctttttttgttttgtccttctcagaaatttgcttgtatagaacccatgattgaaatttagattagtcggcttggaacagtgttaacttcttcctttttaatgtgttcatttgttcttactacttatgcatctcaagaatgtttatatcgtctatacgatgataatatatttgaaaatggttgatgtttacaaagcttcagaaggtaagacatcaaatgtgctgcttagttaagagacaggtacaagtgcttgcaaatttaggacagaaggacaaagacagagacgaaaacttcggcgcagtgaaggcagttcatatctgcgaagtatagatgcgatatggttggaagttaagtaactgatagtctataaatagaaaagtgcgaggtatatgcccaccctggagttggtatgtccgcttctatctcatctacctattattagcaaactatagacgttattagttttctgttttttccttttatatactcacttctttaatgtagattctgtttaataaaaacagtaacagaacagaataaaatcttgatttcttttttttcctcccattcaggtctcatacttcgtttggcaatgcaatgagggagcagccaaggcagtattgaagggtgaagcagtatctcgtttcttgaccaatcatcaacctgtaagtagatctccactaggatggcaagcaccaacgttacagggcaatgcccgggtccaatgaaggctacctccaatggagccttccaaaacgaaagccctcttgatttcgcgcttcctcttatcatcctacaaatcgtcttggtggttgtgtttacaaggctcttagcttactttcttaagcctctcaaacagccccgagtcattgctgagatcattgtgagtttcctactcaatctctttgtatttttctttttctgttttgatgaaatcacatagcaaaagagactaaaagggatggttctgtagggagggatactgcttggaccttctgcactagggagaagcaaggcctatcttgacaccatcttcccaaagaagagcttgaccgttttagacacactcgccaacattggtcttctgtttttcttgttcctagttgggcttgagcttgactttgcagcaataaaaaaaactggaaagaaatcactattgatagccatagctgggatctcacttccttttatagtgggtgtaggcacatcttttgttctcagtgccaccataagcaaaggagtcgatcagcttccttttattgtcttcatgggtgttgccttatcaatcactgccttccctgtgcttgctcgtatactagctgagctaaagcttctaacaactgacattggacgtatggcaatgtctgcagcgggagtaaacgatgttgcagcttggatactccttgcgcttgctattgctctctcaggagatgggacttctcctcttgtatctgtttgggttcttctctgtggaactggattcgtgatctttgcagttgtggcaatcaaacctctgcttgcttatatggctagacgctgtcctgagggagagcctgtaaaggaactctatgtttgtgtcactctaaccgtggttttagcagcaagctttgtgacagacactattgggatacacgcgctgttcggggcgtttgtggtaggtatagtagctcctaaagaaggaccattttgcaggattttgactgagaagatagaggatcttgtttcggggcttcttctacctctgtattttgcggctagcggtctcaaaactgatgtaacaacgatcaggggagcacagtcatggggacttctagttcttgtcattctcaccacttgtttcgggaagattgtaggaacagttggttcctcgatgctctgcaaggttcctttcagagaagccgtgacacttggattccttatgaataccaaaggtttagtagagctcattgttcttaacattggcaaggaccggaaggtatagattcttgaaagccataataagacttataaaacatttaaaagccgagttatctaaataacgatttttgtgagcaggtgctgaatgatcaagcatttgcgatcttagtcctaatggcattgttcacaaccttcatcacaactccaattgtgatgcttatttacaagcctgcaagaaaaggagcaccgtacaagcacagaaccatccaaagaaaagatcatgattctgagctaaggatacttgcttgcttccacagtacccgtaacatccccacattgatcaatctgatcgaatcatcaagaggaacaggcaaaaagggacgcctctgcgtttacgcgatgcatctgatggagctttctgaacggtcatcagcgatcgcgatggttcacaaagctcgaaacaatggtctcccaatctggaataagatcgagagatcaacggaccagatggtgattgccttcgaggcttaccagcatctacgagcagtagcggttagacccatgactgcaatctctggcctcagcagcatccacgaggacatatgcacaagcgcgcatcagaaacgagtagcgatgatactgcttccgtttcacaagcatcagagaatggacggagcgatggagtcaataggacataggttccatgaagtgaaccaacgggtcttgcaacgagctccttgctcagtcgggattcttgtggacagaggactcggaggaacctcacaggttgtagccagcgaagtggcttacaaagtcgtgattccattctttggaggcctcgacgaccgagaagctctcgcatacgggatgaaaatggtggaacatccaggaatcacactaactgtttacaaatttgtagctgcgagaggaacattgaagagattcgagaagagtgaacacgacgaaaaggagaaaaaagagaaagagactgacgaagagtttgtgagggagttgatgaatgatccaagaggaaatgagtcattggcttacgaggaaagagtcgttgagagcaaagacgatatcatcgcgacacttaaatcgatgagtaaatgcaatctcttcgtcgttggaagaaatgcagctgttgcatcgttggttaagagtacagactgtccagagttaggaccagttggacgcttgttgtcgtcatcagagttttccaccaccgcgtcggtgctcgtcgttcagggatatgatccagcagcagatacacgaccgctcgttgaggaagatgcagagtacgatcagtcttccagagatatttcagacttaactgcctgaacggattttattataaaaacaaaatttctctgtttttttttttgtctcatgaaatattttgatattctttttggttgggacttggagtgtctccattgttctttttctattttccttaaattgatggttgacattagatttgtgggcatgaaaatcgacctgtaatttcttaatattttgccttgaatgatcaaaggaataatatttttaagatccaacatttctagtcatcaccatggaatgtatccttgcccatgatggtgtcacctacatacctttttagggtgtaatgtgttcattgttattcagaaaaaatgtaacaaacggaaaaatgtctaatcttaaattacctcctgaagagatatgaatgcaaaaagggaccacaaccgccaatgacaccgacaagagtcaaaagagacgtcactaataaataaactaacacattttcgaacaagaatccataacgttaacattcactcactgtctatcacacacacacatgctgtgtacttcattattactctctctcacgctctctcttctcttctcttctcttctttaaaaatctcacaccaacttcattgacaaagagaagaaaacaactctcaaaaacaaaaacatgagctacactttctttctccttttgctctctcttgtccactccactttctcttcattagctcctacggatcgagccgcgctccaatccatcagagactctttaaccgacatgcccggttcagccttcttctcctcttgggacttcacagttcctgacccttgttcctccttctctggccttacctgctcttctcgcggccgtgtcaccggcttaactcttggccctaatctctcaggctctctctccccttccatctccattctaacccacttaacccaactcattctctaccccggttcagtcaccggtcctctccctcctcggttcgattccctccctctccttcgagtcatttccttaacaagaaaccgtttaaccggtcctatacccgtatctttctcatctctctcaaatctccacactcttgaccttagctataaccaactctctggctctctccctccttttctcaccactcttcctcgactcaaagtccttgttttagcctcaaaccatttctccaacaaccttaagcctgtctctagcccattgttccatttagacctaaagatgaaccaaatctccggccaactcccacccgctttcccgactactctccggtacttatctctatccggaaactcaatgcagggcacaatcaatgccatggagccattaacagagctaatatacatcgatctaagcatgaaccaatttaccggcgcaatccctagctcactctttagtcccacaatctcaacaatgttcctacaacgaaacaacttcacatccattgccacctcaaacgccacgtcattgttacctgagggctccattgttgatctgagccataactcaatctccggagagctaactcccgcgcttgtcggagcagaggctttgttcttgaacaacaaccgtctcactggagacattccagaggaatacgtcaagagcttaatcaacggtacaacaaaacagctcttcttgcaacataactacttcacgagattcccttggaactctggtctccaactaccagactctgtttcgctctgtttgtcatataactgtatggagacagatccagtcgttggtttgtccacgtgtccgatcgaagttgcacctctgctctcaagacctgcttcacaatgttcaagattctataatcacagctccactggttaaagatcagtttttctttgttatttttctcaaagaaatttgcaaaaaatgacaaagtttttcataagcgttatcgacaaaacaaaagtatgacattttaagaaattgaaccgttatgtctcctagtgttttcttaaaaaaatcaaaagttcataaaaaagatctgtaaaactgtggtcctcacgtgtaaatgagattgtagtgtttatggaatatataatttatagattggtccttttctctatttttcttcattgacatatatgccattttgatatgaaagaaataaacaacacaccattggttttctatatctcttctccttatcttcaaattgtcattatcttttaataaaaaaaggtacaaacttttattcagtttgtggtctggagagcactcaaaatactgtttacataaaatgattgaagataattagatccaagcatgatggatatggatatgagttaatggtgttgattaagaacttataaagtctaatggtgttgatttagtaaaacattaaatgccagataattagctgttaacagacataccgacaaagaattttaagtaataaagttagcataaagctatctgatttgtcagaatgtaaaaacgagtccaagttgactccttcgagctttgattctcgttccaataatacttcctccaccatctctcctcctctcgttagatctaagaaacagagaaaacaagagagatagaatgagaaagggagttctaaatcctgacagagatcgtcagatagtggaacatgagttgcaggaaactgggtttagtccagaaacagagaaagtcaagaacaagaattttgaagaagatgaagaggaagaagatgaatctgtggagaagatatttgagagtagagaagtaccttcttggaagaagcagttgacggtgagggcttttgtggtgagctttatgctaagcatcttgtttagtttcattgttatgaagcttaacctcacaacgggaatcatcccttcgctcaatgtctctgctggtcttttgggtttcttctttgtcaagacatggactaagatgctccataggtctggtctcttgaaacagccatttactcgccaggagaatactgttattcagacctgtgttgttgcctcttctggcattgccttcagcggtaaagaaactcatcttcacattgaaccagataattgagttagaaattgattgtgtattgccatacttttgcttgtgcgtgtgtttgtgacattctgatataaaagtacaaatccttagtcttttgtactcaaaactcaactgctttctctctctttctagttagttatgttaaggtttttgcttaataataaatgcatctacttgggcatatgaaaatatacaggaggttttgggacatacctctttggcatgagtgaacgaattgcgacccaatcaggagatgtatcccgtggcgtcaaggacccttctttgggttggattatcggtttcctctttgtcgtcagctttcttggcctcttctcagttgtccccctgcgaaaggttggtcgcagtttttgtttcctgctttctctcttatgaaccaaaaaggaacaatgagtttatgagatcttgcattgccaatttctgtgtgtttgcagataatggtaatagacttcaaactaacatacccaagtggtactgcaacagctcatcttatcaacagctttcacacccctcaaggcgccaagctagccaagtactaacctttcacttcactttatgcgcttttatgtctttagttctctgcttccttttgactcgatgctgctctctgcatcaggaaacaagtgagggtgttggggaaatttttctctttaagcttcttctggagtttcttccaatggttctttaccggaggagaaaattgtgggttctccaacttcccaacatttggactcaaagcttaccagtacaagtaagccaataaacaatatatgtaacttgaaattatagagcattggcttgaaccacaatctggcttattgttttgtcagtaatcccaatgctcgttcctttctggtgagagcctgatgtagaaacaggttctactttgatttttcagcaacatatgttggtgttggaatgatatgtccgtatataatcaacatctctgtcctattgggaggaatcctctcttgggggataatgtggcccctcattgaaaccaaaaagggagattggttccctgataatgtcccatccagcagcatgcatggtctccaagcttacaaggtaactaaactctccatagcattcctttgttaattatctctatggatcttcctgcttcaagttaatctctctgtactggaccaacttttttccctctttcaggtgtttatagctgttgctataatcctaggagatggcttatacaacttttgcaaggtgctgagccggactctttcaggattatttgtacagctccgaggccctactacatctatttcaagaacctccttcacacttgaagaagaccctcatgcttccccactaagcccaaagcaatcttatgatgaccaacgtcgtacaagattcttcctcaaagaccaaatccctacttggtttgctgttggaggttatatcacaatagctgcaacatctacagcgatactccctcacatgttccaccagctgagatggtattacattctggtcatctatatctgcgcgcctgtcttagctttctgtaacgcttatggagctggactcacagactggtccttggcttcaacttatggaaagttagccatattcacaattggagcttgggctggctctgagcacggtggtatgctggctggtctagcagcatgtggtgtcatgatgaacatagtctcgacagcttcggatctaacacaagacttcaagacaggctacctcactttatcatctccaaagtcaatgtttgtgagccaagtgattggaacagcaatgggttgtgtggtatctccttgcgtgttctggctattctacaaagcgtttgatgatttaggcctcccaaacactgaataccctgctccatttgctactgtatatcgaagcatggctaaactaggagtggaaggtgtcgcatctctaccgagagaatgtcttgttctatgctacgcgttcttcggtgtggcgattctcgtaaacatagtaaaagatagtctccatagcaattggggaaggttcattccacttcccatggcaatggctataccgtttttcttgggaccttacttcgcaattgacatgtgtgtgggaagtttgatactttttatctgggaaagagtagatgcagccaaggctgaagcttttgggacagcggtggcttctggtttgatatgcggagatggcatttggtctttgccgagctccgtgctcgctatagccggagttaatcctcctgtttgcatgaagtttctctcttctgcaaccaattcaaaggtcgacaacttcctgaaaggatccatttaaaactcaaataagtaacaacatctcaaccatgtgaaagtgtaatgatgcttcaattgttcttttaccattatgacgattttgaatgtaactcgtatataaagatcttagatatgaaagggctctgattgatgattgtcaaaacagtttaaaaccgcagacttacgtggggtaagaacacaaaaatagatttttgctgtaaccctttaggctcagacgagagaagatgctaacctgagctgaggaaaatgaaggtaaaggaggggtttttggtgattcgccgattgtgacgccggtgataggagcgattagcaccgagaagggatgaaaaaacgattctttcaattgggttatcgaaggaatcttcgtatgagcatagtgatcaagtcgggttttcgagagctagggatttgaatttattgctttgctttgactccatgttggattaaaaatagagagatgatgtgtcgcagtgacagatataaaagggtacgagaaaccgtcatttcttttctctcctctccttcaaatccgttcttccttgaaaccattttggctctctgtttacaaacttggtttgatttttcaattgcctctgtttctctctcattctctgattcatcttcatcagaatgaacaggaaggcctctgtttccaaggagctcaacgccaagcattcaaaggtcccatctttttttctcctccttttcgatttttcaccattggttttgcgtctggaaagttgaaaggttagagattttgtgtgggttatagatattggaagcacttttgaagcatccagacaatcgagaatgtgcagattgtagatcaaagtaagcatcttgataacattatctctttcatgatcatgtaagaaaaacgatttaggagcattgtgttgtttggatctatctattttacagggcaccaagatgggcaagtgtgaaccttgggatattcatttgtatgcaatgttctggaatccatcgtagccttggcgtccacatctctcaggtccctaaataatctctcttttaattgattgtgttgtaaatggatcatacaaattagggatactgatgaattttggacacaggtaaggtctataactctggatacatggcttccagatcaggttgctttcatgaaatgtaagctcctcttttgtatataatgaacacattcagtagttgaattttgtatcaatcccatagcttgatcatcttattctcggtctagctaccggtaatgctaagggaaatgagtattgggaatcagaattgcctcaacatttcgagagaagttcaagcgacacgtttataagagccaagtattgattcttttctatgttcgcttttgcttcctcatctgctacaacacaactttagcttgaatctttttttcttctgttcgtgtgtgttttagatacagtgagaagagatgggtttcaccgggagcgattcaaccggctcctatagttagccagctaagctgcaaagttagtcacttggtagagagtggatataaacctgaaactccaaagaaagctagaactctttcacttgacgaagagatccttcttcatcatgttcttcaagtaacacctccagaaacgagaactcgtgcggtatgacaacaaatctatatctttttgggttctggtatgatcactagattggaaattcattcagtttccttgtttgtcctgtggcaagaattaacaaagcttttgtagaaggattttgaatcatttccataaactgttgtgcaatgcagggttcggtagatatgaaggagaatgtatatgttgtacctctaccagaattcaagaaaccaaatcaaaagaatgagaatttctccagtgaagtaaaccagaatagaagaaccaccatagcaccaccgtcgagctgggctactttcgactgtaaggccatgattcaggcttttcttttttttatcttctgttagttttgaggttttgattctaaatctctaatgtgaaacaggaagagaaaagactctatgaagacgaagaagatggaggttttggaaaaacaagaatcatcatgtgggctttaattttagtcaaaaggttggcaaagatgggatgatgaactcaaagttggttctgttttctaattctttattcattcataatccaattttggttgcttgtaacaaaatcatttttaattcaatggaagagagacatctttgagtatttgacaaaagagaaagcaaatacaagtcaccaatgtgattatttttaattgctggacaagtaacatcaattgattggtccaccatactccataacaaccgtaatgatttcaataatcacttttgagtttgtgttttatttggtttacactttacataggaaacgaataaaattaaatcagacctaaacacactaactcggtccggtttggttaattttcttacgggtttattgagagatgggccttaggcccgagagagaacacaaactggaatgaggaagaggaacagaacagttgtggtgtgttacgagttacgactgaagagtgacggagatggcggtgaacgcgtgtctatctccgccggagatgatggctgtccggccaggggaaggcgttccgaattcaaaatctacgcagggaaaaactaggctctatctcaccaaaccttcatggatagtcagaactcaggtctgaaaccaaaaacccccaatttctatctctagactcttgatatcattaataagaatgaattcaatggttaacagtctggagctaagacgtgtatgaagtcgaaggcgaaaggacgatgcgtaatctgccatggaagtggaagagtcgattgtttcaattgttgtgggaaaggtaaagataaataacttctctctctggttctcaactttaaatgtctcttatgattgatttcttcgtattaactacttcagagaattgaattcttgcttttttgtgatatatgattgaagggaggactaattgtgtggatgtggaaatgcttccaagaggagaatggcctaaatggtattcttgaggcttttatatctgttatttgattcaagaactaaaggagttcaaaattttttttggttgttttggtcacaggtgcaagagttgtggagggagtggattaagtgactgttctcgctgtcttggcaccggagagtacagatacatcatgggtttccgcttcttaaaccaaaacgatgatgccgatccacaataatgatttggagaaactcttaacgatcatgtccttgccagtttttgtatatgtccaatgaggaggcttaagacttgtttagtaatgttgtatatggttgctcctgacttgttaatattgtttgtaatcttcaaggatgttgttgcaagtaaagagaaatcaccagtctacaagttctttaggaagataaatgaaacgtagccaccgttagttttatattcttaagcttacattgcaaaattgttgtatcttggctttgtacttactaatggtatatttggattctttagtataatgggaaggttctgagtcaaaattttagttatgagctgtctaatttgattaagaattagtctagtgatgttttatcttcggctttgagtgtgaaacgaagcaaaatgggagctgattagagtgtacaattgtgatatccggtttagtcaaaccggatttaatacattttaatttgattatctcggtttatttagtcaggcgcgcatctttcttcttcttgtggttcgatattcttatcgttatgtcttccgtcgctttgccggcgatgagctgccggagctcaggtgaacaagtgaaggagattcgcgtttgtacgaatcgcacctgccgaagacaaggctccttccagattctcgagactttaacagctctcgcacctcccgaactccgagtcactcactgcgcttgcctcggccgatgcggctccggtccaaacctcgtggctctccctcaaggtctcatcctacgtcactgcgccacgccttctcgagctgctgaaattttgttcagcctatgtggtgacggtcgtgaagcttcttcatcctccgccgtcacagacgctctcacggctttagcgttaaccaacaatgctctctctcaaatcgatgcgggaaatttctctgaagccgaagcacttctcactcaggtctgtagacttacgaatttgtctcaatttcttctccatttttatggagcttgaccatggatgtgtctatgattgcaggctttagagctgaaaccctacggtggcttgcatagaatattcaaacacaggtacgtaattgaggtactgtattgatcttttggatactgtttcttcatagattgtacatgtaactagattgttgggatttggtgattgcagatcagtagcaaaattgggaatgcttgattactctggggctcttgaagatataagccaagctctagctttagctcctaactattctgaggtatatactttggatttgatactcttctgattttgcagagttcttcttggaaagcttatgttaatcctatttttatgactttatctaccagccctacatatgccaaggggatgtctacgtagcaaaaggtcaatatgatcttgcagagaagtcatacttgacatgtctagagatagatccttctcttcgcagatcgaaaccattcaaggtttgttttgttttcacgttatatttagcacttaagcatagaggtccctccttgttaagattagcttcaatgtctctggcaaagatgaatgctttttcttataatgtcattatctgattcgaaatttttgtttgagacaaatttacaaaacttgttggtgttttaagttttaactatccttgcaggcccggattgcgaaacttcaacagaaagttgttgaactagatgtaacatagaagtattctgactctgggagttgatacaaaacagccgttgcaataaatgtctctttctttgggtgttccagagtggaaaggtatgtgtataggttattagtatagcaagaggtattgacattgcgttgtgtatatattactcagatgatattatcaatgttaatgacattattttggtactaaagactacccaaacaacaagcttcctatctttgataatcattacggtactcaaggagctacattaatgcttagcttctggccatttacacagtgatcatccactccacagatgaaccatagctttccaacttctgataggattattgagtcgttacctttggtgaagagagttgtgtaattgtctaatccacaatctgtgtatgctgtagagttaacttgcataacattatgctggtcacttttgtagttgaatactgttgaagaagagagacagacttagcaaggtaaatgctgttatgctggaaataacttatcatgttttcttactattgatatggaacagaagactgctgaagaacagaggcagaattgacataaatcatcgtcttttttggtgagatagtatgtatgggattgcaacattggttctgctgtatttaggcatcgtagtacaggagttagaaaaattacctaagacatcgccgacatgaaactctcttccctgtgtccagttggtatagtttgtaaagagttcccagccattgctgtcaccaactatatgctctgttccttcagattttagcatgagagaagataaagagaaaatggcatagagtataatcaagctagagaatcggcttccctgatgaagcattgctatctcttaacttcttgttttctcaatttcttttcagaaatacagtatatttataaagcagtaagcatttgtgggtaggaaggtcatgacattgttgtgttaaccagataagtgagtcatgaaaaccatacatatgtggatcaaggagccacagattgtatgcggggtacaacaaactgtgcatcagggcgatgcactgaaaagcattaaacctaataaggcgatagaacatacacagttatgtatgcattgttcatagtttactaatacagcaaaggattaagctaataaggcaagtcgaaagtgcagcatgatggagcagcagccgatgggttaaggctgcactttgtaaacaggttaatggtgttcagtttcttcaaccacttgaatccaggcttcttctcttcggttttgttctccttcttctttttggtcttatgcttatccaggccaaagcatccgtatgagaccttatcagagacgggctctgagttcctagatgcctgaagcgagtagatgcggttctggagaatgcagaccttgtgaaagtggtcatctctcatcttaagcacacacctagcaagcccaacagcttcgttcttcatgaacaatgcctcagtggctagctctctgttctcctccaagagagaagtgagtttgtagccaagattagcgttttcctccacagccacttctttctccatctccagcaacatgacaaacttcttcaacagctctatagtcttggaggcttcatgaaactgttggtccttgtgaagtaactcgtgtttcagaatctctttgtccaagcttgctgtcacaagttgggatacaagctcatcgactttctcagaaaccgcagtaggatctttcatctgttgaaaggataaggtgctctcaacttcagaactgacctcactaacggaatcaatgtccgaaatgcagtcatcatcatcttggagaagctggttcggaagagaagtagtgggtttaagtctggtctgatgagaagaacgacccaagagagtgacgtagccgttgtacaggtccagacaaagtgagagaagcaaaggtcgtccctggtaaaaccattcagctcgttgagcaaaggtatcatcatctccttggctttcttgaaaaccagactcacgcaggatttgcatccgagcttcaaggtctgtttccaacattttttcagacaagaagtgatgagagagaaagacaaacagagcaagagagagagagaaaaagggggtccactgtttctgtagcatgctttgtgatttgaaaatttgaaaatgtgaaaaagctccaaaaagagagagagagagtgagaagaaatttgaaaatggaaaatgaaagtaccagagagagatggcaactgtggagcttccatggatgctttgttcttcatcttcttcaacctgaaagatatacttgttttagttagtgattcgtatataaaattataaagggaaaatgggaataatggcatagatgatgaagacattgatggcttttccaagaagataataaatgttaagaaagggatattttagatcatcgagattaatgaaggatcggagtggggagaagaaagatacaaacccagaaatagtgagagagagaagatagctgacacgtttgttcagttgtatcagtgcagagcatataacaggcaaaatccgccaaagttacaagcatttgattttgttccactcatattttaacacgtggctttagtacttgggtttggtagttgcggcccattgtttgttgggcttaataactcaaagcctttaggtttttgagattctgacatcaaatttagaaagcaaaaagagggagagagcatattggttggtggtaaatgacaattttatatatccagaagagttcataaagttatgtcatcgaataatgttttcataaataaataaaaatgtgcgttttagaaaataatatttatttcatcgtctttttccataaacgcggatctctttattcacactcttaattattttatcatatgagacaattgcatataaaaaaaaaaaacctgaactgtgtgtttggtgagaattccagtttattctttttcactaatgctcagaaatcatcattcttatttggaaatatgcactaaataaaatacacaatggacaaagctcttggataaagttttcaaagtaacacaagaggcagcttcttgaggttttctctcttccaacttttttgctttacttactactgaggttttctattcctttggaagcttcgttgatgggttcaacacaagatctaaaatgtaacatttcttttcttaaatttcctgcaaagttcgatgtagttcatgtttttttttttccattcttttccttataaagtgtcgtccacatttgcttgacgggatacaaaacgaaacccaagtctctgtcttcgtctccttctttcttcttctctctgtcatcattttgcttttttttcttctcctacatgccctagattttgggtttctgaaataaaaaatggctcacactaggactttcacttccagaaaccgtagcgtttctctctcaaacccatctttctccattgacggatttgacaactcaactgtgactttaggctacacgggtcctcttcgaacccagagaataagacctcctttagtgcaaatgagtggtcctattcactctactcgcagaacagaacctctcttctctccttctcctcaagaatctcctgattcctcttctaccgttgatgttccacctgaagatgatttcgtcttcaaaaacgcaaatctcttgagatctggacaattagggatgtgcaatgatccttactgcactacttgcccttcttactacaaccgccaagctgctcaattgcacacttccagagtttctgcctctagggtatgatatttctacttaccttgagactcaagtaaacattatacatagcagctgacacaagagtattttactttcttttgtcttgtttagtttcgcactgttctgtatggtgatgctagaggttgggctaagcgatttgcctcctctgttcgtagatgcttacccggaataatgaatcctcattccaaatttgttcaagtctggactagagtcttagccttttcaagcttagtggccatttttatagaccctctcttctttttcctcttattgatccaacaagtatgtctccttctcttgctctatcaatctccttcttgactgtatacgttttcatgagtttgatactgcaggacaacaaatgcatagcgattgattggcgtgcgactaaagtattggtgtctcttagaagtataacggatcttatattcttcattaacattctgcttcaggtgtgtctccattgctcctatctcatatctaaggaaattcattggctttaacgcttctttggtcttatgtgttgcagtttaggttggcctatgtagctcctgagtctagaatagttggtgccggccagttagttgatcatccaagaaaaattgctcgccattacttccgaggaaagtttctccttgacatgttcatagtctttcccattccacagataatgatattaaggataataccattacacttaggcacacgcagggaagaatctgagaaacagattttacgcgctacggttctttttcaatacattccaaagttatatagactcttacctcttcttgctggacaaacatctactggcttcatatttgagtcagcttgggctaattttgttattaatcttctcaccttcatgcttgctggtcacgctgttggctcttgctggtatctctctgctctgcaggtatatagtagaagatcagtgtctttaaagattctcttcatatctatcaagtgatttaaagattgtttttgttgtattgcttttttcagagagttaagaaatgcatgctgaatgcttggaatatttctgcggatgaacgtagaaatcttatcgattgtgctcgtggaagttatgcatcgaagtcacaacgagatctgtggagagataatgctagtgtcaatgcttgttttcaagaaaatggttatacctatgggatctatttgaaggcagtgaatcttaccaatgaatctagtttcttcacaagattcagttattctctgtattggggattccaagtaagttcatttcaggtttggttgatgttgcagctattagtctttgaatcactctttaactaatgttgaaatgttttcaactctgaaagcaaataagcacacttgctggaaacttatccccaagttactcagtgggtgaggttttctttacaatgggtatcattggactagggcttttgctttttgcgcggcttatcggtaacatgcacaacttccttcaatcacttgatcgaaggtaaatcacatttcatcaacaatgttctgaaaagggatggtgaatttcttggctaatgcatgttctgttttaggaggatggaaatgatgctgagaaagcgtgatgtggagcagtggatgagccatagacgtttgccagaagatataagaaagtctgtgcactgtggcatttgattttctcaggctgtgtaatgtgatattcataactaatcaactgttcaactttttcaggagggtgagagaggttgagcggtacacttgggctgcgacaagaggagttaacgaagaattgctatttgagaacatgcctgatgaccttcaaagagatataagaagacacctcttcaaatttctcaagaaggtaataagcaacagcctcatgacagcattagtcagtattcattttgtgtactcagactccacagtgttgcaaaaagctagttctgaatccaagtgttaatgagtttgcaggtgagaatattttcgttgatggatgaatcagttttagattcaatcagagagaggctgaaacagaggacttacataaggagtagcacggtgttgcatcacagaggtctagtagagaaaatggtattcatagtgagaggtgagatggagagcattggagaagacggttctgttcttcctttatcagaaggagacgtttgtggtgaagaacttctcacttggtgcctctcttctataaaccccggtactaataacatttgagtgttcataactcttaatgttttttggttagaaacttggaactttggagctgaatacgttttgaaacttgcagatgggacgaggataaagatgccaccaaagggattggttagcaacagaaatgttaggtgtgtgacaaacgtggaggcgttttcgctgagtgtagcagatcttgaagatgtaacaagcttgttttcaagattcttaagaagccatcgagtgcaaggagctataaggtacgagtctccttattggaggttacgagcagctatgcagatccaagtggcttggagataccgaaagagacaactccagagattaaacactgctcactccaattccaaccgttaaatttgatgatgatgtttggtttggtagattagtaattttattttgaagtataaagcttagtgattcactataaaagatgaatcgatgattcattcgttgtaatcaattcactcattagtgtttcttaagtatctttttgctgtttttccaatcatacggtataattttacttcaggtcactcggcttgagtaacttgggctcataatttcggcccattctaattgatcttaaattaataattaatcaagcctggataatgaatgatttttgccttttcggtacttctttactgtaagaagttaattaagacaaagaaacggaaacagccatgtagttaatgacattttgcctccaataattagggccaattaattagttacagttggtaatcaaataaaggaattttcgaattcgtgaatattcaaaaggaaataaatgttaaaaacacagaggagagagaagcctcacggacacgaaataataaacaatgtaataaaagtcagtgtttgacttttccagacatgagttttatttacaataatacacttccttgacctgggctacgaagaagaagacccctgacttggtcatcatctcctttcttatttcttcttcttcttatcaaaattactaaaactctctgcttcaacttccttctccgcctcaaattttccctttatgcctagattctagccttctagggtcttcttgaaaccgtgattttggtcaagaaatggcttcccacaacgaaaacgatgatattcccatgcttccgatttcagacccatcatctcgtactagagccagagctttcacttccaggagtcgtagcgtttctctctcaaaccctacttcctccattgaaggatttgacacttccactgtggttttaggctacacgggtcctcttcgaactcagagacgtcctcctttagttcaaatgagtggtcctcttacctctactcgcaagcatgaacctctctttcttcctcatccttcttctgattccgttggtgtctcttctcagcctgagaggtatccttcttttgctgctcttgaacataaaaactcctcagaggatgagttcgttttgaaacacgcaaatctcttgaggtctggacaattgggaatgtgtaatgatccttactgtactacttgcccttcttactacaaccgtaaggctgctcaaatccctacttctagagtttctgccctttttgattccacggtaaagttttgatttttgttactttacattcacaaatatagcttcaggatcaagtaaatgtcgttgaaacagagtcttttgttttcttgctagttccataacgctctgtatgatgatgctaaaggttgggcaaggagatttgcttcctctgttaatagatacttacctggaatcatgaatcctcatgccaaagaggttcaaacctggactaaattcttcgccctttcatgcttgttagctatttttatagatcccctcttcttcttcctcataaaagtccaagaggtatgtttttccttcagagatatcttttgcttttccaagtgtttttatcttgcctttacaccacctttttgaccatctttattttctcactgtagcaaaacaaatgtattatgattgattggccgatgactaaagcatttgtagctgtaagaagtgtaacagatgttatattcactatgaacattctacttcaggtgcttttcttttgcttacatttttccatctctttataaacaaaatatgttggctttagtgctcacgtttgccatattggttgcagttccgattggcctatgtagctcgtgagtctacggtagttggagctggccagttagttagtcatcccaaaaaaattgcccttcattacctcaaaggaaagtttttccttgacttgttcatagtgatgccacttccacaggtattgttacgttagagctcctactggttttaagtaatggtaatcagaagatgttcatttatgttttcttttgtttacagatattgatactatggataataccagcacatttgggtgcatccggggcaaactatgcgaaaaaccttctacgagctgcagttcttttccaatacattccaaagttatatagacttctaccgtttcttgctggacaaacacctaccggattcatatttgagtcagcttgggctaattttgttattaatcttctcactttcatgcttgctggacatgttgttggttcttgctggtatctatttggtctgcaggtatgacaaactctcaaaatgtctttcatttttatcttgtcctgatcagcagaagatgcataaagtgatttatattgtttcccgttttctgttggttctttcagagagttaatcagtgccttcgaaatgcttgcggtaattttgggcgtgaatgtcaagatcttatagattgtggtaatggaaatagcagtgtattagtacgagctacctggaaagataatgcgagtgccaatgcttgtttccaagaagatggttttccttatggaatctatttaaaagcagtcaatcttaccaatcattctaatctcttcacaagatacagttactctctcttctggggcttccaggtaactgtttttttttttctctctttcagttttttagtaggaaactaagaacaactactcaactactttgcattgattggcatacttggaactcttcattaagatcattaattttataattctcatagcaaatcagcactcttgctggcaaccaagtcccaagctactttctaggggaggtcttctttactatgggtatcattggactagggcttttactttttgcgcttcttattggtaatatgcaaaatttccttcaagctcttggtaaaaggtaaacaattccatcattgtactaaaatagatatttcaagacataatggttggttctataaacactaactactcaggtgattgtgttttgtccatattaggaatttggaaatgacgctgagacggcgtgatgtggagcaatggatgagccatagacggttgccagatggtataagaaggtatgtggactttgcctataaaactttgttttatcctttgaatattctttttcttaaagagttacattggtctcagtttcagtagtttcactattaaactaactgaataatggttcgacattatcaggagggtgcgagaggctgagcggtttaactgggctgctactagaggcgttaacgaagaattgctttttgagaatatgcctgatgatcttcaaagagatataagacgacacctcttcaaatttctcaagaaggtaaacatatgtgaaacttctgtatgcatagatcccaattccatatagtgttgcaaagagctagttctagaagctgtaactgcaagtaatagttagagaccacagattaaaccattgctgagaaatagtattgaaatttgaatgggtttgcaggtgagaatattttcgttgatggatgaaccaatcttagatgcaatccgtgagaggctgaaacagaggacatacatagggagtagcacagtgttgcaccgtggaggactagttgagaaaatggtattcatagtgagaggtgagatggagagcattggagaagatggttctgttcttccattatatgaaggcgatgtttgtggtgaagaactcctcacttggtgcctcgaacgctcttctgtaaaccccggtaccatcccttttgactctatctctatgtgttcataaatcccaaaaagtttggttccttagatgacacttcgttaagaaaaagcttggaactgagtatgttctgaaaccttcagatgggacgaggataaggatgccatcaaagggattgcttagtagcagaaatgtaaggtgtgtgacaaatgtggaggcgttttcgctgagtgtagccgatctggaagacgtaacgagcttgttttcgagattcttgaggagtcatagagtccaaggagccataaggtacgactctccatattggaggctacgagcggctaggcagattcaagtggcgtggagataccgtaggagacggcttcatagattatgcactcctcagtctagttatagcctttagtttgtattcttcattcttgatgatacgcttaaaacaaaaatagggttccaaagctcaagactgctcataggctcatagcaatgctcaaaagtcaaaacctcacattctccaacacgaggcaacaacaaaatttagatcgaagttaaaatccaagtattcggtgtgctcggtaaattttaatgataaatgaaaaaaacataacaatatattatattataattcattataaacaaaattataagataatctatattattaattaggaagcattgtatgaactacaacattgtaagggtagtttaaaactaactaaatgaatttttgcatgggtaatttagtaaattaacaactactacaactaaacaaatatcttggattttgtttttaaaaaaaacgaattaaatcactaaattaataactacccaatattttcggaaatcatttaaaaacgttttcataacatattaggttattttaattcaaattgtatatatgtaaacttatttcttttggtaatatgttattagataatttggaaacttcaatctaatttaataacaaattatcatttactttagattttatacaatttccttaacaaaactatgttaattgtttctgattattacaaataaaaataattttaaattatgatttagcatattcaaaagagaatttttggattttagatttgtaattatctaaaaaatagtttcagtatacattaaaatatttaacattttaattagaatttaaatgatataaactttttaagtatttttttaaaacaggtaattttcattattttaaaaatatatcactaagctaaatttgaattatataaaaaaatatatatttttaaacgtattataatagttacaagcttttggaatattcattcttctagattcgattatttattcttttttaaacagtaaaacaaagtttaagtaccaatgtttaaattttttaatgcaaatattcaaaatgagaaaatatcgattcacaccaatatcttattttttactttgaaatttgaatggcttttctttggaacaaacaatactataatatttttaacagatcattaattgtattcgaacaataataactaccatatttgcgataatgcataagcataagtttaattttaaaaaataccaaaatcgttgagatcatataaattttagctttaaaaaaaaatattttcgtcatcctaaatttaaaatatgtaattcggattacttttttttagtaaaggtaagattaaatccaaattaaaatctaattttgcgtacaatctatctcttataaatattatgcatatattcacattgccttagaatcaatctagaacattgattcttttaaaaaatagatagagattcataagtgaattacttcatgttctaatgatgtttatttcctaattttactatccatttatgcgtatttttatggatttttctttcatagtcaacattagattacaaaaaactagctgggtgttggtcaatattataccaccgataaaatcatataattaaaaatccaaatatagttatacaatctgaaacaagaaacaaaacaaatataacttaatttttttttttaactaaaattagcaaattaatcagtttataaaaaataaaataaaaattagcatgtggtaccctacgggtaaatcactacgatttcatgaggttgcaatatcaatgtatacaaattttgacttttaaaatatactttatacaattattgatagatatacactaaaaaacgattttatatactataatataataaatttataaatcacaaattatttttaaatatattaatctaagatctaccacaggtcaatctctcgatttttttaatatattacaataagaatatttaaaaataaaacaaaaatatttaattttacagaatgaagttatctggtggaaagagtttgggttgatattcatacatgacgataatctacgagtgaaatcttagaattagcaattttaacacaattatacaatcttaaatactaaacaaaagaaacaatatttacaaaacaactataacttaaaattcgaatttttagttacaaaaaaattgaccaacggtgtaccgcatagtaaatttcacattatatcatctaattgatcgaatttcaaacaaaaacgattaatttgtatatacatcaaactaacaagaatacacagattttccaaataactctatattattccaaatcgaaacaaatctaacattcgatttactatgtaaaatacaaatgaaatataaataatataaattaataaattttttaactattgtatcataaataacactatacacttttttatgaacattataatttatacattacaatatctttcactaaaaatgtattttaatatatttcttaaaatatgaaatcccgaacgtgtgtgtggatcagaatctagtgttatatatacacaatttattggttaacatccatgataaaaataatgatttgatttagtctatatatgaatatatcgatgcagaatataaaaataaactcaactctcaactagaaatgtaagaattaatttttgtaaaaaatataattaagataaaagtacataataaaaacgtaaattcaatccaagtattcatcaagatttatgaatacgcctaattaaatattaggaagcgtgtgaaagtttaattggaaatatatttaaataaagaagataatagtaaataaaataaatctaattaacagattaataatatgtgtcgtgattgtgctaattatctctttgacggaataagttaacctctttataataagatatacagtatattttaaataaaaactcttgtttatactcattttgtggtcgatagaagagttttgtcaattttaaatgcccatttatccttcttcttcttcttcttcttttttttctttttttttcgtcggcaacttgtctcaagtttatctttcttcaatataatttagcagctaaattgtaaaaagtaaaaacagtttgaccaaacaaaaattaattttatttcctatataatcagattatttagcagctggaattgcaaaaacagtttgaccgaaaaaaaaggatttgtaaaacagagcacctgatggcgtcggtgaagttgccgtgggatttggaggaagagatactgtctcggcttccacctcgatctcttgttcggttcaggaccgtatgtaaacactggaacggtcttttcagcgacaagaggtttgtcaaaaagcacttggtccgtgcccgtccccaattcatcttccttaccgaatcgaagaagatgtactcgatagagatcgatctgggtggaacgatagaggtgcgtgaggtaccctacgattttcattgtcagcctatgaagaagaattttacaactatcatggcttgcgatgggttattgtttcgtgatttttggaaacaaggtgttgcggtttggaatccgtggttgagacaggttgggtggatcgagtatgaggataaaggtttccgtttttgcggtgtaggatacgatagttgtaaacccgataagtgttacaagatcttggggtattttaattgtacgcgtagactcagcgactctctccaggaaggttactaccaagctgcgatctacgagtgtgcatcgcaggcgttcaaatttattgatacccctaaccctttcaacctgtggcccaacaaggatcctttgtccgtgaacgggaatctttattggcttgctcataaccaccctgagactcttgagtatttcatcgaaacctttgatttctccatggagattttcaaacccttttgtctactgccgtgtcggaaggactttggtagcaatgaacttgtcctggcggtttttaaggaagatcggttttcattgttaaagcaatgcttcgaaacaacgaagattgagatttgggtaacaaagatgaagattgatagagaggaggaagtggtgtggataaagtttatgacattgccgacaaccaacttgcctaatctagatgatacttattgttgcagtagttacttcatctttgacaagaccataatcatgtgttgtggcgattacaaaactggagctacttgcatctatatggtgaggggagatatgttcaagaagattcagatcaattctgggatttttcagttttcttactgtgtctatcttccaaatttgatctcggttccttttgaatcacatcaagtttaatttttttttttgctaagaaaacgaaacaagtttaaattctgaattttcttgattagttacaaatttgaattcgataattgtgttactttcgattccgaagaaatttttactctcactattgttggagcatagaatacattcccttctttgaaagttgattctgtttaaatttatgctgtgttctatatgtgggttgattacagaacacagcataggcctattcacgatccttggcacaaaaaaaatacagaatcggttttgttttttccggtggatgtaatgtcgaatacaccagaagacggcgacggagcacaggtaactacaggcggcttgttccccgtcttccctacttcggcgaactccatctcagctatttcgaatgctcctcaatggcttcgcaacgctagcttcactacggatctctctgtcatcaacgctgccgcttcgacggctccttcctcatccgaggtcgaggctggagacgacgaagatgaagaaggaggagctgatggaaatatcggtttagctaatcaggctagggtttataatttggttgaagaagaagggtctttggagtctgatgacgacaaggtaaagaggaagcgagagaaaaagaagaaacggaagagtgataatgcttcggatgaatctcgttctcgtaaatctgatgaatactattcgaaacctgtgaaggattattacttggacactcgtcctgatccagataatctggcttatggctctatttacaggtactttgcttataatttgtctagttatggttgatttcattttctgtattctgtgcaaggcgttttaagagtgtagggatattgaaattttgcttctgtttgcataatacaggatgaatgttcctcgttataaacttgacaattctcagagagttccagggtcaggttctctgaggttttatttgcggaatcgacgtagttctatgcttgacacagagattgatattgattctttggaggggagagcaaagtctgatacccgatactggtatgcaaaacatgctgccatggaacgcaacaagaatttcaagcgtattcgtttatctgctgcaagtgaagctgtggattcttcctttgataatttcattccactggaggaagacgtgactgttccagaaagtgacgaagaagatgttttatcaaaggactcaatgattggagcatcatgggaggatgaagtgctgaataaaacacgggagttcaacagagtgacgagagaacgtccccatgatgcaaaggcatggctggcatttgctgattttcaagacaaggtttcaagtatgcaatctcagaaaggagttcgcctgcagactttagagaaaaagattagtatacttgagaaggcttttgagctgaacccagatagcgaagaactgttgcttgctctgctcaaggcataccgaagcagagacaacgctgatgtactaatcagtaggtgggaaaaggcacttatgcagaattccgcaagctacaaattatggagggagtttttatgtgttgttcaaggggagttctccagattcaaagtatcagaagtgaggaggctgtattcttatgcgatccaggctctttcttctgcttgcagcaagcgacataggcaggttcttattttatggtgctaactgataagggttgatgaatcacttcattacgtactgtttactgtcacaagtcgtttggtgtttccccactatctttaatcgctggcattattgatattctcattaatagcagtttgacattgtaaggtctaattctatttattggattatgcaggtggatacaacatctgaaccattggattctgctgccatccaacaggaactcgttctagtcgatatgctagttagcctctgcaggtttgagtggcaggctggttaccaggagctggccacagcgttacttcaagccgaagtggaatttagcatcttttctccatctttgttgctaactgaacagagtaaattacgactgtttgagcacttttggagcagtaatggtgctagagttggagaagaaggagcttttggatggctattgtggctggagaaagaggaggaaaacaggcagaaaattttgaaagaagaatcctctgatgacaatgaagtaggtggttggacaggttggacagaacaggtctcaggtagaaatggagatgatcttgcttcagctaacactggagaggtcgatgttgatcggaagggtctggatgaggaaatggaagacgagaatagcaaacctgaagatgacaccgaagctatgctgaaattattgggcattgatgtcaatactgcggccagtgatgaggttaaagatacatcaacttgggttgaatggtttgaagaagaggtttctcgagatcacagtcaatggatgcctactcggaaagctggtatctatctctatctttaccatcattatctctgtattgtttgttcatcttttcttttggagcttacaaaggtctaagtgtgtctgttgggtgaattttgtccaactgggactagtcgctcagccttctttgtcattctagagtcattagtaaataaattgcagtctctatagatatgtttgatggtattgttgacatgtaatcttatctaaaagactgtaaacatgcatgtggttaaccgtccatcatcctttaataggtgaattctccagtgttgagggaatgggtgagggagaagatgaagagcaactctcaagtgttgtactatatgaagatataaatggatatctattttccttacgttcaaaggaggcccgcttatctctggtataccagttcattgatttcttcggtgcacatatctcccccatggacttccagcaacagttgtcgtggagtgagaaaataagtagccttgaaacattgtcagattccatgttagaaaacttgagaagtgttcatgaatgtttgtcgaaatcagatagtgccaactgtttcagcttgggatctcttctaggtggcagctgtgacttatctatgcggactgagatgatgaagtttctccgcaatgccatcttgctttgtctaaatgttttcccgcaaaattacattcccgaagaagctgtgcttgttacagaagaactatttgtaacaaatatgaaaacatgtgaggtacgtagcaactatgccatgccaagctttggccaaacgtctcctgaaaagtgacccgcaggtaagccccattccaattttttgatgttttttatttttattttgttcagtttatctgagaactgattcgttctctatgaacaggatctactactttgtggagtttatgcacagcgagaagctgcctctggaaatatgaaacatgcaagacgagtattcgacatggcactgacttctatctgtggcctccctaaggttagtttcagatctttcggttatgttgttagcggagcatatgatacaaagtttcaggtttccacctatgtctctaattccgaggaacttctaattagctttttatgttaggtgtaattactcacactatattttttttattcaactttttctaagaaagtaaactgaaatgcattttctgttgatgctttttagtttcggtagagatttcaacgaattaaccggtcgggtcggattcgtaggcctactgagatgaagattgaatgtgttgaggtacatgtacatattaattacatttgcatacacaagacgttttatgaacttccccgcctcaataattaacttggggtataatagcaaattaaatttaagggaaacccatattaatctgaaatggcccttataagaaaacaaaaatctcaatttgataccctaatttgttttttttttatcggattaaaataaaagaaaacgaaattgttctttgaggaatttgttttgcccttttataagattaaaccccaaatcttcaaagacgctactctctaattcttaagataatctccagaatcacgaatctatctctctcgtttctctctaattcaattccaatggattcgcaagtccagttctttgaaggtgtcgaaaaaagaattgaattcgattttgcaggaacgaatctccgcgatgaactcaaccgagccgtcttggagaagatcgtcaaacctgtggagtgtgtgatcgaaggggttctttccggagatcacgtagactcgtatctactttcggcgtcttctctatttgtttatgatgatttggtaatcataaaaacttgcggtgctaccaaaatcttcgagtgcatcaatgggattgttgctgcggtgggttggaataagctaagatccatcaaatatacccgtgggtcttttttccgacccgatttgcagccatacccgcatcagcgaccttgtgacgagaaaagatgtgttaggctcgtccctaaatcatagttctcttggaggaattcaagagaagactttgggtacgactcaacaatggtttatcatgaatgtccctttgtcttcttcatctaccaccggcaaaaaactaccaacgattgagatgtgcatgagagaattggatagagagaaggctgcacaatactacaaagatagagacgacggcagaaccatgattgataagtcaggtatataatcataccttgattaatgtttcttgactgatttctgcttattgagtctcctgagcttatctttttacgtttcttgtgtttcgctctttgctaaattgtaaattgttgccgtgaaaagtagtatagttctctagtttctttctttctgactttcatattaacttatcagaattgtgtgacttttctcttttaggtgttgggcaaattttcccagaggctactgttcatgcccatgagttcgagccctttgggttttctatgaacactgtagaaggatttgcaatttcgaccattcatgtgtccccacagccagaatcaagttatgctagtttcgaagcagttgggtatgatatcagcacagatgagaagctgaacttggtgattgaaagggtcttgagctgcttcagaccaaagcaatttactgtggctatctaaaatggtggagagatttacccccaacttcagggctacaactgtacggaaaaattcattctcccacttggcccaggtggtccagtctccttttttacattcttggctgtctaagtctctggttctttagttaggattcttagggtttttttggtttattctggagtaattcttagtcttctgttttgtttatgacaatttgttttttgaaaatatataaatggaagattttgacacattgagccgtttacattacagcccacattctgtagattcaaagaattaaaagtaattgcaggctgcagagcatgacatgatatgattaagttatgaacaaatcatacgaaactgaacaagtgaccaatgaaacaaaacgctaaaacacatcaaatagtatacaacaaggtctcaaatatttccccactgagaagacttttcttttctgagagggattcttaagagcttcagatgaagaagggcgtttctttggatc

SEQ ID NO: 433 - DNA, 27194 bp, Arabidopsis thaliana
aacatggagcaagtgtgctactctcctgagatattagaaacacaaacctattacaccatttcgaatcaaattctacaaccattactgattccggcggcgagcaaagccaattctgacggtgaagagaggcaaaatctgggcacgagcagccgcaaatttccaatcaaattattctcagccgatctcagacgccatgactggaacgggacaaaagcttaacatccgacgacgggttggagaggtaaattctttgtctttttgttgtttatctccgacaccgacaagcttagacgtcaaattcatagtttttctgttgtgttgtgttgatgattatttctgccttatattgaacattcaatacccttatgaatctgtgttctccttctgtagtgcacctgaagtggagaaaacaatttgaatgaagcagagatatttagttaaatctgatggtagtgtaggtgttaacggatatgtttgtgaagtgatgtgcgacgctatggctggaaatacgaagatgtcaccagtggtgactcaccactgagctccaggttcttcttctttcctctcattctctccccatctgctttccacttttttgcaaatggtcatacatcttttatttggcctatttttcagaaccggtgtgtaaatatgatagcaaacttgttccatgctcctgttggacaagacgaggctgttattagttgtggaattgttgcttcatctgagtctgctggtttagctttcaaaatgaaatggcaacataggagaaaagctcagggtctacctattgataagcctaacattgttactggagtcaatgttcaggtctaaatatttacttattcttatcctccaaaccatcacatttgctttggatagtgatctgtttctttcaaaaatcagtacattttcaaactttgtttcatccgctcaggtgtgctgggagaagtttgcaaggtactttgaggtagagctcaaagaggtgaaactaagtgaagactattacgtgatggacccagctaaagctgtagagatggtggatgagaattccatctgtgttgcagcgattctaggatccacatttactggagagtttgagtatgtgaagctattgaacgatctcttagctgagaagaatgcaaagacggcttgggaaactcctattcacgttgatgcagcaagtggaggattcattgcttccatgggtgaagagtatcaatgtcagtgatcataagtatggacttgtgttttattgttccgtgatcaccaagctaagagtcatcaacccacaaaccataagcaaccatatggttggtgtaacgacaatttgcctccaaatgaaatagtgacagtttcacaaatgccaatatagcttaatattaatgcgtaaagtgggaaaaaatatttttagtgtcaataagcccaaatatattaaacttttagtatatatattaaggggcccaaaatgtttttccctagggccctaaatatcgttgggccgggaccttactgtactacttaccactacaaccgcagaaagcagcccaaattccatgtatgtttcattttctacttcatagtcacaaactagcttgagagtcaagttaatgttgctgatacagagtctttcttttactctctagctagttccatatttgtctgtatgatggtgctaactgctaaaggttggactaggcgatttgcttcatctgatcacatgtacatgtaaaggcagatatatgtctataactatataagtatatattatgctaataacgagatcaaacgtgatcctttttttataacgaaggaattgcaaggagcttgcaagtaacgtttgtcaagaatctccaaaaaagataaagcgaaagataaaaacaacaaaaagaagaacgtccagaaaaaagaaagaaagagagagatataataatataagtaaagaaaattttaataattaatcaatctagtgaccatataagttattaatgtatgcggtcaagaaagaagaatatatatatatatatatatatatatatataagtttgagtaagagaagataaatgaggtgaagtcataagtacgtacccaagtcccaatattgttaattgtctctgagagttataatggctccagtcggattacctccaggctttagatttcatccgactgacgaagaactcgtaaactattatctgaaaagaaagatcaacggtcaagaaatcgagcttgatataattcccgaggttgatctctacaaatgcgagccatgggacctcgcaggtatgtatgttttacatttttattacattgttcaacaactatatataattccttgttcttggcgaatagtcttatcgccgcgctatattgatatgaactgatttttagttgttgtgatcgataaataaaactgtagagaagtcgtttctaccaagtagagatccggagtggtatttttttgggccacgtgaccggaagtatccgaacgggtttaggacgaaccgagcaacgagaggtgggtactggaaatcgaccggcaaagatcggagagtgacaagtcaaagcagagcgattgggatgaaaaagactttggtttattataaaggaagagctcctcaagggatccgtacggattgggttatgcatgagtatcgtctcgatgataaggattgtgacgatccctcttcgctccaggtaactgatcgttctttcatcactcgatatctatttaccaaatgatagtaattagtaaatatatagttactaatatgatcaaattgtaacttatatagaaacaaaaaagataattacgtagagatgcatggctactaaacaacaacaacaaaaaaaaagtaaccaacttgagatttctccatttcttatagtagatacgttaatagaaagatatgtgtgaattttcatatactttttaagattaccctgatttaatgatacatattcgtttcttgctgtaagctgacaaaagcttagggtttcgctttggatctttactgcgacgaagacaaaagctatatagaattatttttttcttcaagaaaagctatatcttattcattaattgttcattatataagacaaatattcatgttcttttttttttatcactcatactcatgcatgcatgttcttttatttacttatgactttcatatactcgaatgaataccagaagatatttattcaagtatatttaaacattctaagattgaaaatataaatggtttgctgcaggactcgtatgcattgtgtcgggtattcaaaaagaacggaatatgttcggagttggaatcagaacggcaattgcaaacgggacaatgtagcttcacaacggcgtcaatggaggagatcaattcgaataacaacaacaattataataatgattatgagacaatgtcgccggaggtgggagtttcctccgcctgcgttgaagaagtagtcgatgataaagacgattcgtggatgcagtttataacagatgacgcatgggacacgtcatcaaatggtgcagctatgggacatggtcaaggggtttattgactaaagaacaaagagtatactgaggcaacaagagaagagtatagaattattgggcaaataacgtaaacatttaggtacactattgttgtacttatatataatcgttgaaataaaacctgcgggttgttggggtaaaacttaactgatttttttctttctaattgttggaatgtgtgggaaaatcacgtgatttgattggatattgtatttttttttgtttttgtctttgtttttcatactccctttttttgttggattgatcattttattatccattgatttgacggctctatggatcactggtacctttgttctttttcctcacatgggtattaaccagatcaacttaatggattgggaaaatttgggtttatacttttatttgttctcttcttcttttttcaattatacaataacgtgaaaaccaagtcacactcaactttataggtcagatatttgttgtcagtgaaatttggcaactgaccataacgacaatcgatagggaattccaacagacatccaatgtattttaattcgaactttaatgtatggtaatagtctaatagaaaaaatttaaactattatcctattttaccaaaaaaaaaatcaatgatcatatattccccaagaatatataaaaaaagtagtgaaatgttatcaaaacaaactttaatcatatttttttggatggcttctctatattgtataaaataacaggactaaacaagtaaaagcagaaagtgaggggtttgatgaagtgtaaatctaagattctgatttcactctcttacaaaaagaagatcccttgccttgcgatcaaggagattggtctttctttcttttcacgcatctgtaatacttgcgatcatctcgctttcctctttcacactttgtaaattccaataaccagaaaagaacatcactacttatacatttcatatccctttaacaaaactatctatatatatgctcagcttcaactttgaaaatccgctcgacatatatatgtttggcgtttacaggtacatcttctaatgtggaacttctctaaatgtatctcctaatatgaaatttgcaaaatgggtctttaaaacccttgacgtgataaagtgacttgtatgttcttcttatcttgtagatataatttatgacaaatgtattgttgactgattcttgaacctctgcgatgttgtaggcctcttaagaatgaacgttttgtctaatcagaatctcaagaacgtttgtctcactacagtcctcatctacatggtttccccaaaataacgtttcgaaagtataactttgttttaggctgattaaaatatgatactattaataaaatatgatactattaacccaacattaagaaaaaagttgtaaaaaattcaagaaagctcatgtactatacatcgtcgtttattcagagcatataagaaatttaaacaaaatcacctttcaaagaagggaaaaggtattatagctgctctctgtaacaaggagagcagaaattgcttttaaacttgatgtgattcaaaaggaaccgagatcaaattaggaagatagacacagtaagaaaactgaaaaatcccagaattgatctgaatcttcttgaacatatctcccctcaccatatagatgcaagtagctccagttttgtaatcgccacaacacatgattatggtcttgtcaaagatgaagtaagtaataccagaaaattaatggaatagcaagggaaagtcaggtattgacagtgtcagtaagtgtaaccacaccacgtcatccttattactaatgttaatcttgtcctttgttacccaaatctctgtattcatatacgagtttgctttaacaatgcaaatcgatcgcccttaaatacagtgatgacaagtttatctagtgagccagaaacacttctcacaaggaggcaaaagagcatcgatatttccgtggaggaatcaaagcttccgagaaaaatactcacgagtctcttgtaagcagtccaatacaaatttccgttcaaggaaacatattcacttaaacctgccaacattggccaattttggggagtcaatgaacttatcgagtgagacgcacactcataaatacttaaatgaacttatacttgattatttatagaaaatcacgtttccatattacaacaatatttgttagttgacacttaaatgatctcatccctgcataagcagaatctcgtagatatctgtcctaatgttcagttccttgtcccgcatcacttcttgtaaatctgacatctcttttgccgtcaagactgatcccagcttcccaaacccatcgagccatagtttcttcgacctgccatgtcattatgttaagaattggttctcagacaatatgagaaatctggagaaagaactctagatttttcttaccatgggcatgcatttatagctcggaaataaatccttctagctgctgatggattgtccgcgatgtcgatctcatatgctatgtagcaacgccatagaataactgagttgttttgtgtatcttgtgccaatgccctttcaaacaatccgcggattctgtgtgatgagcctcctttactcaattcataagaaagtgcaaatagccaaacaacgacagacgaattcctgcatgattagatatactaaacttgcttagcactgaaatgtcgatatatataaaccttgttctaggaggaaggccataaacatgtaactgttagtctttaaccatttaagctaagcatctctatcaacattaggcagtactcctgagatcggagggtttcttattaacaagtttgtgaaaaagcttacttgcgggagtagtcatcgaacatcattctcagtttatgggatgtcatccggtgattacaaatgtccaccaaagctcgataaagttcaggattgagaggatacagttgcagtccctctgatatgggcttccaaagttgtgacaaagttagatcgtcctggtgtctctgaagcattctcacataataattgaacaagagttcaagttgatgactttgactttttcttcctgaaaaattcacaatagcccaaattcagatatacagtggatacatgcttttaagagaaattcatatggaaaatagtaagtgaacccaagaatactgatcatggaaataagtaaataacctggaagaacagaactgaacatgtgctctaagatctcaagagcaccaggaaggtcatttgttaactcctcaaatagagctgccgaacaaacaagcgctgctgattgatcatctgtgacaccatgagaccatgttgattgtatcttcttaagcttctctctgaacccctggcgtgctctaagaatttgcatgcttgaagactgggaagtataaggactataagctagaccacttcccaggtagcacagaatatgcatagcacgagatgatgattctgtatccctaccactgccgctactattggctacttccgattcagcataccataaacatagcaaaggagtgttacactgtaattcctgcaatcataggtgaaataaatttagcatggcttttgcaatgtcataaaaatccaaagaaagcacggaaattgggctagatatatccactaggccatgcttccctgtacattaccaagaagagactgttctataacaaactctactatgatccgtccatgagagagattatcttgtccaaactcaagtggcagtgccccagtttttgggaccagtacgcgataatttgaatcagaaataaacacaaaaccagggttactgatccagaagttccttggaattagaaacatacgtggaaacctgaaattttgtatcatatgctaacaagtaacaatataaccaaaagatctgaaactaaccttagggaggccacagatagaagtcagtgccatgtcgaagactcgccttgcatgtttcatatttccagaagcagcttctctctgtgcataaactccacaaagtagtagatcctgttcatagagaacgaatcagttcagataaactgaacaaaaaaacacatcaaaaaattggaatggggcttacctgccggtcacttttcaggagacgtttggccaaagcttggcatggcatagttgctacctcacatgttttcatatttgttacaaatagttcttctgcaacaagcacagcttcttcgagaatgtaatttcgcgggaaaacatttagacaaagcaagatggcattgcggagaaacttcatcatctcagtccgcatagataagtcacagctgccacctagaagagatcccaagctgaaacagttggcactatctgatttcgacaaacattcatgaacacttctcaagttttctaacatggaatctgaaaatgtttcaaggctacttattttctcactccacgacaaactgttgctggaagtccatggggagatatgtgcaccgaagaaatcaatgaactggtataccagagataagcgggcctcctttgaacgtaaggaaaatagatatccatttatatcttcatatagtacaacacttgagagttgctcttcatcttctccctcacccattccctcaacactggagaattcacctattaaaggatgatggacggttaaccacatgcatgtttacagtcttttagatagattacatgtcaacaataccatcaaacatatctatagagactggaatttatttactaatgactctggaatgacaaagaaggctgagcgactagtcccagttggacaaaattcacccaacagacacatttagacctttgtaagctccaaaagaaaagatgaacaaacaatacagagataatgatggtaaagatagagatagataccagctttccgagtaggcatccattgactgtgatctcgagaaacctcttcttcaaaccatttaacccaagttgatgtatctttaacctcatcactggccgcagtattgacatcaatgcccaataatttcagcatagcttcggtgtcatcttcaggtttgctattctcgtcttccatttcctcatccagacccttccgatcaacatcgacctctccagtgttagctgaagcaatatcatctccatttctacctgagacctgttctgtccaacctgtccaaccacctacttcattgtcatcagaggattcttctttcaaaattttctgcctgttttcctcctctttctccagccacaataaccatccaaaagctccttcttctccaactctagcaccattactgctccaaaagtgctcaaacagtcgtaatttactctgttcagttagcaacaaagatggagaaaagatgctaaattccacttcggcttgaagtaacgctgtggccagctcctggtaaccagcctgccactcaaacctgcagaggctaactagcatatcgactagaacgagttcctgttggatggcagcagaatccaatggttcagatgttgtatccacctgcataatccaataaatagaattagaccttacaatgtcaaactgctattaatgagaatatcaataatgccagcgattaaagatagtggggaaacaccaaacgacttgtgacagtaaacagtacgtaatgaagtgattcatcaacccttatcagttagcaccataaaataagaacctgcctatgtcgcttgctgcaagcagaagaaagagcctggatcgcataagaatacagcctcctcacttctgatactttgaatctggagaactccccttgaacaacacataaaaactccctccataatttgtagcttgcggaattctgcataagtgccttttcccacctactgattagtacatcagcgttgtctctgcttcggtatgccttgagcagagcaagcaacagttcttcgctatctgggttcagctcaaaagccttctcaagtatactaatctttttctctaaagtctgcaggcgaactcctttctgagattgcatacttgaaaccttgtcttgaaaatcagcaaatgccagccatgcctttgcatcatggggacgttctctcgtcactctgttgaactcccgtgttttattcagcacttcatcctcccatgatgctccaatcattgagtcctttgataaaacatcttcttcgtcactttctggaacagtcacgtcttcctccagtggaatgaaattatcaaaggaagaatccacagcttcacttgcagcagataaacgaatacgcttgaaattcttgttgcgttccatggcagcatgttttgcataccagtatcgggtatcagactttgctctcccctccaaagaatcaatatcaatctctgtgtcaagcatagaactacgtcgattccgcaaataaaacctcagagaacctgaccctggaactctctgagaattgtcaagtttataacgaggaacattcatcctgtattatgcaaacagaagcaaaatttcaatatccctacactcttaaaacgccttgcacagaatacagaaaatgaaaccaaccataactagacaaattataagcaaagtacctgtaaatagagccataagccagattatctggatcaggacgagtgtccaagtaataatccttcacaggtttcgaatagtattcatcagatttacgagaacgagattcatccgaagcattatcactcttccgtttcttctttttctctcgcttcctctttaccttgtcgtcatcagactccaaagacccttcttcttcaaccaaattataaaccctagcctgattagctaaaccgatatttccatcagctcctccttcttcatcttcgtcgtctccagcctcgacctcggatgaggaaggagccgtcgaagcggcagcgttgatgacagagagatccgtagtgaagctagcgttgcgaagccattgaggagcattcgaaatagctgagatggagttcgccgaagtagggaagacggggaacaagccgcctgtagttacctgtgctccgtcgccgtcttctggtgtattcgacattacatccaccggaaaaaacaaaaccgattctgtattttttttgtgccgctatatatttctgccaaggatcgtgaatactgaataggcctaattattgggcctatataaataattaatgggctctattaacattgaaagaatttactcattgtttaatgttcaacaacattcgaatttgaattcgaaactacataaccggtaaatatttattgattaattattacgccatatttaattttactcgttaattcgttatgaaaaagtacagcaaaaagtataaaaaccacgtgcaatattgtaaagaataaactaaaatttgtgataaatttaggacagtctaataaaaattggcaaaagtgtcattttgcttttttatttcccaccaaaactaatgattttccatggatccaaaggtaaacacattttggagaaggtaaacacatttgttttggagaattccttcaggcgtaaatattgcttttagcggtaaaagaggctcaatcgtggcaggaagctcaattcgagctccatagtgaaagtcatggttctttgtctatagataatcgaattcgggtgagggatgtatcacaagatacaactttttctggctatcggtgttttattgatggatcttggaaagcaagtgaccagttctcaggaacaggatggttctgtctatcatctcttggagagtcgccaaccatgggagccgtcaacgttcgtagaagcctatctcctctacataccgaaatggaagctcttctttgggcgatgaagtgcatgattggagcagataaccagaacgtagctttctttacagactgttcatgtcacgtatgtaaacaatatcccggattgactcttttgagttttaatttatatcggttgaaaaaaaaaaaaaaaaaaagataaacacatttaataaaaataaacgaaaaaataaaataaaaattggcattattatttgcgcattggtggcgttgataatgggatgtccaaggaggagggaagcgccgggattgcagcataagcaaatttattaagacgaagaagaagaagctccattagattttgcagaacaaatcaaaagaacttcaacaaggaatattgcaagaaattgattgaagctgctcgaattagatctgtaagtgaaaatgattgctcgacttcgaattctgggttttttgttttgttttttatggggtaatattcatgagagaaggagaatatgcttttgttagggttctgtctaacgaattttcgtactagtcactaagttgcttaattttatctttctgggtttttgtttggagggaggaattatttgagattcgaagaaataaatcatggagtttctgtttgtgtaaatgtttctcaggttttgtgaaaatttgtttctagagatttggggaaatggaggattcgagctctatcgattcgattttggaatttttgcggaagaatcattttatgagagctgaagctgcgttgattagtgagctttctaagaaaccaagttcaaatgggtctcttcaaaagcttaactttgaggataattgtgtgagcaagttgttggataagaagaagcaaggcgggagtagccaagcattgggtcttcacaacgatagtcacatttctgatgaattggttgtgaaagagatacaatgtggagctgccaataacttacacgagagtaatcttatgaatgatgtttctgttcagacacaaagtggtaatgcagatttttgggaggagagattcacgtttgctgaaggatttgaggataccgagctcgatttacctccctggaaccatacctctactgatattgtagctgactctgaggaatacagtatcaatccaagtaaaagaggctttgtgaatccacggagttcaaagcaatcaagtcatgaaaaggttcctgaacctggtaaaagcaataaagtggttgtggaagacgtcttctcttcttttgagaagatacggactggaagctctagccaggtatctcagtatgaccatggcaaagcatgtcaatctctggaagttgataataaggttgggaactctgcaatacaagaaggattcgtcaccacgtcatggtcaagaagcgaagagaacattggtgcttcaccagaccattggaaggattgttctgttacaactgtttttccgttgtccaaaggaagcacgtcaacaaaagataatggtgtagccattttagataaatggcaaggaaagaaactggttggcgcgagtgattccaggattcttatcaaggagcaggaagatgatgtggcaacagcgctataccttgggaagtcacagtctggttatgaacataagattccaagcagcttagcattttcgctggctcatgatgctccgagggaagatttacctagactgccacatgtaaaaatcaagtcagaggataaactaatgaactttacttgggaagaaaaacacgagcgagacatattggacgagaagctgattaatactgataatgctttcctattaggctcttatctagatgttcctattggacaagaaataaattcatcaggttagttgacatgatgatggctaccatccaaatcttaaaactttatgttctgtatgagtaaattatgttaccattggctagcttttgcgtacaccttttcttttgttttttgcaacctataacttaccttttctattgtgatggtgtcataggtggcaaaatggctggtggaggaaactggttgtctgtaagtcacggaatagcagacgatgcatctgacttgatttttggctttggcgatggcttaggtgctctcaatgaacattcaaatgagtattgggactctgatgaatatgacgacgatgatgatgttggttacattaggcaaccaattgaggatgaggcatggtttttgggtcacgaagtcgactatcctagtgataatgagaaaggcacagagcacggaagtgttcctgatacgcaggataaaagtcaaaccaagaatgatgatgatcattcatttgccgaggaggattcttatttctccggtgagcaatatgtactcgctaaaggcattgagccagttactgcttccaatgatccgatgggtctctcaatgactgaaacatacagcacgaccaagcaagctgatttggttgctcgatatgacgggcaattgatggatgcagaggagctaagtttgatggacactgaacctgtgtggaagggatttgtcagccatgaaaatgatgtaattttgttgaagaaagggaaagtcgaggacaactctggtagaatctgtcggaaggatatccgcgcagaagatgatcgaaatgctgcagttaggtcaattggtgtaggaatgagcgatgatgttgatgacaatgggagtataatacctgaatactttcctggagaaggtagtgaatgggatctggagctccttccttatcgcggagttggagttgctggtgttaagcctccacctggtaaaggtgcgagtatgctgcttaaaaactttgcagatggtggattctcatttccctctccagtagctgatagacagaagtcccaggatgattctgcaaaccctgaatggtcaaaccattgcgatgctgttgtgagaaatgaaagtgatgaaccaaaggggctaatccagtccgatagcatgattgtctcttcgacaaaaagatgcagtggctcttcttctgaaagaaatttaagagacatggatgatgaaaaggttgcgagttcaagaaattcttccccatccgcactctcccatagttctgatactgggagagagcacaaagaagaagatgaggaagaaactagtcatgggcctgaagaagatcctgggacctcgttcgaggatgaggatgccatcgtggtccaagagcaagtaagacagattcaagcccaagagcaggattttgagaccttcaacctgaagattgttcacaggaaaaataggtctgttcccttacaatatcgtggtttattatgtattaaatgatgtttcgtacacattttgtttagaagggggatgaagtctgtcccgaatcttgtgaaccctcaggaaatttatttgtttcttctatttgtcttctgttgcccaggactggttttgaggaggataagaacttccatgtggttttgaattctgtcattgctggtcgttaccatgtcactgagcatcttggatcagcagcttttagcaaagcaatacaagcacatgacctccacaccggcattgatgtttgtgtaaagatcataaagaacaacaaagacttttttgatcaaagccttgatgagatcaaacttctcaagtatgtcaaccagcatgatcctgctgacaaatatcatctccttcgactgtatgactacttctacttccgggtaagtagatagatgcagaattgtatctttttcttttcaacaccgggtggatattctgctgctttggtgctatgatgtatcaattgttcgattcagtaaagaacatgggacgtgagcctacatcatgatgccattgactgtgattaattggaatctcagttttgcaggagcacctgttaatagtatgtgaacttctcaaggcaaacttgtatgagttccaaaagtttaatagggaatcagggggagaggtttatttcactatgccaagattgcaggttagccaacatctttactactcatcagttttatgtatgttttcactgctctctcattttcttctaaatcaaaatattgtgcagtcaattactatccagtgcttggaagcattgaactttctgcatggtctcggccttatacactgcgacttaaaacctgaaaacatactaatcaaaagctacagcagatgcgaaatcaaagttattgatctgggaagtagctgttttgagacagatcatctttgctcctatgtccagtctagatcctaccgtgctccagaagtcattcttgggcttccatatgataaaaagatagatatctggtcacttggctgcattttggcagaactatgtaccggcaatgtaagttccagcatcgatgataccagttaaaagctttataattatataatccactaagctagctaggaccctataatgtaacttgcgtctgcttttgcaggttcttttccaaaatgattctccggctactttacttgcaagggtcatcggtataatcggatcaattgaccaagaaatgcttgccaaaggacgtgatacatgcaagtacttcaccaaaaatcatttactatatgagaggaaccaggtgcgtattgaaaaaccaaaaagaaagaaaactttactatatagtgcggctcacagctattactcaagcaatttgtaatggttgttgaatctgatttcaaactaatgtaatgggtttgtgtttctaatacctcaggagagtaacaatttggagtacctaataccgaaaaagtcatcgctaaggcgtagactaccaatgggtgaccaaggcttcatagactttgtggcatacttgctccaagttgatccaaagaaacgcccgtctgcatttgaagctcttaagcatccttggttgacttatccctacgaacccatatctgcctgattctgtaggtgcaacaaaagcagaatggatgagagctagtcaaggaagaagatgatggtttgtttttcagacattgttttttgttgaaaagtctgctgagagtgaaatctttcagaccttgttgtatattaatttgatgtgtgactattgctcatttggtctcagcattttgtttcactggtagcttgtgaaatatagtcccttcttcgattttgcttttgccacatgctttgggtatttgattatatgattgtagccggtgatattttgcagctaatttttcgtttacgagagtgaacaatcctacaactactagtactaatgacaagccactctttctgaaatatattttgttataccatcaatataaataaaatatcaagaaaaaattaaaaccttattaccgccaaatggtctaaatcaaaaccttattaccatataagtgcaaagaataagacttgcgcttagcagacaatatttctcttgtgttccacaaggcgtttccaatacttagtgatatcctccaaggacatcttggcagtcttcactttaacttcttcatcatcaccactaaccgctgcagccgcagcaagatgtgcaatcctgctaggaagcccttcaatctctttcagcacctgaatgatatgtgtgatgagtctatctgcaaggcctcggctaaagtcttctcttatcacaactctgagcacagcaatgtgctgtgcatctgcaggcatagtgtaagccggtatgatccacccgaattttctcaaagactctgcgatctcaaacaccgtgtgcttgctactgtctttgagagagaatgccactagtggcacgccaatatctttggacacaatgttgaacttccctgtcatctctattccttctcttagcctccttgcgttatccatgcagttttccattatgttcttgtatcccttttccagtttccaaaaagaatcattagattaagcaagatgaaaaaatgaaactgtaatgcagataagggaacaagtacctcaaagcctagtcggataaactgatagtactgagcaatgatttggctcgaccctgcaaaagaaaacattgagtttcttaaaggaaatgtgatgatggatttgattggataaagccagtttttattttacaaaccttttgagaagttgagagtgaaagtgggttgatcagctcccaagtagttgatgtggaagacaagttcctctggcaaatcatcttttgttctccagacaacccaaccaactcctgcatacacaagtccatacttgtgaccactgacgttaatactcttcacccatggaagcctaaagtcccattcaagatcagggtagaggaaaggagcaatgaatcctccactggctgcatcaacatgaataggagtttcccatcctgtctctgcgtttttctcagctaagagatcgttcaattgcttaacgtcctcaaactctccagtaagtgtggatcctagaattgctgcaacacagatggtattctcatccaccatctctacagctttagctggatccataacatagtagtcttcacttagtttcacctctttgagctctacctcaaagtaccttgcaaacttctcccagcacacctgagcggatgaaacaaagtttgaaaatgtattgatattggaaagaaacagatcactatccaaagcaaatgtgatggtttggaggataagaataagtaaatattttagacctgaacattggctccagtgacaatgttaggcttatcaataggtagaccctgagcttttctcctatgttgccatttccttttgaaagccaaaccagcaagcattatagcctcagatgaaccaacagttccacacccaatagcagcctcgtcttctccaacgggagcatggaacaagtttgctatcatatttacacaccggttctgaaaaataagccagataaaagatgtatgagtctatgacaaaacagtggaaagtagatgagagagagaatgagaggaaagaaggaggaacctggagctcagtggtgacaggatattcatccatatcaacatagttcttattgacagaatccatgatgagtttgtcacactcaggttccatccaagtggtgacaaaggaggctaggttaagcctgggattaccatcaagcatcaactcatcattgatcacttgataagcagcatctttgggcatgcaatggtcaggcatcttgaacctgtttcaatatatgcaaacagatacataaataattaaatatataacaatgtagcatacaagattaaaaaaactaaaatgaggcaaaactctctggaacctgggaacaacagcacggacatatctagaagcaaaagtggaatgcaaatgctcgtcggagtcagagttggttgcgagtaccattgtgtttgagttatgctgaattgttgaacataaaaatatactatgtcagaagcttttcacaaatataaagaaagtaagaaagcaaaaactctcttaacactaatttaagacattcatataactaactccccccttgaccctctcttccccttgaattggggatttggtacattatttcaacaacttattattgtcctcaaacaattaaacagagaacaatatcagaatcactgcatatttatttcctgatttgagaccacatgcacaaatcgatggtcaatctgtctcttcttcccaagatcatagaccagattataccaaataccatctaaattataaaatattaatctcactatatctcaaatacccgacagacatataaagttggtcttgtgaataaaatacctttggatcagaaagtttctacgtactgtattgaattacgaggaacgattacaacagattatatacgtcttgtgatatatattgagagagataaggagctacaaagattcatgtttatctcctggctaatatccatttagatatttcagaatatatagaaagatgctaatgttatttacgtaccgaaatttcaaaaataatatttcaaaaaaaaaatagcggtacaatgcttaggaaacacttttgtcagagtcgtttaacgtgcgtcagagctttcttgtagtacacgtctcatgctgattgggcaaattgaacaaatcatatgcagagaatacagatgatagggtcttaaaaagatggaacaaatatgtgaatttttgtgattattattattactattatatttattttgtatagctcgcgagttagctcggtttatatatagaagatcaaataaggtaaactgatctagctcatctaatgagctgagtttagttgagcgacacccttacttttagaactacagaataaacaaaattaagaattcaaaataccaatataagtcttgttctctctaggaagttctaaactctcacagtattacgcaccaccaaaaaaattgcataaacggagagcgccctcacaaagtcagacatcttttaaacgtacatacaccagaatcccaattcgtctatccgggaaataaaagaagaaactccggagaagggatcatgacgagccctcatactgctcctttacggctcttgctgccgcattgtaccatcccgctgctgccattgcacctggatctggaaccgttgcaagattctctgcagatacatagcttgatctcccagcctgttttacacaatctcatccgtcatttcaaaatatgaaaaccacttatagcataaacaatggcagaccgaaataatggtatgctaaactcacctgtgcttgcatctgtatggttgattccgctccggcagttgccgcttcgcctgatagaatgaaagcagatattggatcctctccagcgctcagtttctgttcttatcaaaagcaaaaactcattactacttgcgcaggttgcaattatctaaattgtgaaagaaagtaagttgctctttgtcacctcctcaagaacttgtgaagctgggatgagcgcatctagcatcgttctgtagcccgcagttgctccaccatatttgctgactgaagcgattgatgacttgagtgcttcagaccctgattcaatataacgttgagtgtcaaaacgagcatgtcccttttagaatactaactaaccacaacaagcaagcatgatctcacaatttttgggagtgacttctgactgagcgttagcttttagctccgcgtatgctgccttgcagaggagatggtaactgttttcacaagagagcccgtaatgtcactttaccaataaaacccaacagcatgagctgtctataacgaagaaaatgtaaaataatttcatgaattacattattccgcttgtgccccccatggctcttttgattgatagaccaatctcattcactgtttccgcagcatcattgagtggataactagaaacaaaaagagacatggttaaattttttgtcaagaatctctgtgaagtctgaagaactcaacataaagagaggtatatggggaagtgagagtatcaaatggactcactagtttttcatgtcctccagaatagctgttgcacctctgtacatctacaatattgatgcaaacccatgtaagataataatactaaatgaacataatataattatgcacagtagcaagtagcaacgtctaaaaaacaagacttactgttgacccacaatcaccatcgcctacttttccatcccattcattcaaactatccttaaggctgatgatcacagttgctgctgcttgaatagctgcctcaagaacttgaccttctttactcagctctagaggtcggctttgagactggtattgccaagttgtcatgaaatttaccaaaaccatttatcaacaaaccttgatacctctaaacaacctatctttatcatacttgtgatgcatacctccatgctttttattgatcgagaaggaggaacaggaacaggaatcttcgctggtggccggttgcctgcaatgcaacaaaaattttgtatctaagactatattccaaggaaaaaattcatggaaaaacagaaacaggttcaatctcacagaccatcagtgccaactggccaatttggagccttggttggagcatccaatcggtctaaaatcgaatggtcagccttcatgattgaaatcgagaatcctgggaaaagaagcatcgtcagaatgataacaggagtatgtaacacttaactaaatgaagaaatcgacagaaactcacctgccatatcaagagaagtcataaaaaagcctgtatacaccctatcaacggcaagtccaaattccaactgcagtttagggactgcttttccagcagcaatcataagttccattaaaggtgtgcctcccaaactgcaaaatcgaaaaggagaaactaagttctcccctaacaaccaaatacacagaatcattgaaccaaaattgatatcacagcagcagcatttggtgcagttcaaattatggagtaaatagacaaatttccgtttaaatagtaaaatacatctagtgtggcttacccattgaccatgagaaccactctgttaccacgagtaattggaacataattggtctcctgcagaaatggaaaaataattggatctatatgactgaggaaacaagacacttccataaagatagcacatataagtacatacaggactaagtatttgctgaagaacatgggacaccaccacatccacaggttcaacgtcaaccacagcagcaccaggttctccatgctgagagaaaatgatacaagatgtcaacgtacaaaccaaaacactgaagcaaagtgaattagtgtgcaaactcggaaagatagaaaataacatacaattccaagcccgagttccatcttctgtgcgccaagacgatctgatgtaacctgtccaggaagtgtacagacggataatgcaacacccatggtaccaaccatctctgacgcacattttgcctcagcagcaactttttctagagaaagaccagcagctgctgctgcccccgcaacctaccatttgccaagcagaagcaaacaaaataaactgatgcttgaagctttatgttcagaacttcttattgattctaagctcgtgaagacaaaacaatcaatcaaaatatagcagcccaaggtctcagacatcacaatttgaaaagatacagtaacaaaaacaatatcaacgaacagtaactgcatactaaagacactgatttagagtgtggttagagaaagggagtaaaggacgagagaaccttatggacaagaactgttcctgctaaccctctgcgtccagcgatgccacgtggcgggggtaaagcgcaatcctctccaacaattacagtctacaaaggagattctattattcttctggcaaaaaatctcaactgtgaagtagcaataacgagcagtacctcaactttgtaaccttcagattttgcttgttcagcagccaaaccaaagttcaagcgatcacccgtataattctgtcaagagagatgatggggaaactagattaatcaaaaaagtagagacataaatctatagttcctctgcaacaataaaaccatatgtatgtggctctctttcccattctcactaccttgacaatcaatagacatccctcagtaccagttacagctcgaattccctggaattgaacaaattaatatcatccactcagaagaaaaaaggagacaaaaccccatttggaggactcacagcaaggatagaatcaactggtggggaggcaaagacatctccacaaatagcagctgttagcattccttctccaacgtatccagcatgtgctggctcatgcccactgcctccacctgcaaacgaaagcggcattgcttataagagtttcagaactctacaccaaccacgtaataatcagtcacaaaactcttacctgagataacggcaaccttgtcatattttgcagccgagacatcagctcgtagcaccaccttaacctcaggaaaaccatccaaatactggagtccaggataagtttctaccagaccctctatgaactcagttacaacatctgcaaaacggaaaccattctttattccatcaattctcttaatacaagagtcacaagccgctagttctctaccaagaggatgttaattgcaattccatgcggaaattataccctatgccattaaaatcatgacatcgtcttgaccatgcaacgaaacacaacggtgacgaagcagattttcgaggatccagaacaaaattggggggaaaatgtggataaatagaccaaggcgaattttatgagcaagagactcgcaatgcaaatcatttcgcaaacagtaacacaatcgggaaacaaaattaacataggtcaacagttcgccagagcgttcacaattctaatcgacctaatctacgccggagaaagtaaaatgtcggggatgcgaataacagagaaacgcaagaaaaaaaaggaaggaggaagacgaagaagaacgaaccgttggggttgttgatgaatttcttggctgcgaaatccataattgcgagtattaagccgctatcaaaacctgagaatcggagaagctcgcatgtaagaggagaagattgtagcggaaggtttaaggaaacccagagagaaataagagtcaacaacagcaacgcgtgagagagaagagaaaggagcaagaagaagagagacgcaaatgggagtttgttccgtacgagaaaccccaaacttaaataaatgacagttgcagaactaatatgggccaggcccaatttaagtggataagattgattatgacgagtttgtatattactttattttcataggtttattacctaattagactctagatggtcactgtgtggtgaacacgtgatatgagtacgtcgtcgtgtgccacgcgctcgcctctgccgtgtcactgcgtatttgtaatttgtattggatgatgaaacttcaaatttttatttttattttgaaactacagttttaacattttattccccaaagagttcatcgtatataagtttttaacattttaatatacttttttcaaatttatatgttctagaagttgttttgttcaaagtttgaaatcaactttagacttcgttgaatgtcttgatttgcttcacatgtcgattcatttcttaaaatatcatattttggtatttcaaaagttatcctaataatgttttctcttctgcatttggtcttaattctacaacctatactatataaagtttggttattagctatacagtatgagttatacatgaatggtataagttcctaacatagttgtaattaggagtcatagctactttttaagttcgattatcacctttgacgaaccattctgaaacggaagttaattagtgggtctggcaatgaagtcaatacatggtcaacaattgggccgtaaaaaggcccatcaattattttattttttaaaaagtcaaaaccggccggcagacgctcacggcgtagatacgtggtcgacgcgcgcataatcacaaatcagaatatattgtttttggatcggaagagagatctagaagaagaagaagaagaagaagaagggggaataatggcattgcaatggctgattctgtcgtatgtggttgccgccgaggtagcgatcgccgtcatcttgactctcccttacccaatgctcctgaagaaacgcatcgtatcacttatctcgctcatactcaatcctgccgcttccatcgtcgccttcgctggatttcaactcctcggtaatcgcctctctatctctctctctctctatttcttagatcgtctaatttcccactctttttcttcgtctggatcgattataattaaggtttcgagttgggattaattttggtaccttttttttgttttggtaatggtttattcagatatttactggaagaatgagcataggctattgtgctcatctgaagtttgcactactacagagcgggatcgtcacgagaaatccgtaagttcatctatgaaacatttcacttatgatctttgatactggaattgaagcgagtgttagttcatacaacatttgagttctcagtagcagcattaccaattgcatatttggtcagagactcacagggttagtgctactgcttggtgttgatctcttctgagctcgcgtttatagcatcactttgctgttgttaagagctataaaatgctgcaaggaatcttcttgtggtggaaatacaagtttctttgataaattatgtgagaaaggaactgatgtcgtattcattttatgccctgttcttgtgaacttgttggcggttggttgttgatgaaattataccactccaattgtacctctttcctaaaacatctacccgagccttttcgatatgtgttatgtcttccatctgttattagcaacacatcaaagcttcagttccctgtccctaaattgtctcagttcagcttgcttactagtagtttacttgtgtttcaggtctataaggctcagaggaatggggttctgtgtgcggctgggatccttctctactggtacatcattcaactataactcacttggaactttgtatgtttagttttttactgatattctctcgtattcactgacaggtgcatcttccgcatctgcaagtaccacaaagaccttgagcgtttggagcaattagagaagagatacaaggacgagtagaaatcttcccaactgagagtctggtactactgttatagtatcactcggcgtgtgagtagtcccaaaaactgaatgagagcatgatttgatcttgagaaaatttttacacagacccttttgtgttaattccttctgcaacttttggtttactttttggaggaacaacaggctctgtttttcacgtccagaattcacctttacagattatagttgttacaagaaataagatttccttcctgtactaatagtagtgaaggaagaattagtggtccgagtaaaatttgcaaatgtctgtagattgacttgagagacagccctgccagagcaaagctgatctgggtgttctgggctttgatggttcagtcatggggctcatttatctgtttggtttaagtatttggcagttaactgcatgctggtcttgcttaaatcggatgagccgggtggaacactatatataggcccgtctaaagagctggagcggatcggttaaaatgtacattggaagtggaagaaatatgtttctgaagatctgtagtcaagggatcctctcttattttgtaaccacaagtccacaagacatgaaccccagaaacaaagaagtaaaccctatggaaccaaactccaaaggatccgagaactaacgtgaaagcaacctattcacgaacgtattgactagaccaaaacgactgttaccgatatgtgggcctgtatttgtaacggccctgaaatacagggatgttaaaatgggctcctgatatccatttcaacgtttttgacttgaactcaaaataactagagattacttactacactgaaaagtatacacagtgttcactaaaactgttaagctacgtgacgtgccgatatattagaggttgcagttgcttcgtccgctgctagaacttgtctgaaagtggagtatgtggtccaataaggaataccatctcgtgacgcaattgtttagactagaattaaataaatcacaacccaatcatgattgagcacataatgtttcccaaatatctcttagtataagatagtactaatctagaataatcgaaaacccttttaaaagtcatcaaagcacttttgaaatttccttatacgataattactaaaaaaatccacaattctattatttttaccgagaactcaaaaccacaactttgtgtttacttttactaaaaactcaaaaacctaaacttagggttttgtatatagatttttttagaattttgatattaccacaaacaaaccaaaacctttgagagattcaaaacaaacaaaaaaagaagaggtggatgtcagaatttga

SEQ ID NO: 434 - DNA, 74968 bp, Arabidopsis thaliana
gatccaaaaagaaaaaaaaaaacaaagatgcggctactggttggaatatccttcagcatctttaaccgcacctttttttctttttttctttatttttctttaaccgcatctttaatatttttcggtttaaaaaggatcatcgtctccctccttctttcatcatcatcgtttccttcaccattcacgtttctcttcttctcgtcacaaattccttatctctctctctctttctctcttatataaagagagaaatatacaaaacctccaagtacgtttcatcgatcctacctaattcatcaaaaaattgtgtgaggcttatttgatcaataattatgaattctggtcgtcgatcgttaatgtccgccacggcgagtctgagtttgctgttgtgtatcttcaccaccttcgtcgtggtgtcgaacggtgagcttcagagatttatagagccggctaaaagcgacggttccgttagttttatagtcatcggagattggggtcgtcgtggctccttcaatcagtctctcgttgcttatcaggtttggtcccaataaatcattcatggaatattctaataatattctttcctcgtacaatatggtgtaataaattttaacagtttaattaaatatccatttatttacagatgggaaaaattggagagaagattgacttagatttcgtggtgtctacgggagataacttctacgacaatggattgtttagtgaacatgatccaaacttcgaacaatctttctctaacatctacactgctccaagtcttcagaaacagtggtacagtggtaataattcttctaaaacccccaaagcttttgctaagttttaatatttacagaattctcatcaaatgtgattatgaatgatgcagttttgggaaaccatgactatagaggtgacgcagaagctcagctgagttctgttctccgggaaatcgacagccgttggatttgtcttcgatcatttgtcgttgatgcagagttggtagagatgttctttgttgacacgactcctttcgtgaaagaatactacacagaagcagatggtcactcatatgattggcgcgcagttccatctcgcaactcttatgtcaaagctcttctccgtgatcttgaagtttccttaaagagttctaaagcaagatggaagattgttgttggtcaccatgcaatgagaagcattggacatcatggagatactaaagagctcaacgaagagcttcttccgattcttaaagagaacggtgttgatctctacatgaatggacatgatcattgtcttcaacatatgagtgatgaagacagtcctattcagtttctaactagtggtgctggatccaaggcttggagaggagatattaacccagtgaccatcaatcccaagctactgaaattctattatgatggtcaaggattcatgtctgctcggttcactcactcggacgcagagatcgtcttctacgatgtctttggtgagattttgcacaaatgggtcacttctaaacaacttcttcattcctctgtttgaagataaaaagccttaataaatttggcttcctttgtaattttgtaacatacatttaagattcttaagtcctattgcaggctaggtaggcttcctgcttagtttagcatccctatcatttttagcaatagcttattccatcacaataacatatataatgtacgatcttttcctcaaatttttgatacaagtgtaatgatacccttaatgggtatcttcttaatgctacataagttagtcaactgcattacagaccatgtttttagttcaatacaaagtggtacctcgcatctacatggctctcaacatcccaaaggaacgacccgaaagtaactgcctccaagacgagcctcttcattccaccgaagctgatctttatctgttcgtccttcgatgaatcgactgtgccctccggtgttattacaatctcaggcttaccaaacaatgcctctgtgtgcttctcgatgattccaactgcttctcttgatcttatagtggcgtatctctgcagcgtctccgcatcaaatgacatcacatatgaccttaatcgggatggtttaatctcgctgccgaagcccttagcactaactccgcccgcaaatgcaccaacctctgggtgagacgatacagccgcctgatatgttgccgtcccctcggcttgctcaacgcttgttttactttcatccgacccacccggaagaatcttcatcgtcttctcaagctgaaacctttggtccaccctcttcaagaaatatccatacatcacagaagcagcgtaaacttggccaactctgagcttgcttatctgtgcaacagagttcagatcacccattctgcttccaagaatcaaggcaagatggttgtgaatcatctcgtacatctcgggcgagtgaagccgctcgagtttctccactttggtcggccaagtatcaacccgaccagacggatctgaagatgggcttactgaaggtacaagtgatacgttagcttccatgaacttttgaaccaccaatgcatacaaaatctcttccaatgttcttcttctctcgttttccttcaactccgcaattctcctaaacaccaacaaaacattactcattcagaatcaaactcatgtacaacttccaatctatcgtatatacaaacagataatgagtaatccttaaattttagttatcatttatctagacacagagaaaagttcacatcacgtctccttcacttaatatgtcaagcaagttttagtcttttagatcgaagatctatacctgtagagaacgatgtcggttccaggtacagacgctgaatctttgttctgtccctgagagtcccgatcagtttgaagctgctcaagctgctgttcaacagctgcaggcacaagatgaggatggctcaccaaaatctgagacagaaactgaccagcaggcgattgcagctggagcggagcgatcggtttgggggaagaaccagatgaagcatcattagacgctgaagaagctctaaccacaaaacttctccgagttttagcagtcgttgttaagctctgtaatgatcttgaggatctagcagacgcgttttgctgcaagtacataattttttttttagtttttgctgattacgaggaacttcctggtaaaatctgattgaacataaccggagcagaatatttggagaatgattcgattttgaattttgatcataaaagtaggttaattgaatcaagtacaagagatttgggacatacccttaaacgaagttgaagtcttgaagaaccagaacgcgtgaatccagggccactggcggtaaggaacatagatccagaaccgttgtcggaagttctcgatggtacgatgggagatcgaaccaaactcgaggtcaaggcatccatggttactctctgagggtgaaaataagagagaagtcgaagttttggtcggaggaaggagataagaagaaactttagactagcttgagagagagaaatgtcgagaatggcgatcgattgatattactggtaaacagactttggtttagttttcctgagaaataatgagagtcggatttgattatttataataataaatgaaaggactcagaaaattatatttttcgtttaaatattttgagaccatggaaattatttgaggccgtgtttatgttgtgtgttcttcgtttcgtttgtagtttgtacaataacgatattttaaaaaaaaaaagacgaattattctttttgtagcgtcattgaaatatcgaacacaataatatcactatctaattacctgaactagaaagttcgatagtaaaatccttgcagtccttaaaactctaaagtctaaaccaaatacttttctcttctgttttcttattcaatcaaaaactttttagaaattactggatgattaggtatatagtattttgccattttggtctaaaactttacatcatatttagttatttaccaatctagaatggtctctaggtttttaactttttaactttttaactttttttaactaatcttagaagcctactttacgcaaactaacgagaaaaagtagagtcaaactaacgaaggaagagaaacgttgagagccaccaactgatgttgtgtccattcccacttacacgtattatttatgaaacgttttgtttgttttgtgacgcatgggctctttaccccacttgggctcaagaatcgtatacactagaaaacaaccttaacctcacggtggatccgttacgttacgtgttcgcaatttccacgtagtcgacatataaattgagtaattctaaaactatccattttccgaaatttgttggtaaatcaagcattagttgatagagacagagaatcttaagttatatccactccgttggacaaaaaaaaattaaaaataactcaaggagataagatagagaagaaaataactgttaaatacattgattaaaactaaactaatatatttttaaatattatggattagggaagatgggtctattattatttgggtgattaatgtattattaactaattatgaactttaactaaaaacgtcaattattttcacgtggcatgaagttgaagaaccgaccaattattacaacacactcttctcttacatctctatcttcttaagttctttcctttgttcttcgatttgatcaccaactctcacatatttcgaaatcgtcacactttgttgcgtgtcgtcttctctctctcataattcttgagtttcacgtctcaagatttgatcacttctgccaattttccagattgatctctctaattatggcttccatgagtttcgccttgaatcgcttctctggactctcctctaaaaccaccttatcagctgacttcgatccatcctctcgccggagttttctaccgccgactagagttggacttaagatctcttccgccgccgaatcggagcctgatctcagtgtcactgtaaatggcctgaaaatgcccaatcctttcgtgatcgggtcgggtccaccgggtaccaactacaccgtcatgaagagagcctttgatgaaggttggggggccgtcatcgccaaaaccgtaagctcttgagatttgactttttcaattttagagtagatgatgattgagtctgttttgcgttgactatgttggaacataggatttggttgtgtttgtgtatgatgatgatgatattgagtttcgtctgaatctgtgattggatgatttaggtatctttagatgcatccaaagttatcaacgtgacacctagatatgctcggctacgaaccggatccaatggctcagccaaaacagatgtaattgggtggcagaacatagaactcatcagtgacagacctcttgaaaccatgctcaaagagtttgagcggttgaaaaaagagtatcctgatcggattctgattgcttcagtcatggaggaatataacaaaactgcttgggaagagcttatcgaccgtgttgagcaaactggtgttgtgagttttccctaaaacacagattcttattcttccttgtggttagattctctttcactttgtctgatattagtatacattgttgaagagacagttctggatgattgttgtgtaggatgctttagaaatcaacttctcgtgtcctcatggtatgccagagcgcagaatgggtgccgctgttggacaagattgtgcgcttctcgacgaggtttgcggatggattaatgctaaagctacagttcctgtatgggctaagatgactcctaatattactgacataactgaggtgtgacatctaattctctcagcctttttgcttcctggtttttcaaccattttgtataaagcctatccttgtagaaaatgaaaaaaaaactttgatgcaagtttattgaaaagctccctacttaaagctgagttattgttactctgttttgctctgctttgaccatgtccgttttgctttttcttttgaatagcctgctagggtgtcactaaaatccggatgtgaaggaattgcagcgatcaatacaatcatgagtgtaatgggaattgatatgaagacgttgcgtcctgagccatgcgttgaagggttagctagatagcacttttataatgtcaaacgttttggcaaatcttgtaatggcattacaagaatagctaacgttgatagtgttttgcagttactccactccagggggatactcttataaggccgttcgcccaattgcactggcaaaagttatgaacattgccaaaatgatgaaatctgagtttagtgaggatcgctcgctttcgggtattggaggagttgaaactggctatgatgccgctgaattcattctccttggatcaaatactgtacaggtaactaaactcaacactatcctcactcttttgttttagactttatgccttgagagaaacttagttttactgctttttgttggaaggtatgcaccggtgtgatgatgcacggctatggtcatgtgaaaaccctttgcgctgagctgaaagatttcatgaaacaacacaacttctctacaatagaagagttcagagggtatgaacaactttccttttagacttttatatcattcttttcgcttgcttggttgcttgctgagcaagttcttcgtgttgtttgttggcttaggcattcgctgcagtactttacaacacacacagatttagttaagagacagaaagaagcagttgagcagagaaaagctgagaagagaggcttgaaatctgataaagattggaccggggatgggttcgtgaaggagactgagagtatggtttctaactaagttagtagcctgatgaagttatgaccacccaaatatttcaataaaggttcagcaacttcattcacaactcacatgcaaattacgaaggctctttctttcaaatgtttaaaatcaacttcttaaatctcacttgaaaagaaataactaaattttatgtttcttaattttcttctcgttgtgtattattcatcttgtatccatccatagcaaccatttctttgttacttcaagttggcttaaattttggccaataataataccatagaccttctccatgaagcaagatgttgcggtagtaaccttttattaaggtgtgatttggctaaagaaacttggtcttatatcattaaaattagatattgaacaaaatcaagtatgagctgatagaaccaagattagtaggaagctaatcaaacaactctggatacatttactaggaaaatatggtcatgcttatttttatacgcatcatttgaatccgaagaggggaaaaaggcaacaaaacgggcttaatgagaaattgactatggaagaaatatcaaaaagccaaaagtggccacgactttctgcatcgcaatgatacctatattagaagctacttaaaaattttaacacaaaaaagaaaaacatttagtttcctcctaccttacctacctacgtttacgtgatcatcaacaattctatttttactaatttactcattaatatatcttctaaagtatacataaacaaacaaactgtacgaagaaattgaaatataaatatcaaggaaattggtagcagttgttgagttatttcaatgatgctgtgaagtggaaacatttattacgtaacgcatatccgttttgtatataaactcttatttttcggctgtatatataatctttttagagattttccgtgagaaatagattaaatattgttgccataataacctgtaatctcaggagaatcctaacggaaaagagaatattagacgatagtattatatggagtattaattacttattaacaattctaggagataatatcagcacacaacaataaaagaaattactaatttactggaatcatgtattcaccgtaattatttaaggagaggaaaaaaaaaatacaagctctttctctataaacacacactctcaggagagaagttgtattgatcgtcttctctttccctaaacacactgattattttctctccgacgccgccatgtctctgctctcagatctcgttaacctcaacctcaccgatgccaccgggaaaatcatcgccgaatacatatggttcgatctcgcttctctctgtttcactttaaccacaagtgtcatgtatcgttctttcttcatattgctgcgatccaaaagtttatctcttttgttatattgatctttttgcgagtttgggtatgaacatgattcatttcatggagtgtttcgttgtcctgctttgaattaatacgtgtgttaaaaacataaagcttgtctcttttttttgtcttcttgtagtttttttgagtttttttgtatgattgttgaataaacaggatcggtggatctggaatggatatcagaagcaaagccagggtatttgatttataaatctccctcatgtgtttatttttcatcctctgttttctgatttgtttttgaatgatacagacactaccaggaccagtgactgatccatcaaagcttcccaagtggaactacgacggatccagcaccggtcaggctgctggagaagacagtgaagtcattctatagtactatgctcatccctcatctctatttatctatttgttgtctctatatgaagtaattcatatcttaatcttggtcttgctttgtttgttaattaaataaaagccctcaggcaatattcaaggatcccttcaggaaaggcaacaacatcctggtgggtttatttgatatgattagtgtgacagattcaacttggatataaatcagattattgattattgtgagatatgcaggtgatgtgtgatgcttacacaccagctggtgatcctattccaaccaacaagaggcacaacgctgctaagatcttcagccaccccgacgttgccaaggaggagccttggtacactcttcttcttctgttggtctctctgtatatctaaatcagattctgattgtctctttgtgtgattcaaaaggtatgggattgagcaagaatacactttgatgcaaaaggatgtgaactggccaattggttggcctgttggtggctaccctggccctcaggtaaaaatccagttaccatttgatcctaatgtttttaacaacacatttttgacatctgataaaatgtatttcgtggttgaaacagggaccttactactgtggtgtgggagctgacaaagccattggtcgtgacattgtggatgctcactacaaggcctgtctttacgccggtattggtatttctggtatcaatggagaagtcatgccaggccagtgggagttccaagtcggccctgttgagggtattagttctggtgatcaagtctgggttgctcgataccttctcgaggtattaatctgcttttagtccggttctattacagatacaaagcttcaaatttgctaatgataatcttctcttttgacagaggatcactgagatctctggtgtaattgtcagcttcgacccgaaaccagtcccggttagtttcttacttgccctccaatacttttatattcaataaccatatgtctaatgttgttgtaacattcttgaattggtttagggtgactggaatggagctggagctcactgcaactacagcactaagacaatgagaaacgatggaggattagaagtgatcaagaaagcgatagggaagcttcagctgaaacacaaagaacacattgctgcttacggtgaaggaaacgagcgtcgtctcactggaaagcacgaaaccgcagacatcaacacattctcttggggagtcgcgaaccgtggagcgtcagtgagagtgggacgtgacacagagaaggaaggtaaagggtacttcgaagacagaaggccagcttctaacatggatccttacgttgtcacctccatgatcgctgagacgaccatactcggttgatgacacatttcatgatttgatttctctccaatttggttttttttttttcccttttgattgcacttttcgataataaaaaaataattcttattatgggcgtattgttgtgacattttgtgttttgtttcgaataattaaataagcgcttcttaaggtgaaaataaataataattagtgatttttaatctttgatatgatagcaacgaagttaaggcgggtgtttcggacgttgaattgggataagatttgtgcaattaataattaggaattatataattattgtgtaagataatctcgaatattcattacaataatatacacatgtgacctacttacttaggaacaagaaaataaatagaagataaaattccgaagacgaaggggtggtggaatattaggtgagaacagcgtaatggtcgtcacgtgctctgttttcctagtctcatgcattgaagttcgcaaactatagcttttggtaggaaaagtcaaaattaactttgtgatatttattgtcatgagtggggaaattcgtgactctctttcccactcagaatttacttcatagattaagcataaaagagggtgacgaaaagtagtataaatattttcctaagttttggcaaagtcatacaaattcacaagtacatttttagtacttcagtgcatagtgtcacactttaattgttgctgccatttgtacacgtttcttttaaagtagattaatgtggaaaatcatgacaacctacccacttgatttcgcttttaaataaagaaattgaaaagatataaagccatgatcgttgttgtcgactaacacgaaaaagaaaagcttacgattggtgatctatggaatatacaaatttaaagaatacatggaatgttattattagtagttcaactaataccttagttttataatgcagattccgatttacattttccaaacggaaaaaagcaattgttaggaaactttactttttaatgaacggaatattaggtttaaatgatagataaattaattgaacatggactctttgcatttcaacatgcaaaaacttctagctatttaaatcaatcttcgtttttttcttcttatttggacaaaatataaccgaataatatatatataattaaaattcttgtaaatctttataaatttatttaatttttttgtaaattctttaaaataatcttaaaattataatgagtcttgttttattccgttagagctaaataaacattctcaaaattacacactcaaaattacttttcccctccaatagcggcgaaaaacatcagcaatatcgtcacgacggacgaagaagccaacgatacgcttgtagcctcaaccgtgatgaaatagtggcggtttatcgtcaacatacggctcaatatccaacatcctattagataacattgttaataatgttttgcatcgtttaaaagaaattcttcaattagcaaaaaggaaatctataatacaaaatgacaaatttaaatattgaaaattaacttaaaatatgttattgtctatgcatatttcactaaagttaaatctaagataatagatttatggtgattatgaatataatttaggaattatactcttttttttttgggcaaataatttagtgattagacaatatccaaatagattagattaagaaaagaagtgagtacaattgtaaattgaagtttaacttgtgaacagtttgtaccaaaaaaaatttaaaaattaatcttaataaatcactattaattaataatttttctggtctcgaattaggtttttgtagtattaaaattcgataaaaaaaataaaaaaaataataatttatttgaaaatcttatatagactatatagtccaatctagaatcttaaattaataacttatcaatatatatatatatatatatatatatccatatatataatatacaatacataccttttatttaaatataaatataaacttatcaaaaagttacaatgtcaaaaatacgacgtagccatgaaattgtatttttatatattgataaggttataaacttattaattttatgatatattcacattttataagatatatatattattcagtatatatatattgattttattaataagtttataaataggtgcactctcatgggccatggctacattgtatttcagagacagtacctttttctatgtaaagtattcaataaaataatttgtggaaaaaataataaaaaaatcatataatttgtggataaaataaaataacgaacttattgggtctttagctttaagcttctcggcccatagtattaatacccaccagccttaaatgatatcgttttgaaaacaacccttgaagattctatctagcccaatgttcgccgtgtaagaagatgaccactgagcaaaaaccacgttaaaaccctccgcctctgaaattccggagggggatgaaatggctgcaatggctcgctgtgctttgattccatctataaacccagctcatagcttccgtcatcagtttccgcaacccaatgcgtcattctatttacctcccactcttccgattttttcgcgtgttcggagatttggaatttccggcggatatcgccgccgtgtgatcaccatggccgccggaactgatcactactcgactttgaatgtgaaccgcaatgccaccttgcaggagatcaagagctcgtatagaaaactcgctcgcaaggttactactcttcgagattcaagtttgtttttgttttttctttcttcccattttcggtttctctcgaattgaattgaagcttagggtttgtaatggtgtaacagtatcacccagatatgaacaagaaccctggtgcagaagataagttcaaacagataagtgctgcttacgaggtaacacaagttctgtcatctatcttttttgaaatttctagttttgattgatgaagttttgttgcttataacacctgggaatgaagcatttgtgtaggtattatctgatgaggagaagagatctgcctatgatcggttcggcgaggctggtttagaaggtgattttaatggatcacaggatacttcaccaggggtaagtcatcatctttgaactatttcttaggatatcagaacattttaattgtttaatgagctccttgattctattcttcattcttcaggtggatccatttgacttgtacagtgcattctttggaggttctgatggattctttgggggaatgggtgaatcaggagggatgggttttgatttcatgaataagagaagcctagaccttgacattcggtaacatttttactttgtttatgagctataaatacttttaattctgttttttcatgaattggcatttgcttactgtccttacttgtgtagtgagtgataatttgctataggaaatcagagattattgttatttacttttgttaggctaatattgtggtcttgtcttgtctgttagctgaatgtgttttattttcttgataatggaggaagttatctatctctcataatctttgtttctggtttgattgcggggacgtgtatactagatatgacctgcggttgagctttgaagaggcagtttttggagtaaaacgggagattgaggtttcttatttagaaacatgtgatggttgtggaggaactggtgctaaatccagtaactccattaaacagtgtagtagttgtgatggtaaaggacgtgtgatgaattctcagagaacaccctttggaatcatgtctcaggtaattcattatacccgaatactgtattgatcacttgctattactaaaatgaaatttttcatttcccttgatgcttgctatagatgataatatgtgtcatataggtgtccacttgctccaaatgtggtggtgaaggaaaaactatcactgataagtgtcgaaagtgcattggcaacgggagactacgggctaggaaaaagatggatgttgtagtccctcctggtgtcagcgatagagccacaatgcgaattcaaggagaaggtaacatggacaagagaaggtacaggagaatctgctatgatcttttctgatattaactgctctggcgattggttcttttcaacatggtttctgttttccgtagtggaagagctggtgacttgttcatcgtacttcaagttgatgagaagcgtggaattcggcgggaagggcttaatttatactccaatatcaacatagatttcacagatgctatacttggggcgaccacaaaggtggttataaaattgtttattcctggtgacgttattcggaagtatgaatcttgtaggcacatgacatctttctttgtcaggtagaaacggttgagggatcaatggatcttcggattccgccaggaactcaacctggcgacaccgtaaaattacctaggaaaggagttccagacacggatagaccttcaatccggggagaccattgctttgtagtgaaaatttcgatccccaaaaaactgaggtttgtctcacatcacttcccttttttttccctttatgtcgttattctatactaaaaaactgcttgaaacatcgaatatggtagcgagagggagcgcaagttggtagaggaattctcgtcgctcagaagatctagtagtagtactggacctactggtacaatgctatcccaatctaattgaaactcataattttcaatacacaatgttaaaatcttataatccccacttgtagaaactcgtcaagaggagcagagttttggctcagagcccagaaaagaaccatctttgtggcataaaatgaagaatttcataaggtaatctcatagaaacctttttctcagtagttcatcaaaagacacaacattgttgtcttggtctgatacatagtttttaatgtcacgtgttatatagaccagaagattcaagaacgaaatttgggactatgagcttaaacccatcattaccattacgaagaatgaaagtgtcagagacttcaattgctttttcagtcttggctctgtgcgttataacctcggctgttgcattggtacagaagaagggtaatcgcttgaaacaaaagaaagaaacttaatttcgtcaaaaaccctgaaaccccacaggtagaagtttaatttcaagtaacagagagctttttacaagatttaaaaggccctcggtcatacaattctagtttctagagattgtttgtcacgcagaagagatatgatcttgtatgtatgttttatcatttatatatggttaagagcctagttgtgatatacaacgaaaggaatgttattacttgaacaaatgtttatgtatgctagaccagcttaaaccgtgacagaactatgctttgaactcaattcagtcctcttatttactttgtttgtccctctctcattagaggaacctttttaggcaatcaagaaaaggtttcccataatcccatatctattagtatagtcttttattgcttagtgggtctcaacacacagctactatacttagtatttacattatgatgactaacgtctttatcttccaaagtaaaacaatagtaaagccagctagatagttaaaaacacaactcaatagtataccttttgttaaatggcttaaaaacaactcaatattccaactaccaaactgtttatccacatgtgcgatcgaaaatagatccattaaattactacacttcatatagttttactcttttcttctaaaatgtaacgcccaaccacatatcaatgtaaccgtcgtgaatcttttttcatcttttattgtaaattatccaaaatatgaatcacaataatattacctttgtggaccatgaaataatttattcgatggatagaaaaattggtaagatagtaagattaatgggaccctttagattgatgccgttgatatgcagagagtggagacaataaaaaaacagagaatgcgttacttgtaaataaaagagcctactttgaatgctgttaaattattgttgttggcttttttacatgtttatggtcctacctttctctgcatacccatgttcatttttttcttttcttttacaaccatgcattatcatactactatagtaagaaaaaatcaattttattattaaagaagcaaaacaaaaaaaaatacatagaattaagtgttatcttgagaagagtgattccactttactcagatgcagggaatttcataatcaaaacctttgtattccatttctccataaacacacacacccacttgctaattttcttgttaatccgattgattattaaactctaagtttttgtaatccagttaataatctttagcagttggaatttagataagacaacacagcttagtggtacgaatgattcacataagattctataatatcaataagttaaaacataaaaaccaataatagaaattaaaaaaaaaaaaatacaaatatttttgtcgaagcatataaagacatacgtcactgttgtatagaaattgtcgtttttgtcacatttagattttaatttgaaaaaatttcaaaactcgaaaaaaacaaaaagtggagaaaaagagaaagagagagtgttaagagtgttgactagcttcactctttctctgtaaaccacacacacagcttcttcactgagagcttttttctagggtttctctctttgtttcttacaatgcgactcttcttcacaccgtcaatgtccaatctctccatattcttctcgattcttctcctttctcttcctcttccgtcaatcggagatctcgccgccgacaaatccgctcttctctcttttcgttccgccgtcggtggtcgtacattactctgggacgtcaagcaaacctcaccatgcaactggaccggcgtcttatgcgacggtggtcgtgttactgctcttcgtcttcccggtgaaacgctctccggtcatataccggagggtatttttggtaatttaactcagctccggacgcttagtctccgtctcaatggtcttactggttctcttcctttggatctcggaagctgctccgatcttcggcgtttgtacctgcagggtaacagattctccggtgagattccggaggttttgtttagtcttagtaaccttgttaggttgaatctagctgagaatgaatttagtggagagatctcgtcagggtttaaaaaccttactaggcttaagactctgtacctggagaataacaagctctctggctctcttttagacttggatttgtctttggatcagttcaacgtttctaataacttgttgaacggatctatacctaagagtttgcagaagtttgattctgattcgtttgtgggaacttctctctgcggcaaaccgcttgttgtctgctctaatgagggaactgtgccaagccagccaatttctgttggcaatattcccggaactgttgaaggaagtgaggagaagaagaaaaggaagaagctttctggtggagctatagctggaatagtgattggatgtgtggttggtttgtccctgattgttatgattttgatggttctctttaggaaaaaggggaacgagagaacaagggccattgaccttgcaaccatcaagcaccatgaagttgaaattcctggcgagaaagcggccgtggaagcaccggagaataggagctatgtaaatgagtactctccgtctgcagtgaaagctgtggaagtgaacagttcagggatgaagaagttagtgttttttgggaatgcgacaaaggtcttcgatcttgaggatctgttgagagcttcagcggaggttctggggaaaggaacgttcgggacagcttataaagcggtgcttgacgcggtgacattggtggctgtgaagagactgaaggatgtaacgatggcggacagagagtttaaggagaagattgaggttgttggggcgatggatcatgagaacttggtgcccttgagagcgtactattacagtggagacgagaagctgcttgtctatgacttcatgcctatgggaagcttatcagctctcttacacggtgagaactacccctctctttctttctcagcgaaaaatttgatttttattgttaatagttctctgctgaatcttaagtttggcataattagtaatggattcgttaatatacattactgttaagaaagaaatgacaaagattctatcatgaaatgattagtttggtactgcatcacattgacaaggatcagtgaagagtttttatcattcacatggcttacacaggacgtctatgaattagtggggacagtagataaccttggattccttgactagctgtgataattgatcttttagaattgtattttgaacaaagaaaaatccagacctcctgtgttctactttcagacagtagttttttttgtgtattgagcttaatgtcatgctatgttacaggaaacaaaggtgcaggccggcctccattgaactgggaagtcagatcaggcatcgcccttggagctgctcgtggcttagactatcttcactcacaagacccactgagctctcacggaaacgtcaagtcctccaatatcctcttaacaaactcccatgacgcacgagtgtctgatttcggcctggctcagcttgtaagcgcctcatccacaaccccaaaccgggccactgggtaccgtgcgccagaagtaactgacccgaggcgtgtctcacagaaagcggacgtgtacagctttggtgtggtgttgctagagttgctcaccggaaaagctccgtctaactcggtgatgaacgaggaaggaatggatttggcgaggtgggtgcattcagtggcgagagaggagtggaggaatgaggtttttgactcggagctgatgagtatcgagacagttgtctcggtggaagaagagatggcggaaatgctgcagctgggcattgactgtacagagcagcacccagacaagcggccagttatggtggaggtggtgagaaggatccaggagttgcgccaatcgggtgcagatcgggtggggtaagaccatcagatgaaaggagacttgagacatgagtctgttcgatgatctgaagcggcgacgttttcagtgtttagttttaagaatatggcgggaattagagttggggtcgttaattagatgtttttaattttggttttttttttttggtttctttcatgtgtgggcactgatgatgaggagtttcgtggtggttgtaattattagtgcttttaactttaactttattttcaatattgtttttcagctttttgtctctatgatatgatagtaagcaatgcagacaaaaaaagaagatagtatagtttaaattcatattaatacatagactaacggacatgaaacttgcagtaagacgacaggtgataatgtaatgtctttatgatcatacattcacatttacgcctgcttatggcaatccaatggcatgacagctttttgtataagtggatatatcaagtcacatgttacacgattacatggctggatccaaatgtagacatgggaagacctcatacgacgtcatgttggtatgttttggattatttcttgtttgaacttgttcgccaaaagtccaagataaagttgtgggcaaatttgttgatgacaactaaataaatctaaaattgttgagaggttatgtcttaaatggtatttaaaattattaaagattaagtaggttgcgagctctcttatctttactgaggtagaccgattgctgccgctgctaactcaaaacgcaaaacgctacctcaccactctcatgtccttgtgattatagaaatatgggaaaagtaccaataccgcgctggtggctgcgtttgcgtccccatgatgtttcaatatccgttgtcacctcttgtttcttttccctaccttgccttgtcgccgaaggcatgcttttaaccgccttcgtgatctaagattaattttatgtgtttttctcaaattttagggttttaaaacatagttacacgcttaacctagtcatctgtgccgtctagacttaattatacgctcttagtgcctactctttcgtcatcatgtatgaaactaccaaggagatagatccacagtgaaacaacaaaaccaattttaagtcttttagaaatgttctacactggatcctcacaacaaaacctattttaagtcttctaagttagtgttgccttgcatccgaaaggcgaccgaggcgtgcgccttaggcacaaggcgagatcaggcactctttgtgcctagggtcgcctttcgccttttaaaacacaggttgtcactgtagatggagcttactaaattgattttgtgattaacagaaacgaacgacttacatttacagagtatacaaacaaacgccggtaatggcagagtactcattacactgactgaacaccaaaagaatcgagaaaaaacatccaggaaatggatgttacttgtgatgcggaatttgttgtggctcatctttccagcctttggataaaagatcatagttgatagacgccaactgagagaggttctgcaaaaccaaaaaggatagaaactcagaatgctaagcattgtgctcttaatactcaaccactcacaatgatacaagctcacttaaaatcagttggcacaacaaaaacaggcaagttttcgagttgtctggaggcagagcccacaagttcaaaacattatcaatcagtccctacagttcctacatgtgaatctgacatctacctacagcctaatacacctctacatgcttccaactcttccaagctaacataacttatgctaaattatatctgttgccacagaactttagatagatttcaatccaaaatgaaatgttatttatcggaatatcaacaactatataaactaccaaccaattgcattacttggacaacatttgatcttaacagatcagtcatgagttattaccttaaacgagaaattactgaaagagtaatctacaggtatgccagactcaaactctgcatgaccttcgcattcttcagcctgtgtagcaacattgatccagttcaaggaaattgcatatccaacgaacactaatgataagagttttccgactaattctaaaggaggtgaaatccaaagagtggattaatagatgttacctccccttcttcatgatgattgctcgagcaaccactgctgttagtcatgctatcagcatcactataatctggaacctcaccgcttgggaaaaattgctcatctgatgtgttccacgagtagcgacttctgaagtaacttgtgtcaattgcactctctgaagccggaacaaatgcagcctaaagaaaactagtgttaagctttaagaaggcacaagtagcaaagcttacgtttttaaaagaataagctaaataaatgcaccttttgccttgctagtgtgtcccagttgatgtctttaaagaagatgtgctgcttgacctgagtcatgaaactaatgtcattaacagtttacaactcgttggaactattaatcacataaaaagacatccatttcacctcagctgcccctctagctccaagtctctgatgtggatcttctgttaaaaatctagaaaaagaagacgacatgatataacagacaataacctgtctttttgactatagagttacgactcaatattgtatctgaacggtaacgtagagtatttcttaccggtctattatatcatgggcttcagcactcatttcttctggaacatgaggccatggtatcttacggttgagaatattatcaaatatttgctagaacaaaccaaagaaaatgcacatcaaatgttggaactgaaactagacgcactgaactctttatagcaacatatgtactgatttcaaataaaagtttacagaagttgggaagccaataccaaaaagaaaaaaaaaacatgacatttgaagaccagcccaagtatgaattttagttcagaaacaaagcaatgattagtcctgacctgaggatgttccgcattgaagggtggaattcccacaatgagttcaaacagaatgatgccaacagaccaccaatccgcagttgcacctgaatgataatgcaagtataaattatattttgcagtcttggcatgtgataaacgaaaagagaattatcagaaactattgccagacaagaaaagcctagagcaagaatatattatgaaagtcagtggtccagagtacttagcatataacccttctacttacaccaaattagtagagtagaaatgaatttttagtagcttatttttctactcaaattaccaatcccagcagagtaccaatgagtctactacacaaacaatcttgaataaagacaagtagccaccaagattaaacattggtacgcaccatgtcctgtccctaaaagaatttctggcgctaagtagtcaggagtacccacagcagaccgtttcttgcgcctttcaagttgttcctcagatgccgctaatcgtgattcctcctcatcaagcagagacgtcccacttacagcaggaccagccagatcatctgtgctgttgatgagaccaactttagagagcccgaaatctgttaactgctcagataaagaaagaaaccataggtctttaaaagtctatcatacgtggaaaggctacatctcgcaagcctcatatgtcaacacagaataattcttacaatggaaaaatatacctttatatgaccatcatgcgcaatcaacaaattatccggcttcaaatcacggtgaacaacaccctcagaatgcaaatattccaaagcaaggacctggcatagatactcatcatgaaatcactttctagagctctgtgcactgaactattaataaaataaacatgcggaacttacaacttcagcaatatatacacggacaatatcttcttctaagcaacctaaatttctcaacaacgaatacagatcccctccattcagatactccatcaccaaatacaggttgtcacgacacgtgaaagaatagaagaaacgaacctggtcaaaacaaagtcacgttaaaaaagtaaatctcttctgagaatatgcttaaaaggctagacctgctcaccacaaaaggattgcgaacgttgatcaatatatcacgttcagcaagtatactttcaacagcattcttacgaatcatatctgcctttttcagaacctgtggagcaaggccaacgttaaacacaatatttagagaaaacgctaactaaagtttttgcataccacgttagccacttagcctaactacaaaaagaagaatattttgtaagaagcaaacgaacagaaaagagaacaaaagcaccatttaccttgattgcgaatagatctcctgttgtcctctttttcgctaaaaaaactcgcccaaaagctccccgacttattggttttatgatctcaaaatcatcaatggatgtgcgatctcgcggatgtactgggctggtcctcaagctccgaacaacatcatcttctaagggagcatcttcatcaattacagtgcttagtagatcaactttttcatcatccataagctcacacatatgcacatatttctcactacataattaggaatttttacttaaaacacattctgatgtgaacaatatataattccagttacaaaagaatatttctggaaaaccataaaacatatcacagaaaatatatatatgcaagcaaaagtagcatcaaggaactcaccggatcaacttttctatgcgagtcccaaatgtttctactgtaagtgcatcaaactttctgcggtctatgacaacccttagatcttcaagacaagacagtaggaatggaatggattgatcatcacccggaatggcatctgctgcacattttgcaatgtcagcaagttcactcatctgcgttatcagttttcaaggttttcttcgtcagaaggtatttaacaacaagagacaagaaaacttatgaacatggagcacaaccatcacaaacctgtggaatatcatcttgatcgtggaatgtacccttgcctcctaatatctgttcaattggatcaggcctaggggtcggaatcggggatctaggagtcatgctactggcagatgaagttgtcataccttgatcagacttgggaccaaaacgggttctacatgacattagcggtaaacctctcagatcatccataaaaattgaattatcagcctccggaaaacagtcaagcatgtcttctgatccttttcgcgaccaatcactcaaccttggagagagaacatcagattcttcagtcagatgtgaattggatactttcataccatctgggctctctgcggctgctaggctatccttatgcctgaaggtctctgctatcttgtcaagtgtaccagcaactgccatcagtcgctcatcaacactcagtcctttctggtcatatttatcagccaatgtacaaaccctagagtgatcttccacatgagttgtcggaacttcctcctcacagatacggcacattattgaactttcctccgaaataaggggttgttccccccagtaaccccaagaaatattgtgccgatgcttggaggagtgttcatgagaatcttttgctggaggaaagttgagaatagcaacagcggcatcatccctaccttgtcgactcccaactatatttggaggttcaactttgctatcattctgctcttctgacgctggcgcttctttcacagttttcagtgctggagatggaagttttttccaggaagacattctatcaatgtttgcaggagattcagattcctttatagcataattttcaggaggagcaagagggggaactgagcgtacaacagcgtcttccttccagtccaaaccatgctgctcctgactataagctttcttggtagatggtacctttgcagcactgtaactccttcccgctccactcggcggtattttctctatagaatgcaagactcttgactgacgtagttgtacaacttgttcctcctccccccagctttccttatgaaactgaagtaatctagtacatctggtaaggataaaaagcatccgagtatgaagctgcttgaggacgcccgggggaagctcttgacgtctatcatctaagtcctgaacaatgccttcacactgaagccagaaatctccaggagtagtcatagcacaacttcgagccaaaattagcaagtcttcaaatgtttcctcccactcaggatggctttctgcatttttctcaagaactcccaccaggtccgctgcaaatactgcaaggtcagagtttacttcttcctttgctttctcaaattttgcccgaatcagattcaatacttcctggaaaagacagacgattagattctgcatacaaaaaagatcacaaggggataatagagataggagactttagaatacctccacattgttcgacctacgaggcttccataatggaaagggacgtacaccttttgagttcaactcatgagaaaagcttttgatgtcaccaggaaacctctttcgtggagcactggtcatacgaagtaaggcttgataacgaggcgattctgactctttgggattttcccattcatatgaattctagaaagataaacgtcaagtcaccaagaccatttaaaagctaaagctaatacaaatatcacaaactactttttaaaaagtatgtgatggagaataattgggtacctctggggtgcaaaagtctgaatttcttagagggccagaacgaccggatgacatctcagagcgacctgcgaagtaccaacagaagcaaacttgagaaataagaacggaaaatctaacagggggcacaaatgatctggatacattacagtataagatgcgtttaggcagtgattaagttccactattaaaacagatgcagatatattgaaagtagcaagcctctgatatcatacaagctaacatactcataacaagcagaacacggaacaagtttatcacaagtaccagcacagcaagctgccaatacgtatttctctcataattcccatttagtatctaagtaacggaaagggttgagacaaagtcattgcttacccccatcaaccattttaagatgttattagtatctaaggacataccagttcccgatgaggatgctacattctgcaatcgagatcctgatggcggcaaagtagggctgaggctcctcggtggtcctgtatcaggagacaaactatcacgatcactcttattgtcacttggtcgagtgcgatccatgttctcttctaaccctagcttgctactcccagcttctttctttctattgccactaccagagccagaagtagctgaacccgagcccaagtcaccaccatcagcacccatcttcgacaaattgctcgtagccggatcattcctataattgaaaaccctttcctgtggcaaaggtccggatctcgtcttaatccggttcaacccaagagacgaagccatgattggagaaacaaaagcaggtccttccttcacttccggcggaggtggtttcttcacctcggaactaggagacaagttcgattttccaatagagtgagcttgaacttcagatgaaagttgtttacccttagatgaaccatccttcttcttcaaaccatctttaatctgcgtctgcttgcaaccaactccaacaaatccaggaatagggatcggaggttcatccttggaagcggatttagacttcttcttatctgatcgtatcggagagttggagccaacagatctgggactattagagctatcgggactagaagatccagatttcttcgaagagaagaagagtttgttcttgaataccattttttcgattccgctgattcaaaacctaatcgcttacacacttacacaccaaatccaaccataaatccagttgtcaatttccaacactcggacttcacgagagaacaaatagctttctctctcactcgctgagactctctggaagatcttcagagttttcgaggttaaggattttgaggaagcgacgaggaagacgaaagcgtaactgttagtgggaaagcctagattcagtgcctttgtcatttaatttacttgaaatggaaaacagtcaattctttgttaagactaaattttgacttttttgacttaaactaaaattaattttattcaatcatttcttaacaaaacaactcaattttttcatataaatccacaaataacaacacattattaatcaatatctctattccattacttaacaaaaatgttattttcgtaattttagataacaaagaaaacgatcttttgttttctcgcaaaataaataaatgaaaatattgtttaagtgctgatgatctacaactacaagatgtgatctagcttatgtgaatccgaaaagtttccactaacacagtgcatgcatccaactttatgcggtccatggcaaaacaacaaatcctcattggctcattgcgatacaaacttattatgactattagatttgggccattccttattacattttgggcccatattagtcggacttttatattagtaatggacatgtcaagggagaagagtcaggcaaaacgatcatacaagtcacaagagataaagatggttcaagatgagttcgatctacttctctttattttcagatcaacagttttgtaactattttttatttatttttcagtaattttgctagctaaatattaaatgatgtgttcacgttacgtctatatctcaattaataacattactttctgcttttcaattatcgaatagattgaatccaaatttttttatgacgaaataaattactataatggtatgcatcatgagtgtactattgtattcttgcatgtgatttttgatcaacatggtgtttttgtcattactatcaaaagacttccatcgctgcgatattggattgtcagaactcggaaaaaaacaaattatgtcgtagctcaattccacgaaaaagtctaaaacaataattagcagctctatatagataatcgaaggcaaaggtaattgtttataattttgcaaaagcacgacatataggataacgtgcactcttcaaaagctatttagcaatgcaatcacggtggaatttgtgcatgtaatctcttagcctaacataaccaaaacctatggtgacatcttctagacagattggggaaacttcttcttcgtctttccctaaactccccttgttcttctccaccatgcacagccctctctaacttccatgaaattccaagacgtggagatacattttggcccctgaatcttctcagctttatacgtacacctccatcgtaaattattgcggaggcgtaaacggtgaaggcgccgtaaacaagggtcgaaattaggcaaacaagtcggcatacgatgtcaagagcccacgaaagactaattgcttctggatgtccataattactagcaaataagtctatatcaaaataaaaactaaaatgtaagtattaacaggtgagaaatgaccagatcattaagtagggaggctcttctctggatctggctcgacgtcgacgagaagcaggatgagccatcaaaggatccactaaagcaccaaactcaaaaaaaagagagccaaatattgcaactactcaagtcagtctaaatatagttaaatgctgcgctatatatcatgcatatacatatgtcatttgattttctctttgccattatttactctcattcgattttaatacaaaattatttaagttgttgttgtaaacagacgttgctgttgctgttgagtttgatttagaatagttaagtttggttttggttggagaaaagttttcgttgttaagccaactcgtgatcatttaatctgttctttttttggtagggggtgatcattgaatcttttgttttgagttttgtatgtctatatagagtctaataccattaaaacaaaaaaaatgtcgtggtaaccagaattaaatgatgtaaaaacagaaaacaagaattaaatgtcggatgtaaaaacagaattaaatttcggatgttttatgtggatcatagcgtgagagatgcgtttatggcatcttttgatataatcttcgctttgtaggtccacttttgatctgatctgatctattatctatatggaatgttgtgtatataataaactgcagtgtagtattttcttaataatgtgatattaatatctaaattctaggctggagaaaatgacgtgtgctgcatatcccccagactcgaaataacgatgttatcgtgggagatgatcgtcaattttttttttgtttagagatcgtcaagttgttgtgatcattgactcctttccattttttctatagatttgaattttaaatattcattttcataaaaaaatgaaaactttattattatatttgtgagataattagatatgttttaaaacattagtaaatttagtatagtattagtttttactaaattaagaagaaagtgacgcacgaaatggcgtaatttcctcccccggaccacatgcatcttataaatacacaaaaacgatgtcaacgagtgattttagtaatatgtacattaaagtaatattttctttttggtaccaataattaccttaattaatacaagtatagtttaagcaacaagcaacattctttaataattcgcgaaaaatattaataaaagtacaatgacagaaaaaataattaaaaattggattaaaaaaaataatattagagtgatgacataatcacatgaggatttagatttagcttaataatgtttagttgtggaactaaatttccgcaacaattattttgttgtatttaaatcattttatgaaagtctaatctttacaattactttatagtaccatccgattaatcaaagattaaaaatatagtactaaaatacaaattaatatattttgccaaaaaaatgcaacgtgcaaatgtttatcttggtcaagagaacgtgcacgaaagtagtgtaactaattttactattttagattgagcggtgagacaaaaagggggttagactcacgcgctacacttagcgcgtcagccgacaaaaaaaagtgttgtcattgaataaaaaaataaattaaaactgccgcttcgcatctcgtgaatcattcacgttaaaatagcgcacgtgcctcgccacgcgtctcaccacaaaaagaaacgccacacactgcacgacgatgcacgtgcctttttaaccgactatatccggtgacgtaaccgggacaacctgtagctggtttttgcgccaataggatatgagaaaaaagaatcttttttttcttgttatagttataaattaatggtacgattcacatgtcgcatgcgatttgttaataaaactagaaattgcggtgaattaacttcattccacgttttttcattttctccctcaaaagtctctgttttttttcctttttccggcgaagctctatttagcttgattccggcgtttaacacgcgttttaatcgaaacagacatttgagatcgaattaattttgtagcgggctgtgtctttattatagatggagagagattttctcgggttgggttcgaaaaattctccgatcactgtcaaggaggaaaccagcgaaagctctagagattcaggttatttattactcttctcaatttttctgattctgattgtttttaaatcgtagatttgtttgattgattaggagttattaggactacttgtagtatggaatttgtttttggatagctgattttatggcttgctcgggaactggaattgtcagtttgttgcttggagcagaacattgtcctttgcttttctcgggagatgtagaatttggatttggaaaaactagtgttcttttccaaagccttgtcttaaacatgctttcggtcggagaaattaacgagaactaatctcaagcttctaacataattaaactcggtaaacttttttttactagagtaaatttttttgttttgtttgaagagtcttataattgagaaatactttattagtttatactaaaaaaaaaacgaatacgtaaaatgttggaaaagaggggatgtatagagactgatacaaaaatgataaaatagagacggttggtagtaggtagaaagattaaatatactcaaaagagtgagttggattagtttataagatgattaacttcttgattgtgtgagttggattagtttatgagattattaaaatattgattgtgtatttgtgttgtgtgttgattaagcggaacttgcgttagaatattgttcaaggtacaatgtggaaataatagttttctcaccacgaggaatataattatttcaactttgttttcttatcagccaaaacgtgccacaccataaaagtagtgcatcaacatgtggtgtggtgtggtggggttaaagtttgaatctctctttaatttaaactattaaaacaaacttaaattattggagtttcgtacaatgactttcaatcaaatgttttagaattagacacggttttcgaaagtggttttccctcgttgaatttgtcaacagtatcagattctacattgttggttactaatcttttccttgaagtaggtgttgaattaatcctctgttgtttatgtaaggagatctcgagacatttatggttaacagttaacactacatgtttgactttaaactgattatcttttattctttttcttttgtagctcccaacagaggaatgaactggtctttctcaaacaaagtatcagcttcttcttctcagtttctatccttcaggccaactcaagaagatagacatagaaagtctggaaattatcatcttcctcactctggttccttcatgccatcatcagtagctgatgtttatgattcaacccgcaaagctccttacagttctgtacaggtatttgtcatcaaaacctatgttaaccaagacccttgtgttttttttatccttcgcaagatagctttaaaagtgagccctgttttatgagcatatagtaattggttttgagtctagtttagcacaagttcatggcaattagtttgtggatctaatcttggtttaatactgattcattttaagtgtaagctaagcttctcatttttgataagttagttcatacaatgcctcacacctactttatggcttgttactctcagggagtgaggatgttccctaattccaatcaacacgaagaaactaacgcagtttccatgtcgatgccgggtttccagtctcatcattatgcaccaggaggaagaagcttcatgaacaataacaataactcacaacctttggtaggagttcctatcatggcacctccaatttcaatccttcctcctccaggttccattgtagggactactgatattaggtacccactagtcatcatatcatacagaaactctttctacattttcatagttgactaaagacttatttttgtcagatcttcttccaagccaataggttcacctgcgcagttgacgatcttttatgccggttcagtttgtgtttacgatgacatatctcctgaaaaggtatctcaatcattttcttccatatatgcatctcttttactcgtaaggtatggtactcatttgctttctttcatttctcaggcaaaggcgataatgttgctagctgggaacggttcctctatgcctcaagtcttttcgccgcctcaaactcatcaacaagtggtccatcatactcgtgcctctgtcgattcttcagctatgcctcctagcttcatgcctacaatatcttatcttagccctgaagctggaagtagcacaaacggactcggagccacaaaagcgacaagaggcttgacgtcaacatatcacaacaaccaagctaatggatccaatattaactgcccagtaccagtttcttgttctaccaatgtaatggctccaacaggtaaaaaacaaagtcagagacctgatactacattcgccatctaacttactagtattttcatggatgtaacttcattctcgttctgtttcttatgcagtggcattacctctggctcgcaaagcatccctggctaggtttttagagaaacgcaaagaaaggtacgcaacacttctttagaatacaccattcaatagtttcttgggctaactctctttctcgctgtgggtttctcagggtcacgagcgtatccccatattgcttagacaagaagtcatcgacagattgtcgcagatcaatgtctgaatgcattagttcttctctcagctctgcaacctaatttcatctacagtaagaaggttgctttagaccactccacatccatatttgcatttcaatggcggtcttttcaatgtctcagttaatttttcctcactcgccacactgagtttctccttagctttatatatacgatagtgtatactttgtttacatgttttttggtggaatggaacttatgagagcatatcagatatgtacttgggaaaattagtagaaactgtttgtttctttttttttaactctgttcttttgtatatatcactgaagctcgcatatgtataattcatgtaatggaattgcatcgcttctgtttccctaagttatttctctaatcaattttctattcaaatatggggatttttttaataggatttgctaatttgtactctggttaacaataagcttgatacattaccagttaccaactcgaattcacaaaagaagtcatcattatatatggagaaaatggaacatcttttagaatttgctttaattcgttttggctaattatttttcggtcttcgttttggctgtgagtttctttgtaacatcctaatttcaatatgtgggccattttgtgttgtagcccatcaaggcccaatgtcttattgcacaacgaaaagggatgttgcaaaagatgataaaccggatatgaattcagtcgcggttaagttaacgcgaagacaaaaccggttggacatgttcggttttcggcgatgattatttcaacgtttttcagtctaatcaaaaccaatacgagcagacacagctccgtacgatcacaaggattcactgatttctaagcttttcatagaaagaagaagaaaaaggcggaattcgatggtggatgcgattcaagtagctgagctgagaagattcgtcgagcagttgaaattgaatccttcgattctccacgatcctagtctggttttcttcaaagaatatctccgaaggtgattcattcttctctgacttatctttctttcggtgaatttcatttgtcagttgaatttttccatggagctgtgagtttctttgtaatcgatgctcgttcccgtcttatcgtgtacagtttaggagctcaagttccgaagattgagaaaactgtaagttgtctttcttatgaattatcgatgtttaggtttctcttgtttgtgctacttgggattgagttcttaatatctttgtgttgaattgatgtacaaaacccttttctaggcttcaacactatctaaatgttgatcgaatagttaactataaattgcaggaaagagattatgaagataaggctgagacaaaacccagtttctctcctaaacatgatgatgatgatgatgatattatggagtctgatgttgaactcgacaactctgatgtagttgaaccagacaatgagcctcctcagccggtaggtgttgaagttatcatctttggatattatgtggtgcttgtgtctctatgcatttttttacctgattggatgattttactttcttgtcttagatgggagaccctactgctgaagtgaccgatgaaaatagggatgatgctcagtcagagaagagcaaagctatggaggcaatctctgatggtacataactaccgttgaaattggttttgattatctacttcataagatttctccttaatgcttgattggtatacagggaggtttgacgaagctatagagcatctaacaaaagctgtcatgctaaatcctacttcagcgattctctacgccactagaggtaactttcttttactagttcactctcccttttcggctgaatgtgggtgataatactcaatatttgtgattgttgtcctgcagctagtgtgtttttaaaagttaagaagccaaatgctgcaattcgtgatgccaacgtagcgttacaggtgatcatttctcttgacataaacttgttttgtttgtgctgaaaatggatttggtaaaacaagtttatgtctcaatagttttatggcttgggagagtgattttatatctcaatggttttcttccataaacaagctaaactagtttattttggggtttagttcaactctgattcagctaaggggtacaaatcacgaggtatggctaaggccatgttaggccaatgggaagaggctgcagctgatctacatgtcgcatcaaaattagattacgatgaggagatagggacaatgcttaagaaggtaattgcggaaacctcttgatatcactgtatggtccttgagttttacagtaccaaatatatatgctgaaaatgtgtacttcccaggttgaacccaatgcaaagagaatcgaagaacaccgcaggaaataccaacgcctgaggaaagaaaaggagctccaaagggctgaacgcgagagacggaaacagcaagaagcccaggtcagaccgactcatacccataattaaatgttgtgtagagttacattcttttgattatcttcttagcagaaatcacataggcctgattatcttctccctgtgagagttaaaatataacctcttctgatattatcaatatcatatcatatcaaacatctcacgctcattgatttgcttcttgctcgtgaatcctatcaatgcaggagcgagaagctcaggctgcactcaatgacggtaaacattttatccatttctttcaacggttttctacttcatgatatttttgcaaagaactaattatgtgttggaacatttatctgtgagtcttgccccaatgaattgtcttcactcaataagaagcaaagctcaatatgctcttgttagccactaaatccagttgataaggccactaaccagcatgcttatcccgcatgcagtctcatttgcattcacttacctgagaaattctgctaatccagaccagaaccgtaacctcccaacaaaaactaatttaggggatagtttagtggaaactcatggtgtattgacgcctcactagctttctgtttcttgcatgtatcgtagatcccagttattctcacaaagcttcatttacagcttttataaaacttaaaatgaaatttgcatgtcaaaaaggaaatgatcatcttttctccctgatgatacaggagaagtgattagcatccactcaacaagcgagctagaagcaaagacaaaggctgctaagaaggcatcacgtctgctcatcctttacttcacagccacatggtgtgggccatgccgatatatgtctcctctgtactcaaacctggccacacagcactcgagagtcgttttcttgaaagttgatatagacaaggccaatgacgtggctgcttcttggaacattagcagcgtcccgaccttttgcttcatcagagatggcaaagaggtggacaaagttgtcggagctgataaaggttcgcttgagcagaagattgcacagcactcttcttctaagtaatgttttatctcttctctcattacactcctctcgcttgtactgtatctttgcaacacaatgattgtcccgtaatttaaaagtgtagcataacttttaaagtacttgtaattggttagatgacagatcagatcagttgaataagaagagttaagagagcagagatactttaagtggtagtttgctacgctatcggttggatataacaggatgaaccaagtaaaaaaaacagaggccatgttgagaaactaacaattgtcgagacacaaattaaaaactgaaaatgggaaaagataaaacagtaaataaacgacaaatacaagttgatagagggtggtgcagcttgcttgatttgtacagagcttggaacaatctacgtctatagactcgccaagatccacttttttgaagtatcccttctttccaatgataaaagctatgttgcgagtagggcgaggtatatacctgtctttatcaagtaccacagcgaccttcttcttctcgtcaacgaagaaactcccacctctaaccagaaactgaaaaccaagaccggtgattggtttcatatcaacctttaagaacaacttgttccacgataccgcattgggctcaatcctgctactaatccatatcttcaccgtataaccaccacattgttgaaatagcaccgcaagatgcttttctctaacactagaaagagtcacaggcagaggcagacgcggtccaaatctctctgttttagaatcaaaacatagtaagaaatcagggatatctcccacttggaaacaataatatttttgccagaactaaagctaactgatttgtccattaacctaattgatttacggccttataatgatgtaaatgggctcaacatttggcccaacaaaagagcagtttcctaatttcatctgattttggcagcaaactgatcgtaacttggattctgtctgtgattaagtaggtagtcattcataaatctggagcttcgaaaatctctctggtttaggtaattactgtcgcatataatgatttattgctctaaatccaacttttgaaattttccaattacgaccaattctctataaatttctcagcaaaaatcacggcgggaatatgaggcggctaccaccgtggatgctcggtggcgcgtcaaccggtgaagcagctgcacgcaatggttcacaacccgaagctcccaaaacaaaggctgaaaaacgaccaaaaagagtccaaaaaaccaaagagaaagacttaaatctcaagtcagatgaacctaaacgagttcccaggaagattagggaagaagctaagcgtagcccggaggtgattcaatcagtgactgttcctgaagatgatgatctcacagttgatgacttattaagctttgctaatgaggtaatgtaatacttcagttccacagtttttactattaaggatttgtgaatttacttaacaatgaatctcagtatgtccaacgtgatgaggaaggaacaagaaaggagcgtgaaagaagcttgtcagtgtctgaaactacgctagttctcgatgaaaccaatatgactacatcatctcaaggaggaaccaaagattcaacagcagaagacatgttacaattgctaatgggtcctttttacaagaaacgttagaattgaagcacaactgagttttcaagtgcttcaacatttcttttttacttttgttactgttttgaattctgttccagagatccaacatctttataaagctttgtgtttttttctccaggaccaaaaatattatagaatgtaggagctactgagttcataagcccatagaaagagcaaacgaaagcattgtgctcgtgaaaattagatttccttgattttggcagctaaaaggaccgaaagcaccactttttcaagcgcatcagtgacgtgctgccttaactaactcaatcacaaacctaaagataaaaacttcaaagagcttaagaatcaaagacactgactaacttgaatattcccacagttacgatggctattattggttaagagtggggatgggtgtatatatagtgacggccacatgtagaaaaccctagttgatcacggactaatgggctgagtttgttatttcctttattgggcttgtaagaataaatcacttggtcttagtagtttgtaagttagtggttacctccactaaatgaatatctttgtaattgttggctaactttaatgaatgtgaagcatgcttaagaaaacaaggcaaaatgtaaaatgagaagaagagaatcaataaagacatttaccctcctaatcaatctttcataaactgtatatgaattttttttagggggttttctgaccccaacataatttaaagtaaaataaatttgatcatatgaaagtttaaggaataattaaacaggttgtatcgccggaggtgtttccgtttacctctctcacacctatttctcttcttctatctgacattcgaaagctctctctctctatctctcttttttaccgcgcttgctacacattgtggcagacatcaactcctacctaaatctggtagcagcccattttcagatcgaattgaccccaaggagatcacatcaggtataagaatctcaagttagctcgtatcgtcttctttagctttcactgcgtttcccgttgcttaaacatgttcaatttcgatttattcgagtgtgatctggatcggcttcgttatcattttcgtttttttcccttctctgagtttggatccagtcaagtgatttagatgcgataaagctgggattgttgagagagaagatcaattctggttaatattgactatatttggctcttctgtgatttgcagtttttgggggttttgaggaatgaatttcttgcttcgatctgcttcttccgctactcatcggcctccggtgatcgaaccaccagctacgccgcctcaacctccccctgaaacagcgaagcccggagttactttggaagggctgattgctgaagagcatttcccacaatatccatcagtagatgaagatctcgatcgtgtgggtgatggatctggagaccttgatggtaatggagagtcaaatgctaagtctggtggctctggtatggagagattctctgatgtgtctgaggaacaaggatggatcgccattccatacagtatataacttactctctctacttaaaaagtttttaatttgaagttattcaattaagagccttttgttacttatccatgatttggtgatttttcattacagaggagatccctgataactggtctgagtcagttgatattcattctttacggtcgttggatcgttcctttgtttttcctggtatgctgtttctcatattctcatctcaccatttacttttaaagtgcctctagtgattgaacaacaacgacattttctacgatactataggggagcagattcaaatccttgcatgcttatctgagagtaaaggagacacagagattattaccccttttaaggttgctgaggtaatgagcagaactggacaaagaaaggtctctgacaaacaaaatggagatatgtctgatggggcgagtacgccatcaggggatggagaaatgagtcctgatgctcaatttgctactcagaatggtgacagtccttgtaaagagagtttggattcacaaaaagacttatctgatggtgaatcaatcttgaggatggaagatcataagagacgaacagaagatttgctttccaggtttcagaagtctcatttctttgttaggattgcagagtctggtgagccactttggtcaaagaaaagttctctggtcgcagatacagagatggatgaagagaggaaaagaacaaaaagtagaccttgtgtcagtgcttttgtagatagaggagacttcgatcctaatgtttctggaggtgtagctagaagtaaggcaaaatgctgtgccttaccaaatggagatatagtggtatgtgatggtaaatttgttactttcttttttcgtaataaaactaggatagtctgtttgaattgatttatgaaccagtgaaattcctcttcttgtgtaatgcattgtctgatttatgtgaatttaccgccctactcgttcagatattctgaactttgataaccgagttgatggacctactgattcttagacaacacctttgtttggaaggatgcaggtctctttacaagtttatattgtcgactgtcccaaagaacccatcatagagatactgcagtttgagaagcatcaggaccaggaccaaaatcctgagaacgataaggatccatatgggaatcttttaaagtggttgataccgctggataacactatttctcagcaaccccgttctttaccacctcctataacccctagcccaagtatcagtagcactgcacacaagccagcgatatcttctacctcaggctctcaactcttctcatttggtcattttagaagctattcaatgtccgctctgcctccaaacactgcaccagttactggacccataaaaacacagagctctaaaccatcatttgatattgaagattgggacagttactcaggccaaacggtacgaaacggtcagaagtctgggactgaagagctcttgtcttttcggggtgtcgcattggagcgggataggttttctgttcgttgtggactcgaaggcatctgcatccctggtagaaggtggaggaggaaactcgagatcattcaacctattgagataaactcttttgcagctgactgcaatacagatgatcttctctgcgttcagataaaggtttgtctctgcatctctgttaatttttggtgttattgtggtcaattttttttctgggatgcatcctaacttaccttttttactggcagaatgtggctcctacccatgctccagatattgtaatatacatagacgccataacaattgtttttgaagaagcagggaaaaatgcttccccttcttcagtaccaatagcatgcattgaagctggaaacgagcacagtttgccaaatttaactctcaggttagctttttttcttaaattcctcgtaattattttattttgtattgaaattctcccatcaatcttcttgataaaaattgatagatttagatatcagcattttgctttagtccagtaagtctcagaagtcttcagtgatgtccaatacaaaataacccataatattaggtaatcttgggtagtgaccaagaaaccatagaacaagttattgaatctaacaagtctctgagagtaactattctcaacaagcaccgtggtttggaggctaaaacagctagaataccctttcaggaacattatagactgcagttacccacccttaggttttcttgcaatctttcaggaaaggtgaggagcactcattcatcgtaaagcctgcgttttctgttgggagtaatctgaagccctctgctgcacgaaataaactcaaatcatcgagtttgtctcttccaactgtaaattttgaaagaaaagggagcggtttaagtggtgatcagtatgcggttatggtgtcatgtcggtgcaactacacaggtagatccacattaccgtggtttgtagccatgtttttttcttttgtccattcatatctatagctgtttcatcaatgctgttttatgttggactcagaatcaagactgtttttcaaacaacggacaaaatggagaccacgagtttcgagagacctgatgatctctgttgcgtctgaaatgtcaggagagccttgtggtccccatgggagagcctctcaactacccgttcaggtcattctctctctttatctctctctgacattccctagataataaatgggacaatgcatgaactaatggaaggagttcgcatctgcaagtgacagtgactgctagtgtttacccaaatgactgaaggtttaattagatgttgttgctaaattgtggttgcaaaagttgctaaaaactatgcaactctggcttcgtatatatgaataagaaaccatgcaacagttacaaagccacctatttgcaatgtggtcatattcttcaaaattagccaatttctaaatctgcaaataccaatcccaatggcatcttttattctacctcatactttttctctactggtttcagattttaactcttcaggcatcgaatttgacttcagaagatctatctttgaccgttctcgctcctgcatccttcacatcacctccaactgtagtgtccctaaactctacgcctacgacccctataagcccattcctaggattctctgatttcaccgagagagtacaaaacgagaaacgcaacactacagtgcgtaaacagcaatcgttacccccaattccactggagacaaggacagagaacaacacaaatggtgaatcttccaatccttcagatgttgttccaaagagcggcttaggttgcacacatctctggctacaaagtcgagttcccttagggtaaacatctgataataatatccaatgagcttctggtatgggtttaccattataaattgataacgatattcctaaatgcatcagatgcgttccttcgaaatctacggcgacaatcaagctagagctactccctttgactgatggcataatcactctggatactcttcagatccatgcaaaggagaaaggttagctaaaaaaatctctagtctctcagcaaagagactataaacactttgctgcgtcttctttctttccgtgaaaacatcagtggttccatatgaagaatgcaaatctcgaagctttaatatgttttggagtgaatcataatcataaaatgttagatgctcgtgtttaatgactgaaacaccaatgaacttgtgtgtgtgacaggtcgtagatacattccagagcagtcactgaagataaacgcaacttcaagcatttcctctgggattttctagtcttttacccaatgccacttttgcctttttctttagagccaagaagagtcatcaaacacagagcagttctatcttcagcatctccatagagactcatccaaagattgtgtgttgaaaaatcgattttggtttccatgtttcgaaggtttgaagaaaagttgttgtaataccccacttgtgctgaaccatgtgtttgcgttctttagcttgctttttgtaattgattgattctgaaattcgcatagagacagaagacgcaaccattgttatcgaatttacatttgttatttgcttataaaatcagataattaaccaaaacttttcttcaacaaatccaagtatggctaacaaatgaaggacaaaaagttaggtgcaccggagcttaatggtgcacccgaatgcaggggataacagctctacaaatctgaagccattttcacggtgaccccaaagtcgtcgtggaggcaaaaaccctttacctccgggatcaaaatcttggggagagacgaagatggcgacctcgctttccaaaatcctaacgagatcgaacactaagagatactggtgctctactacaacaagtatctctgcctctccttctttaccgaaacaattctggtcaagacacttctctgccgtcgctgactcttcctcctctagctccgccgctcttggaagccaatcgagttcttctgctccacctcaaggtatgttgctcgtgctatgtcttccaatgcttgagcttggaatctgaggatagtaagcatcaatttctgaaaagctaagccctttttgtttcagagaacaaacgagggtctaagtggtcacaattgttgttgttcttgcctggagcgattacctttggtctcgggtcatggcagatcgtcaggagagaggaaaaggtcagtacttcgaaatcaatggaagtcctttcatcgtctcaagcttggttatagcctgtcttagacttttaattgaaatttatattcaaaatgtgcttcacacatattctagttgtttttgtgatccgtaaaggagttagagtaactagatcctggagtcgtaatctgtgtgatctggatagagcacatactgatctatgctgacgcaatgcagttctctgcatcgtcatgtagactaattaagttgaataaatgtcagattccagtgagaatctaaatgttcgtaattctttcatataagtgatctggcgacactcttattgattgtaaatgcatgctgagtactggctaccatgcccatgtcttggttgagatttctcttattccattacctgatttcctatctttttctcttccaaatggttgctgaagctgagacatttaatattaattggttgcttttcactgagcagacccctaaagctttattcattacttgttaccgcagttcaaaacactggagtatcaacagcaacggttgaacatggaaccaataaagctaaatatagaccatcctcttgataagaatctcaatgctttagaatttagacgggttagttgcaagggtgtctttgacgagcaaaggtctatctatttgggtccacggtctaggtccatatcgggaattactgaaaatggattctttgtcatcacacctctaatgccaatccccggtgacctggataggtgagggtaatgatcctttctccttgcttttaagtctctctagtaccctttacctatacaattgtgaaaattactctttttctgtcagctgcatcgaagtaaaactagggatataataggccattgggttacctacctttctgttttcaattattgttgtgaaattattatagctctttctcgggatataataggccattggttttctaatcctctctaaacacttgaccatacttgtcttatactattgccatattctgattggctgcgattaaaatactaaaatctcgtggttaataacttttatactgtaactaactagtgagtagttcgagattttattagacagaatggtctgcggcagtgtcacttaagccttaaatggtcttggctttgtcatagtttttggctgccggttttagctgtagctgttaactgtttgtactttctgaagtcagattgttcttttcctttgtccactagcatgcaatcgcctattctggtgaatcgtggatgggttcctcgaagttggagagagaagtcacaagaatccgcagaggctgagttcattgcaaaccagtcaacaaaagctaaatcaccgtccaatgaaccaaagtcctggtggaaattttggtctaagacgccagtgattaccaaggttggtcttgttcagaaactttttcctttgtcataaggttggcttctcatatatttggtttagctcgaaactgtaattttatgggatacatctgaatagaaatgtcggatctatgcagagacagattaaattcagctatctgcaaagtttcacttctttgtttattgtctttaacaaatctcttgcatacattgtgactcgtgaaaactgaaatcttgtaggaacatatatctgcggttaagcctgtagaagtagttggcgtaatcaggggaggggagaacccgagcatatttgttccatccaatgatccaagtaccgggcagtggttctatgtagatgttcctgcgatggctcgagccgttggccttcctgaaaacacaatctacgtagaggacgtccatgaacatgtagatcggagtagaccgtatcctgttccgaaggacatcaacaccttgatccgtagtaaagtcatgccacaggaccatctgaactactcaataacatggtaaactccatacagatacatgaggtgttcttggcattgtctggtcttaactgttatggtcaatgagtgacattatgtttgtgtctgtttattgatgaacaggtattctctctcggcggctgtcactttcatggcatacaagagactgaaggcaaagcctgtccgcagataagcactcgctgatcaaaatcaaatcgtattctttttgtcacttgtctgctgaagtaataattgcagtggataattggttttaggttataaactttcataagaaaaagggacacaattaaatccttaatgttgtggtaacttaatagaaatttgtagttttctttttctacgatggaaggaaagttcgaaatggaagccatttgtaggtaaagaaggttgcaacgaatgcttgtaatcaccattgttctttctggtagactttcagcagaatttgtcggtgtgaattatgtattacctagaaaaagtcaatttacggttcaagagagtttgtttgagtatatggtatatattttgaaacctttttgaaatttatatccgagactcgaaagacagcataaactatgaactgctatcaagtaaagaaagaaaaagagacatgaactcaaaacctcattttacaaaaaaaatagtgttaagtcatcttattcagctaaaatctcattattccactgcttttcaccaaaaaaaaaaatctcattattccactgccgacaggatctttgccgcctttgacacctttgttgcagagttttaatttattcatcgatctggtgtacctttaatattttacacgaaaggtcaaagactagctttctcttacaaattaaacaatagtcaaccattgtaaacgaaagtagcacataaagtgaaggaattaaaatgaaacgaaataatctgagtgaggtggaaatatccaatttcaaatgtgtctttgaagtctctatggataatttgtcaaaacgatagtatttgataaaagaaatggaatgaaatgaaattagtagttatcagtaaatctttttcttacttaattcatcaaatgtttttcatgtgagtgtgttttaaaattacgtaatcaatgattacaaagtaagtaataatctaaagcaaattgtatatatatagtaattagtataataagattagatttaacgcatgaattaggccaggtgttaatatcagtcttgtcccagattgttcgccagagagaatagaatcatcctcgctgtttcctatttaccatttgtttccaccaatcatcatcttctcgcatcagagccaatccatggcgctttctttctttagctccgtgtaatttctctattctgacaagtcaaatccctaaaaactcctcgattctcatggccatcgttaccggagatcgatatctagagaatctccagaggttccttgacgagaaagctgatttgcttattgatggtaccgatgtcctcaagcttaatcccgcgggtcttcactatgttcatctccgtctcgaatctcttcgtgaacttgagcttatgctctccggagctcccgttgactatctccgtgcctacgtctccgacattggcgatttccgtgcccttgagcagctccggcgtattctccgtctccttccttctcttaaggtcgtttcatcgcttccttcaccggctcgtgatcctacgccgctctctcttcttcctttttctaagcttaaggtcttggaactccgtggctgtgatttgtctacttcttctgctaagggattgctagaactcaggcacactttggagaagctgatctgccataattccactgtgagctttccacttttccctctctttttttgtttgttttggtttagtgcatttctgctatagcattgagtggggttatagttctgtgttgctttagtctgtagggaaattgaactattagtatatttggaatggacaatgaatggtggaaggttttcatgtcatttcttcagaggtttcaggacgcttaaaggttgacgttatgagtttgttcatgtgctttgcttgtctttgaatcgtttttggaagtccctgactaatcttttccaggtctccactaaatgtaggatgcgttgcggcatgtgtttgctagtagaatcgctgagataaaggattcaccacagtggaataagttggctttcatttcttgtgcttgtaaccgtcttgtgctcatggatgagtcgttgcaacttcttccagctgttgagtcgcttgatctgagccgaaacaagtttgcaaaggtggataatcttcggagatgtaacaagttgaaacaccttgatctaggtttcaatcaactaagaaaaatctctcacctgagcgaggtaggaaagttcaggtttctgcatgtccatctatagatttcattagctctgaagctgcttgacatttttgtgtttgttagttactatctcttgaaccatatagctagtcttgatagttctaaaaataccatggcatagtttgaacaaacagaagatatagggaacactttgaatttctgtgctgaagattttatttaggtttttcctagggacccatacacctattttttgtactatgcaggtatcctgtcaccttgttaaacttgttttgaggaataacgcgctaactacattgcgtgggattgagaatttgaagtcacttgaaggcctggatgtttccttcaatcttatttccgacttctcggaactggagttcctcgggagtctttcattcttgacagacctctggttggaaggaaatccaatttgttgtgctcgatggtacagggcacatgtcctcagctacgtttaccttccaaatgatgtaagttttattttacaactatataatcttgttaaaaatacataaattgcaccatttcactttctgcctgattttaaaagcaattttaaaagcttttacttatctgtgcgttttcagttgaaacttgatggcaaacatattgggaatagagaattttggaagaggcaggttgttgttacccgtaggaaaagtcagcctgccagttacgggttctactctccggctagagacgaagctgatgacgaaggaagctttactagaaaaaaggtaatcagcaaaaaaaaagttacagtttatgtacgtatttataatctgctcgtagctgttgtggtcctttctcccctgtgacactaaatcccttagcatgaagaacataagatcatatccgaatcaattatgcaggtgtatagtatggtatggctttttgaacagcgtcgtgaacatacacatcacttgatagacagcttctctttgtactcttttagagtttcagtatcttgtttcttttgtggtataaatacttactggaagcttattattgttctcttgtttccttccacagacgaaaatctaccggctcgcgtctattgatagtgaggaagagagcacctatgtgaattctgatcaagagtctgcttcatgtgaacccgagactcaaagcaaagaggagaatatcaagtctgatcatgaagctgatgtctttggtctaatatgtaaagttgaacagttgaagaaagagcgttctgttctttggcttcgggaatttaaggagtggatagatcatccatccgaggattttgtggatgtcagcaaaaatgggagcagtactgattcagagcagaagtactacatgaagaatagaaatggcccaaaacatcatggtgaaacaatgagatatacaccagggcctctaccaagtttccaaattacagatctaaatcagaagcatcaagcattttttcttgatgggaagccagatgaaaatggaaacatgtcaactttggatgctagtcaggatatgacaggatcattttcaccttcatcaccccctcattatcaaaaggatgtcttacaccggcgtcagaacctggtggaagaaatcttacagatatcagcagattcttattcagtggcttcgtctgatagtagctgcagtgaaaatgaaaattatgattctgagcaatcaaatcctgaacaggatacgttgaaggatcatcttagtggcaatagaggagaagacacaagcttgcttgactctcaaccagagaagagtagcatcataaagtcttggaagatagaggattcgttcaaagcgaagaccactaattttctttctgggctacataaaagtgagcttgcttctggtgttaaccagatttaccgttggtttgacaaaaagcaaagcaagaggaagcctaaaaaaagaaatgtttctccactggaggagtatagtttcataaagaaaggagaaacatctcatagaagtgatgcagatatcattgattcttgtgaagatgaatatatttctgatcattttcaagaaggttccttgactacaggttgtaatagtaagagaagtactagatttttggaaactgaaaaatcccttgaaggaatgggtggtctagtggaggaattttttacaacgacactgtcagattccagcaatgatgagacttgtaggatttacgttagttgtgattgcatactacagcaagaatccacctataagcaacggtaagttttgttccatctattattgtggtttaggtgaaagaaaaagtaacctgagtcccttctgtctttagttaaaacttgatggaacatgctgagtaaaaaaaagaggttattgaggtcgcgtagtgcttctctagtttggtaggctttatgcaatttgaaaaggaataactggtcaatggaattagattgagatgttctcggttctcttgtaattcacatgtatgaataatatactctttactttataactacaaatttgtcttgagaagccatttacaaggatggcgctcttcttttccccctgacagtactctataaatgcagggaagtagtgttgctgctgagtagccaagaaaaactgtatgtgctgctcgtgggtgtctccactgatttacaaggttagactgctcttccctgtctttctcttattctttatgtccgaatgtgttatgttctgttgatactgatttacttttccttgatccctggtgtctgcagagagcagcttaagtttattgtgttcgcatacaatcggggatatacgagatgtctcagttggtctaggacttcaggttgtgaggttagtttttcatggctccgctttgaaaattgattatgtgcccatgtctcactttccttctggtttaggctacgttttagggaggatgcagagtacattttcatgacggcgagcattgaaaaaacaacagttttactcaatatcataaaattcttggattatcaggttacagaatcaaaattttctttgaagaggtgagctatcatcatctatttctccagctcttttactattcttcttctgtttgctgatttgagatgtattgaaacttaaatggcagtttggagaatgttcaagtggaattgtttgagaaagaaatatgtagtggtttgaagctgagtatattccagtatattgttctccattttcagagcagcacttttggaggtatattattctctcttgtatgaggaagctttatttctcttaatagggtttgacaagcttataagtaatttgattcgagcagtatcagcactgatcattaactataatgttaatcaatttttttgtgttaaactgaacagaagtgtcatggcttccacggtcactctttgtggcgggtggacatcttttcatatgcaatgaagacttcaggcaactgagttttctgccaacagatgatgcttcttcatccccatatttctcacttgactcaagctgctccatctccgacatatttgagatggtaacaagtttgtttattctttccctttctctcgcttatgtcagttttttatgtgcaaattggggtgttatccaggttgttgaatcaagaggaagctcgtgcttgtcactgaaggtcaagcagaaggattccacatttcaaagcagccaaaagaggacagtgaattcagtaacatggaagctcaagttactcagccctgagtgtgtacccaaatttgtggctctagtaaatggacttcacccagattcgacagaattcccattgttcgtaaggcatttgggtgagagatgagccgtaaatatttagaacttgacatttgttcataacttcaaattcatttgattcaatttgttcgtgagttttgattcatcttgtataaagcccttgagggtcctgtggtgtgtccaaaatattcttcgatttgtatatttttagtgtgtatcgttcatacaacaaacagcaaggaagaagaaagaaaatcagattaatatctagatttttactttgaaagcctgtgctattcttcgttttacaaacttttgcaggtgatgtaacagtaacacaatggaggaacctactcaaccttggtcttctcttcatcaacctgtgccatcaatgcctctaactctgcctccgataagctctccaatcgtttctgctcattaccaaccaaccaaaccaaacttatgttaggtaaagtagataaaccctgataaagagattaacgaaaaagcagaaacctgcatgacttgagactcgtagtcacgaagttgctgggcataagtcatctccttgttaccgactctaaagatataagtcgaaatccaacccaaagtcaaaccaagcaccagtatcagctgtactgcattccccgcttgcaacggatcaactcccacatactgcaccatatcattatcacaaaatgagtactcagaagaacaaagaaaaagataacagattcatttgatatcatcagtatgtagataatgagaattacctcaagtccactctctagcccgataccaagtgcagtcactcccactcctatcaatataacatccttcctcgtgtaaccaaacggcgtcgtctataaccaaattatttcacaacagagtttgcttcaggactactacgacgatagattatgatgtaaattcaaagagatggagtgcagaccttggtttttgtagcagaatcgtcttcagtttcagtagagtttgagctaactctacatctcattctctgtttctctcccttttctactgatgatgacaatctatgtccctcgaatctatataagactttcttcgcagctccgaatcctgcatcatcacaacaaacacaggagagttttacaatcgcttcagcttgaaatccttaagttttatcgaaaacgattattgggggagaacagaacctgtggtttgtcgcccaaccggaagaagccttacagacgcagacagaacctcctgatttctgcatagattcgaaactccgaacggtaaagaagccatttctgtgtttaagccacaacacaagccgtggttactagtgaaaaaaataatgaaacaaaaatttaagggaggacgaagagattacagagatggatggttgatattttttggggcccataggcttttgcttctttagtggcgcgtgtttctcaccgcccaaaagacatgcgtgtagacataattgccatcagaattactcaaatacactaattgctctttttttccaagttcatgtgaacaatgggagattcattcgctgcacaattcacaatttcacaaatgggccaaatgtttagaagatatgaaaaaataaagtaactttaatataatgtaaacagtttggttttattattctcccccaaagagataaaattaaaatcactctttttccagcccagtgaatcaaatgaaccggccctttattcccatcatctaacacctaaaacgtccatctataaactcaagctgaaaactcaaacagcatcgtgtgattgtacttctcaccagccttaaccacaacagacgggaaattcgactggttaatcgcgttcgggaatccctgcgtctcaaggcacacacccgcatgtttcccgtaaaccgcattccctttcccaaccactccattcacatagttcccggtataaaactgcattcccggcacattggtccacaagttcagtacccttgagctagcagcatcactgagcttcgctgcgtgtttcagcccctccttctcttgatcaggacagtccaacacgtagttatgatcgtatccgataccaacctctccaatagactcgcctatccgcttctcctcagtgaaatcgaaaggagttccctttacaggcaagatctctcctgtaggaactgtgtattcgtcaaccggcgtgatatgagacccccatatctgaatcttatggtctagaatgtttcctgagtcatgacctgctaagttccagtatgtatgttgagctaagttgatgggagtatctttgttctctggaacagcttccatgtcaagtctcattgtcgtggctgacgtgagagtgtatgtcgccgtgacagaaaccgcaccagggtaacctgtggaggggaaccgcaaaacattatatagctaatctaatcccacagaaatcaaatgctagagaaaggatatgtcattaccttcttctccatcggcactgtgatatttgaaagtgatgaaaggtttttcgccgtctctcttgtgccctgcaacttcccatatcttcttatcgaaacccttgttaccacctgtacagatagagtaacattttacggtccaaatcctatttagttcacagaaagttatagagaaagtatacagagaagagaattgtttatacagaccgtggagactattaggaggcttgttgataggcaaagtgtagttaactccattgagactgaattttccctccttgatccgatttgccacacgaccaacaatgcacccaaagtatggtgcaagccctttctgtaacaatcatattcatagataaaacacacatattcattaacattgttacaaagtccatcttattttgatagttcatcacaaagtcattcaacaaggtacatgaatgaccatatacatttcttaaattatgattcagactctattcatgagatccagaggcagtgattagagtttcgatcagattgattgaatctatgtcgagatcagttcaaggattaggtgaattcgagagaaattaccacatatggatccaccgagtcgaatccgagaactacatcccccagtttcccttcaaataagaaaaacaaagacgataatcagaggattaggatttggagacaaaacagagatcatcattgaaaggaggaagaagagaacaaaccgttcttgtcgggaacagacaaagaggtgatggtggtgccgtagtttgagatcttgacctgcatggtgccattgttgagctcgaagatctctggagtgtttttgctctgatccgccattagagggctcgaagactaaattaaaggctttaagattagaagcgaagtgattgggattgagatttttgattggggagaaacaaaacagagggtgaagtgattagctttggttaaaagagttataaaatcgtaatctcgtaactgatcaatgttgacgtcatccacatcccaaactatttatcatttttaccccccaaacaaaaaactatttatcttgggggtttttgtttttcgttttttacactttaatgcatttctaaactttttgaaaatcaaattactacccaaaagttaccaaatttactttcaggaattcaaaagttaccaactaaaatccaaaactatagagattagagaaaagaacaaatgtagaatttggatctaattttctaattatcaataatattttaagtaaaaaaatatttgattagtcagttataaaataaaaaatttgataagtcggattatatgcttttgacaataagagaaagacaaagatatcatcagataacaagaaaataaataaaatatactctaaacatattcagtttgaccccaaaaaaaaactctatacatgatcgtaacagagtattcgcgtgaatttagatgtagtttctctaccctttttcaggtatcctatgaaaaaatcaatagtacctataaaagcttactttgttgtaatttatcctcttttcgtaaattttaatttgctaccatccaacatgtctcagcttttacccaaagtttacaaaaaaaatgtctctgtaaaggattttgattattcccataactagaaacaattaaatcaaatttatcaaaaatatcaaagctctctgagacatggaaagaaatagtgtaacagatggccaagaggactttagcttaaagaagcacaatcatttcaaaaagcaaatcatttgtcactttcttcttcttcacctatccatccacaaaaacactttccttttcctctcatcaagaaactccctaatccgacgtcgttcgttttaattcagtgacacaatctcccacatcttcaaaccctttgaaaccagcgattacagagatgcaagatcctcatgtcccatcttctccaactatctcctccgtctcttcctccgatcttgatactgaggtcagttcctgcaatcttatacttaatagataatctaattaaagatcaagctcttcatgtgttttctaagctacccataaagctttatgctataaagtatcaacctttaattagaaaactagtttaaagttccaaaggttatgttttcagaactgcccagaaacatatatatgtacttgttagaacttgatttggtttttttattggtgatgtgaggatttagtcaacaggatcgttcttccatgacagaagcatcacacttggaacgcttatgggatttagtttcactgcaactatgccgatgccatttagagcctcttcacgccgccacgtgtcaccttccgtcgcaatctcacgagcttctagctccaatgcaagacgcaaccaccagagaaagcgtcctccttcaaattcggctgagcctgagccgcatcgccgccgtaaatggtggcggttttgccgagatgacgatgacgacgccgccggaaatggaatccaccgtggaacaggagattcaaagcggtcatcgctcggggagtatctagaggtggaacggaggtttggagatgaagccgtttacaactccgccgaggcagagctagaggatgcggtggtggcacggtaccaagatcagcagccggtgatgggggagcgggcattgttcgctgacggaagggttcttcctccggcttcagctgaagtggttaccggagaaggaacgccggtagccacgtccctttgtagatttccggtatctttaaccggtatatgcagcggtggtggaggatgaatacgtcggttcatgtgtgtgtcttttatttgtatttagacttaaatttttgtattttgttcgtcgaatcggaatcattgtttgtggaaaatataacatgttgaatgtagtcattgtcaaagtaattatttgagaaataataatgattgataaggagaattatgaaggagattaattacaatggcaatagtaaaagataagcatatagaatggcacacatgcacagcttttggtgtaaaatggagttgttcacttgattagagtttttatttaaaatgctaaacgttgttctatcatattgagtttttgcttcaaattatttcatcaatacgtctttatactagtcagtctttggacaataatttgaccaaatcagattttgaggcaaacacaatatgattctggccaggagtgtgccacattcgtggttaattttccactagtatttctgaaagtaaaacaattaaccacaaatcatcctcataacataagaggagaagattcctaacgacgaagcaaaattatcgaacaagtggacacacacaagaaaccgaaaatacggcaaaatgtttgttatgtgtatccatattttataccaattgaattaataaaataaactgtaaaaacaagaaacaattaataaaattaattttttgttttacaacgtgaataaaaaactgttgacaaaacgaaaataaaataaaccctcgagtgatgttaaaaaaaggaagaaggaaaaagaataaaaactcaaagggaacgcaacacactaaacaaaaactctttggcgtccttctccttagggtctatctctcttatcttaagcagcagcagcagcagctagaacaaaaacgtcaccgatggcgtctcaagctgcgaatctctgggttcttctaggtttaggtctcgctgggattcttatgcttaccaaaaagctgaagaagaccgtccgtgaagatttcggcgcttttatcgataaactcatgcttcttccccctccgcaacctgctcctcccaaagctcctcatcctctcaccggtctaacctttgccgtttccgacgtgtgagtctccgttgacttgtttccccctttcttctcccatatgtttatcatatctatatttgggggtttagctgaatgattttttccttgggtagagtcaaaattttgtttgacaaatgttggaatctgcgttgactcgactcgtaatcttctccggcgcactacatgtctgattctgagctttcgaaagtatggttgattgattttgagccgtttcactgaaaattgtgtttgttgtagattcaaatgtgtgtgtgtgtgtgtgtgtgtctgctagttttgtcaaactcatttcaaatcgatacttgttgaatctgttcattggaaggctctactgtttgatctctgttgctaggtgtttgtatgttttagattcgtcaccaagtttgacctcgacttattcatggagtcctacttataactgtctcaacatgttgattgactatttatctaatctgtgtatatctctcattctcttctatgatcttttgacttttgaagttcttgaaaagctaatttactctttctttccttttcatttgttttccagattcgatattacagggtatgtgactggatttggtcatccagactgggtcaggacccatgaagctgcttcgtcaacatctcctgtggtttcaactctcgttgaaggtggagccacttgtgttggaaaaactgtagttgatgagtttgcgtttaggtttgtctctgtttcataatgttaaattgttacctgtatcaggattcagattgtgattccagtgttgaaatttttattttatcaggatgttagtatattaattcctttgtttggctgttttcattttcttcagtattagtggagaaaacaagcattacgattcacctacaaatcctgcagctcctactcgtattcctggtggcgcttgcagtggagctgctgtagccgtagcaacaaatgctgtggattttgctctaggtgagttcagtagctacttttttccttgtttggacaatttggtatgagataaccgtatctttgagaaacaaaacattgcataaactttcaaaacatggtcaataatcttccttagaaaatttctgaaacgattgataatttatttatattgcagaaacttatttggcatctaatagaattgcttgatttagactcttatggctatatggtaagatagttccatgcggatttataatttatatggtagtctgtcattggctcctcctatcagtatctaaaatttcaactgtctactggttggttcggtttcaattgttttcagagtatagttttgattacttgcatctttgcaggcatcgacacagttggcggggtaagagtgcctgctggatactgtggcgttcttggattcaaatcttcttatggggctatttcaaacaccggaatcataccagtatcttcaagtcttgactctgttggtatggatatataaatctttgaattatactgtttgtggtggaatgatttggatcttatataggctaggtttcaattgttgtataatcacattgcaagatttagatgcctttgttcgtatgactaatttatatttaggaccattaaatgagcattacgttgattctgatcaatagattttggcttcaggatggtttgcccgcgatccaaacaccctacgtcgtgttggccatgtactcttgcaacttccatttgccactcaacggaatccaaggcaaatcatactagctgatgactgttttcagctgttaaagatccctgtggatcggattacccaggtggtgaccaaatcagctgaaaagctttttggaagtatgccctttactctccctgaagatcctccagtctctgttagaaattctgattataatagcattatcttgttttatatttaggacaattgctaaagcatcagaacttggagacctattttgaaactaaagttcctagcttgaaagagttcgctaggacaaaagccattgctaacacgaaggtctcaacatcgagactactggcgaatgtgatgcagctccttcaaaggtgtgcctattgtttattcacctacagaggatgaaaatatcttagttttgaacactctataacaatattggcattgtaggcacgagttccttcaaaatcatggggattggatcaacacagtgaagccagccattgatcctgtgattttatcacaagtgtgtgagaacccagaactaaccaatgaagagactgagaacctgaatgctatcagaaacgagactcgagtggctattggttcacttctcaaggtattcctgctcttccatgacatgtccacaacttgagcgagttagtttatatgtctcttgactaatctctaatggttcccaactctgtaacgttatgtatcaaggatgatggcattctggtaattccaacattgccagctgttcctccaaaacttggtagcaaggagataacatctgaagactatcaaaaccgagcttcaagtctgcttagcattgctagcatatcaggatgttgtcaggttaaatctctctctttctctctctcacctgccatgctagtaaagttcccctcacacatgttaaaagcaaccactgaccagtcagtgttagcaaaaccaatccacagtatatgtgtcttacatttatcgtgctgatgattcaggtgactgtgccactcggacatcatgagaaatgccctatttcagtttctttcataggaagacacggtggtgaccgctttttactagatacagtgcagacaatgtatccatctttgcaagagtactcgagtattgttaccgatcccaaatcttctaaaaaggctatcaccaaagaagagtcagccgagattgccaaagagaaggtcaattaatatccattgcatgtctcattttcttaatggcattatcatccataatctaatgtggttattatatctttgtgtcccgtgattatgtaaaccagggtaaccaagcgttcaaagagaaactatggcagaaagctattggtctatactcagaagctataaagctaagtgacaacaatgctacctattacagtaacagagctgctgcatatcttgaacttggagggtaaatgtttctcagatccttaaaaatactttttagtgagcaaatctttctatgtggcattgccttgacaaatcatttacatacagctttcttcaagccgaagaagactgtaccaaagccatcaccctcgacaagaaggtaactttcattaaaacacagaaacaggtttctcttgaaaaaaaaacactctttactttgtaagaacacacaacacaaagatcgtttttgatttctttcagaatgttaaagcctatttacgaagaggaaccgcaagagaaatgttaggcgattgcaagggagccatagaaggtaagctttaaagaacataatctgattgttttttcgccttgtagaatctggcagaatataacataaactctgcagatttcagatacgcacttgtgctggaaccaaacaacaaacgagcgtctctctcagcagagagactgagaaaattccagtgagcttcttttgtccgtacctcaccgatcattgagaaaacgtttgttccttagaatttgtccaagagtataggccaattttgtcaacacttgtcttttgcgtctgatatttaggcattttatctagagataccttttgcaagtccgccgagaatggaaaattataatatccgatgtttattttaaacgttctctaaaattggatatcaaaaagtaatgttaatcttaaacaccggataccggcattcccggtcgacttctagtcagcgtagcgtcaaaaataaggtcatgtctttaactatcttgtctttatcattttcttttctcgcacgttatctcctccccacgactcaaaaaaaataaacagaaaaaaagaggagtagaaaccaaagagacctgccctaatatttagcgatgatagtttgaacggaacgaaatctgacgaaagaaactaaagagacctttgaattatcttcacgggtgagttggttcgtttaaccttttttctttatctcggttgtgcttttccccgagaattaaacgtgtgttggttgcagcgttaacaaaaaaaaagggttgtagaaagtgagtaaggaagaaataatcaggaacattaataaaggaaatgacaacggcgtgtccggcgaggacaagctcactaatggacgatctcttgggcctccttagaatccgtatcaaacgtggcgtcaatttagccgtccgtgacatcagtagcagcgatccttacgtcgtcgtcaagatgggcaaacaggttaatccattcatcattttacaacttcacatgcaatttcattacatcaaaaacattctcaaattatcatattaaatcttacagaaattgaagactcgtgtcattaacaaagatgttaatccagaatggaatgaagatttgactctctccgtcacagactccaatcttaccgtcctcttggtactttttacttactaaaacatacattaatttccttatcataagatgtttatattgataaaactataatgttatatgtagacggtgtatgatcacgacatgtttagcaaagacgacaagatgggcgatgctgagttcgagataaagccctatattgaggctttgaggatgcaactcgatggacttcctagtggaaccattgtgaccacggttaagccaagtcgtcgtaactgtctagccgaggagtcacgtgtcacctgggtcgacggcaagctcgtccaggatctcgttctcagattgcgacatgtggaatgcggagaggtcgaggctcagcttcaatggattgacctccctggctccaagggtctatgaatcttttttcttttcttatttaccgttactttgagttgttttctttcaaattgaactaaaccaagtaacagcatggaaaaaaacaagtaatttcaatcttgaaggatatagtgaactagaaacacgtattaatccatggaaatataaggattaagaacgttgagggaagttttgttcccatatggtgatcgagtccaagtcgagtcgtggtggtggatatgtaaatgtggtgtattgttgatgtgtatgtatatttgggctagctatgccttaaataaggcatttacacgaacaactaatacagatattttatttatttaattatcgttccatatacttatgaatggtagattgttttaacacatgtgatgtactaatgtttataggtaaaaagtgaaaaaaagaccagcatattaccatttaccatcgacatcgataggccttttttaaaccattgacattggaggttttatgtgtacgttactgaagcacaacttatgtaatttttgtgaacaagatttacttgtacattagcgctaattaaggtcataaagaataatgatgaagaaagaataaaatatcgaagggaaaaagccagaagccacaaaagggatggtaggtgaagagaatccagatgtacactaatgagtgaagcaccatggttttataacgacaaaacacgtgagccataattgtcctttactatgagtggcacggcgactttacaataatgtgtcaaacgaccgtgacaagagtgaagtgtagtactagtatgtgatatttttctctatttaataaagtaaaagattcgactgtagtatgatagtattgagatatattctaaattatgtataaagtttgatagatcccaagggacccaaatctcgttccccaatgagcgatctagagattcctcttccaccaactccccaaagtagtcaacatttttttaccaaaacaacgatttatttgtagaataaaatctgtcaacatatatattgcatataaatgcaattgcaaatgtagttaaaaatatatataaaccataacttaaaatgagtgacagcacaacattaactaaaatacgcttattattattaccggttttgaccaaaacaaaaaaaatggagatatttgtttaattaccgactgatttgattttacagtctgtaaaaaaggccgaagtcgaaggtaacgccaccgttttccacctataaaaaagggcgcgcaggcaacatcacactctcacactcttttcgctctcagatctgaaaccttatctgaattacatttccccgattcgacgttgtgcgaattgatgcagcagagaggacgatccgtcaaccgcagatcacgaagcttctctagatccagactcgccgtcgaaggccactgaattactctctcccctctcttggcagatcttcttcttcgttttttcccgacaaacgacatttccgaaatggctgcatcgtacggtgagatcaccgatcatatgcttcgattatcgttgattgcttatattaatagaaattggagatttatggaaagagaagagactgtgaaattgatttgatttgttttttgttatttttggggtgagtagaagaagagcgtgatattcagaagaattactggatagagcattccgctgatctgactgttgaagctatgatgcttgactcgagagcttctgatctcgacaaggaagaacgtcctgaggtacccctgacattttttatataagacatttgaatcagtgaatgattttagagaattagctcttgtttggatgatacacactgttttgatttgaatgttttttttatttagatggtctagtggtttcttgaatcaggactgttgaattttggtttttgatgagttgatttataattcttcaggtactctctttgctccctccatatgaaggcaaatcagtgttggaacttggagctggtattggtcgtttcactggtgaattagctcaaaaggctggtgaactcattgctcttgacttcattgataacgttatcaagaaggtttactactttattcaccttctgagtcgatgttatttcgcttcattgcacatgatttgtaatcttgaactgaatgttaaatttcttctttcttgtagaatgaaagtatcaatgggcattacaagaatgtcaagtttatgtgtgctgatgttacatcccctgacctcaagatcactgatggatctcttgacttgattttctccaactggctgctcatgtatctttctgacaaagaggtataataatatgatctcttgtccaagacaaaaataatcttttgtaatgaggaaccaattaattttttaacggttttgtttggatgcaggtggagcttttggcagaaaggatggtcggttggatcaaggttggaggatacattttcttccgtgaatcttgcttccaccaatcaggggacagtaagcggaaatccaaccccactcactaccgtgaaccccgtttctattccaaggttcctacttcttttaaatccaattaaaaatttacattttcaggactagaatttcaaccatttagtggaagaacactagttagaatgcctatgcttaagaatatgtcgagacttatgaaagtttcagtggatttcgatttactgtattggtcaacaaatatgtagttagtagtttccaaatctgccttaacaaattattgagaacttaagttgattaagatcgatggtgaaacaatgaaggtctttcaagagtgtcagactcgggatgctgctggaaattcatttgagctctctatgatcggatgcaagtgcattggagcttatgtcaagaacaagaagaatcagaatcaggcaaaccaaaactctgcctatcaagattgtctagtttcctattgtaattagatcttaatcatgggtatcattctttgttttatgggatgcagatttgttggatatggcagaaggtcagctcagaaaatgacagaggcttccaacgtttcttggacaatgtccaatacaaatccagtggaatcctacgctatgagcgtgtctttggccaagggtttgtgagcactggtggacttggtaaaagctcaattcgatttcgcttgtgttgtgatgttctgtgtcttcatttagcagtacttatgtgtgttctgtcgtgtttcttgattcagagacaaccaaagaatttgtggagaaaatgaatctgaaaccaggacagaaagtcttagatgttgggtgtggcattggtggaggtgacttctacatggctgagaagtttgatgttcacgttgttggtatcgatctttctgtcaacatgatctctttcgcattggaacgtgctattggactcagctgctcggttgagtttgaggttgctgattgcaccacaaaacactacccagataattcgtttgatgtcatttacagccgtgacactattctgcacatccaagtactcaacatgatctcatagttctctcttggaagtttataattgtgaatgcttactcattctctcttttcttcaggacaaaccagccttgtttaggactttcttcaaatggcttaaaccgggaggtaaagttctcatcagcgactactgtagaagccccaaaactccatctgctgagttttcagagtacatcaaacagagaggatatgatctccatgacgttcaagcttatggacaggtttgtcttgtttgtcaaagatatttttttctattctcaaacccatttctctaatcccttcaacactgatcctaaatgtagatgctaaaagacgctggcttcactgatgtgatcgcagaggaccgtactgatcaggtaaatgaatctcatatatacaacaatattgaaaccaaggactagagtccttttaacagagtttctttttgttattgttttgtatttacagtttatgcaagtcctgaaacgtgaattagacagggtggagaaagaaaaggaaaaattcatctccgacttctccaaagtaagtgtctttcaatgtcaaagaaatcaaatctttatgttgtttacattaatctgaagctgtctcttttcgaagtttcgatgtatctcacaaacttgaataaacgcaggaggattacgatgacattgttggaggatggaagtcaaagctggagaggtgtgcatcggatgagcagaaatggggacttttcatcgccaacaagaattaagcaaatcgaaatctactacttctatgttttcttctttctttgtttgttcaataaaaatgtcatttccgctaggtgatgatatatgcctgtagtgtgttatgtggacttgttgagtggtgttaaatcttgtttcccttatgtgatatgtaaaccgaattatgtttggtcttagtttatactctttgatttgaagaattttctaaatgcatttgtgttatgctacttggtttatttttgcagttagacttcagttacagtgtgtttggtagaaccggatttgtcaaatggaaatttggctaccatttttggatatagttcaacttaaaccaaaccaggcatatatatccttgatttgggattgtgtttgattcagcggtttaccaaattctctctctatctaaaatgagacccctgttttgggcttctaggccccaaagcctgcccttatctgttaatactgcatatttcttgacttatattgcggattttttttcacacctatcaatatactgcataaatgagaaatgtttcattgtaggagagacctggagtagtcaaaaaataattcaattttctttataaaaaaaaaaacattccatagggtaccgaatagggcataggactgtgcaacatagtgtgtggatggaggtaaagaaagaaaagccttgaaatcacacaccttcaaaagactagattcgtcagactcctcctatttaggttttgacccaaccctacgtaccctctcctaacacaccacctactgttctatttctgtattcaacagtgtcaattccaatctctctcagtcaatttatttgcaatatctatccaccctttttcttaccatttgaaatctcccaacgcttaacaaaaaaaacgacatattgttacattttcgtagattttagaaagaaaccacaaatctatagaccataatagctacgtccctcagtagctagctaattaaaataatatatatatacacagagagaatttgatgcagtcttacattgtcagaatactgtaaatatagtagtacgtagtgttaatgtgtatgtgttgtatattattttgtcgacatgtatatatatacgtacacatgtgacatatatattgtaatgtttgattatgatgacctcatgataagagagatcactgacaattatacaatatagaaagcttgaaaataggctttaatcatatatttgattacttggttctttcgcaaagagagagagagagagagagagagatggtagaagagaatgaatcacatgaaagcatttaaaaccaaaataaggaaattgcagagagaagcgggtgagtcacagccaaccaatggtccacctcatgactgtcaccattttgtccctcacagacacacccctcctccagtcttgtcacattctcttctctctctcttcgttgtttaatttgtctgttccaccgctggggttattaacagtgttcaaattatcaatttattagcactattccacgatctttcctttttttaatgtaaattttagttacattttttatactaatgatatattatgtgctacatgactaaatctaaatataatagtataaaaattgggtctattttagttaacaatatatataccatgtacttatatttaactcataagtttgaatgagatttattgatggatttttctgtgagtttcttgtattagactttagctatacagctagaggtttctgtagctagggacaaatacgaattacccacggagaaaaccatcatgtgcatgattactgccacgcacgtatctatatactcttatatataaagcccttaatcaaaacatcaaacacgaatataaaactataaatggttttgttttttaacaagacaaacaaaagaactttacatggatggatcatgaaaatggacaaaatacatcatatatatatatatatatatatataatatgatcatgtgaattaatcatcttgaaattaccgatcatattcatgcaggattattcaaatcatcctctactatatgttttattgtgattaagattccacgtttgccaaacatgatacatatatcagtatatcacaatttcactaatcgtcacgtgatatatgaattcttatttgtagtgactaaatcttatagtacatatagtattattacatagtagtatcacacgtcactgatgatatactacgatgaatcaaaggccggagcagacataaaaaaaatcatgatccagggaaataaataaccaaaagattattaccgtacgattagactttacaattaatcttcgttacaattcacgagaagattcatgtttctttatttcctaacaacaatatctattgtttatagttcataggatcgttcgtgtggtaatctgttgactgtacgcttacccattaatattttctcttcttgctttttacttttttcgtataaaatttattaaagtgatgtttttgcttacttccatgctcgcaagaatcacaaacacacaatcatcatgaaaaagaaataaagcaaatacaaagagaggaatagatagggaatgataatgtatcaaaataagcagtacaaacaaataaaattacccacgatctttctcctaaaactattaataaagaaaagggtctcactgaatcgtacaaagagacataaaagaatgaatgaatctttgggaaaagaaaggaaagtgtcggggcttcttctatgaataagctattcagttatttttcttttcttttgtcttgtctcttctctactctaaaagtcactcttctttccttttctcaccttcccaccctcatatatatcttgtcattttccccatttgaaatttatggtggctaggctttcttcctcattcgttaatcatacatcttgtgatctaattcctttcatgctttcatcaaaaaccaagcttatcgaagctttcaatttagtttaaaatttgtcaaaatgttaaaattcgtacgtaagacatagatgaatgaaaatttagctagtgttttatgggaaatttttgtttaaataaatattaattgaataatatgttttaaactctcattcttaaaaaatataaaattatctcttactataggtagaagtagaaccatgacccgaatagtcattcaattttgaggaatatactgtatatataatagcaaatgtaaaggcatattgttcgtatgctagtgaagagaaaaacaaaacaagtgccaaaccaataatattttcccactctcttagtcatttcaacatcaacccaattctttttgtctctcgcgcatttataactcatagaaacagatccccacatacatacacacacacacatatatatatatatagatcatgcatgtgtgtgtagatattctttagaaataacgcatgaaattaaaggaaagatgtagagtaataacgagttcccattctcgtaacagattatcccatcaccaaagcaccaaatagcttcattcaccaaccaaatcaagcaagtttcatgatctaaaccctaagtcaccacatccacacaaatgaaaaaactattgggaaaatcacatgtctttctattcttttcctttttaaatttgtttggttcatttttaacaattaaagaaagtggtccaaagtgcattttaaggcaaacccttatgaaatgttaacatcaacaccataaagacacgcctgcccttactcctagacaaaaccctaattatcctttttcactctccctaactcggttgaataattaaactaatcatctaataacaaaaagctgtttttcttgaaagacttcaattaggtttagttcttcaatggcagaaactcatagaaacagtgaatgccactaatgttcttgtctttctcaccatcgctacaaaacccttcttttctcagtggaaacagctcaagtgtctgttcttgatgatccaattcaccgttggagcaatcttcatgttgttcttgatctttattatcatcaccatttcgatgacaagtctctgtgttcgttgcttctctcgtacgtagaaatacaggtgaaaccgtgaccgtatctttagaagcagagacagcattgttgctgttggacatgttggaggaaacagtaggtgaattgagaatgaggttacgttgatgatgatgatgtgaagaagagtagaaactaggtggcaactgcatcatctgccacgtggtgtttatccctaaaaagcttcgtctctcgtctcctccacaacgagcattgtgctccacccgtatattcgctggctcctccagatgataatcacgggaaggtttctaattatgcaaaagaaagaacattcaagatgtgttgaaattagtcaaattagcatcggaaaatgtaaaaattggtaacaaataagtcaaaatttggcaaagcgacaaactttatgcttaaaacaaaattccagatagggacaggggtgaagaagaatgagaccgttaaagaccagggtcaaaagggtcttttcaagcatgtgtttggagtgaaaaagcacattaatttatggaaattcagcaaaaacaagaagacacagagctaaaggatcgatcgtacgtagcagctgtgccgacagaaaggaaagtctctgcagctttttggatgaattcaataatctttttaaaaagatactactaatattcaaacaaaataaaaccataattatatgctaagaatatacgtatttttgcatatgctacaaaaatacttattttgaagttccccataaattaacttcttggtcttttccaccgcctcatctctctgccttttgtttttttctttcaataacttacccaaacttccaaaaaggaattcacttattcttagctagcagattctatttgtaatcatatgctaattatatatgtaaaccctcaatccttaattacactccctttcatgtaatagaaaccccaagaccattataaacacagaatatgagcaacatatatacataatacatatcataaaataatatcaatttagaaacaaatatatgtataaatagagatatatacctctggttgcgtgtcgcatccgaccgaacatatccagttcttgacctgttcaaccttgtaacctgcaaaattccagacatgaattttcaaaccgtcaattttgaaatgaaatcaacccaaaaagacattctaatccaaaaagacttttattgtttgaatgttaatccccaagttctgttatggtcccttacctggaggatctttcttgtcgaatccgtggtttgagacaagacttgctgttgaaaggaccgtttcttcgtggccagtttccatttgtcgccgtcgtttctggcgttctcgggctttgtggttttggaaccaatagaaaacgtttttgccttctatcttcccgtaccgtcgtagctgtgcggtgatttgttggatgtggtcggcagaaggagttctagttccttgtcggtaaagctcttcaagaacccttaactgatctggtgtcggattccaccgtgagctcaccattaccggtggatgttgaggttctgagtttagcatcatcagctccctcttgttctgctccgccgtcatcgtcaccactgctgtgaaaatcgtaaccaaagcaagaaaatgagcattagaaacaagggaaagagagactggaaagtttcaccaaaaattgacgagagagagagaaagagatacccatattaaagcggtggtcggagttggtgtttacggcggcggtggggcaagaagtgagacgtgggatgagaggacgaagctttcttcctccgttgaaggaatctgcgcctccttcgttgtaacccatcgtccacattttggtgtgtacttaatttatatgtatgtttatagaggagaagggagagagacagcgatatagcaagtaaaaatattagggctttgtttgttttatcgaaactgaggagatgtgaatgatatggttgaaggagtaatagacaaatggtagaaagtagttttggctattttggcttatgggtttggagaagagtgataaagttgagagatatctttgtatgtgaatgtgagaatgggagcatgcaaatggggtggttttgtaagcacatatgtgtgtgtgtgtatatgtagacaatttaacacatccttttatttatttctaaatacagaatattaacattctacatatgaatagaaaagtttattttattttatttccttttattccattcactttaaaaattctcaaccgtcctgcaaaatcataaatatgtttgtatagaaaagaaacataacattatataatccttgattagtaaacgacctatatatatagtactttcccatgatgaaattttatcatatcatacatttgtaggaagctatggaatgtttgtttgcacaatacgattaatgtaacatgtagattcatttaactaaaaaaaacatgtagattcatagacattaagcttagattgcatgataaaagctttcatgtacaatgtgtaccactagaatgctaatcaaaacgtgattactctgcggatgatgtaagtacttttaaccactatacatagaaactgacatataaatagatttttaaaaaattaactttcgtcccaaccaaatatatgtcacaaaattttataccctagctaaagcacggtgataaaactatacacctaccctgaacacgtaataaagtacagtgatgataattgacaaatcactttaaatttgttaagcgaattcaataaatgcagtgatcagctatatatggaatttcactaagctacataattttggaatgataaataaaagaattgaagctaggaagatgaggttgactagtaaaagaggagagagaggatcggaggggcgtggaattctggggggatatgatatgaatgatatggggagatgcgaaggagcttataacgacgtgacattcctcccatctctccccatcactccttttctttcattctttttttcttttggtttctttcattcattttttatatatcctatagtattagattaatatgtctttttacgacgaatatgagatc

SEQ ID NO: 435 - DNA, 6588 bp, Arabidopsis thaliana
cctaaataaatatgtgtatgtatgtgtgtgttgtggctttcactattattcttgttctcaactgccccataggctttgtctcctttacactcttaacctcttctccttttgtctctctcaaacaattgcttttccatagataaaacccttttccttctttcttctctttgggatcttaaatcccccttttctgtcttttcccaagccctaatctaatccttttgttttttctcccttttttggaaaaaattgtaaatatattaatccctgagtttgaaaaagatgtaccaaaaaatgatctaatttgctttttatttgttctcatgtttatgtgatcaaactatatatttccctcatttgtttgagatgtagcgatggattcaaggtgtaggtattatataatgacatacatgaacaaagtgattatctcaatttttattttgtgatatatctttcaaacttaataaatatgattttttttagaaaaatcgatgaaatcttatgttttttctttctttctgaaaaatgataaaatctcatagtttttgaaatatgattggcttacaactgaattgtgtatcacttaatcaatctttctattttttgttttaaagaaattacgataatcattcataatttcatatgatcaaaattatggctttcttcaaacgtcaagtactttttctgagttgcaagcttgttatcatacgtgatttcgcacgcactctgaatcattacgtttctttttaacagagatattttcaagcatgattttttttcttttcacacttttatattctatttattaggtaaattcataagaataaatgaaagattttggtggaaaaataatcacattgagtgaacttaactaatatacaaaataaatataaaaaattgattaaaaagaactctgggcttatataaatcagactttggcccaatgaaatcggattaggcccaaacaagctataaatgtcttgtcgtataaaaaccggttttgaaagagagaaacagagattgctacgaaagttatgttcttcgtcactcgtctgcgactacgagccagagaaaatggcttcttcttctctaaatccctctctttctcatctgcctccgtattgaaatctgatgatgtcgaaggagaagatgatgcaatagaagcagaagatcgtcgacgcagtgtaaccgatagagcttactggagaagacggatacacagtatctgcgccgtacggaggaatcctgacgaagctcttcggattctagacggactctgcctccgtgggtatcgtcctgattcgcttaacctcagcagtgtgatccactctctttgtgacgccggacgatttgacgaagctcaccgtcggtttttactcttcctcgcttcaggttttatcccagacgagcgaacctgcaacgttatcatcgcaagattgttatattcgagatctccggtgagtacgttgggagttatacaccgtttgatcggtttcaagaaggagtttgtgccatcgttgacgaattacaaccgtttgatgaatcagttgtgtacgatctatagagtaatcgatgcgcataagctagtattcgatatgagaaacagagggcatctcccagatgttgtgactttcacaactttaatcggtggttactgtgagattcgagaactggaagttgctcataaagtgttcgacgaaatgcgtgtgtgtggcataaggcctaattctctcacattgagtgttcttattggtgggtttttgaaaatgagagatgttgaaacaggacggaagctgatgaaggaactatgggaatacatgaagaatgagactgatacatcaatgaaagcagcagcttttgcgaatctcgttgattctatgtgcagggaagggtatttcaatgatatttttgagattgcagagaacatgtcactatgcgagtctgtgaacgttgaatttgcttacgggcatatgatagattccttgtgtcgatacaggagaaaccatggagcagcgaggattgtttatataatgaagagtaaagggttaaaaccgagaagaacgtcatacaatgctataattcatggcttgtgcaaggatggtgggtgtatgagggcttatcagttgctagaagagggatctgaatttgagttttttccgtctgagtatacttataagctcctaatggagagtctatgcaaggaactggacacgggtaaagccaggaatgttctagagctgatgttgagaaaagaaggagcagatagaactcgaatctataatatttatctacgcggtctctgcgtgatggataacccgactgagatcctgaacgtactggtcagtatgcttcagggagactgcaggcctgatgagtatacacttaacacagttattaatggattatgcaagatgggcagggtggacgatgccatgaaagttcttgatgatatgatgacagggaagttctgtgcaccagatgctgtgactttaaatactgttatgtgtggcttgctcgctcaaggaagagcagaagaagctctggatgtgttgaatcgcgttatgccggagaacaagattaagccaggtgttgttgcatacaatgctgttatacgtgggttgttcaagctccacaagggagatgaagctatgtctgtgtttggtcagctggaaaaggcgagtgtgactgcggatagcactacatatgcaataatcattgacgggttgtgtgtgactaataaggtggatatggcgaagaagttctgggatgatgtgatatggccatcaggcagacatgatgcgtttgtgtatgcagcatttctgaaagggctttgtcagtctggttatctaagtgatgcttgccatttcctatatgacctggcagattctggagcaatccctaatgttgtgtgctataatactgtgattgctgagtgtagcagaagtgggttaaagagagaagcgtaccagattttggaggagatgaggaagaacggtcaggctcctgatgctgttacatggcggatactcgataaactacatgattctatggatctaactgtggaaagagagttaatttcaaaccctgcaacctcaggatagactgtttcaaaagcaataaaattcatgttttggggctcaaggatcttgcattttgatatcacgatcactggtaaacgtaaaaaagtgggcttgtttgtttctctgtgaaatttttgctggcaaattcaaaagttcagtgagctattagcagaattgaagacaacatttaagagcgaggaaaagaaacatagacatttctacagaaacagagtggagctagtagtgcaaatggtcctccagatacatcaatccagacagctattttgagatgtacaagaaaagcaaacagactgataaaatctactattatctaagatagtgaaaacagatgattttccacaaaatgcatgttgtggaaatcatggttttaactagttccaccggtttgctgatgagcctgagactcccagaagagtctgacagtggaatagataagagagggctcagccatagctccattaccgtagtctccacaggcaagtctcttcttgataggaggaataagtgtgattcccagttcatcaagagacaaaagatgcctttcagtgaaaggattgttccacatcaaagtattcatagctggagcaacaaacagtggtttggtatagtcccaagctcgtataatgcaagtcagaagattatcacaaagcccaccagcaatctacaaaggtacaacaaaaatatattgtatgaattgaatcctccatgaatgttttcacaagtcacacaattgaatctaagtagttggtttagggttttcgtcgatttgttaaattaccttgcctaaggtgttagcagacaaaggagcaatgactaaaacatcagcccaacgtctaagctcgatgtgaaggacaggatcaccgatcttgttccagctagaccattcatcttcatcagtatacagagtcacttcttgtgggagagagagtttatcgaggaaatgtagagatgatttcgtaacgacggctctgacttctgcccattcggtgaagcaatggcagagattgccgaatttgatagcagcgacgcttccacttgcagcgagtagtacacgaggcttcctcggtgtggtattcacttccatgtcttgtctgtctcttttcccattctccatagctcttttacaccttcagagatctagcaaagtagccaatggttcggcgaagaaccctaaccgaaaaattgatctggtcgaagagaatatcaaaatgttttagagggaagagaaagagagaggcccgagaggacaatcattttagttgctggtcaaatgggccattgactcactcttttttaggcctcggtcgtatgggctgtgaatatcgatatatttcattttatatttacttcgtttggactgcaatttcgattctgagttcgactgttgtgttaactctaacatgttttcgagtcaaagttatatagctttttgagccaacgtgagatggaaatgaagatattattagtaagaaattaagtaagagtcgacctgctaaaaccgttgggtggaaaatagacacgaaaacatctccacaatgtgcaaagcggaagcagagagcagaagacagattgaaaaaaacaaaggcacagacgcaataagagattattaaagatggaagactagaaacatcgctaatttacagccacgtcttatggtttggttaaagacacaccgacaacaacaccattaacgagtctactatttcttcttctgcagacaacaaaacctagaaaaattaaaattccttatagatttttatataatttaagatgcgattccaacacctaaaacaactaaaaaaaaacactcctaacgccaaacaccaaggctattatgtctaggttgttttctagatcattattattcttcagaacagagcttcttgcattgcctctgcttctgtctgggtctgtgtttctccttctctttcttgtccttcttcttgtcctccttgtgtctcagcagcttcagtttgttgagcttcagtctgtggtgctgcagtctcctctggctgcacttcttccataacttgtggctcaacggtctccgtcactgttagtgcttccagatcttttatggcttgcaccactgcttgattctcacttgtaactccatccttcaacaccttcacaatttctttcactttctcttgctgaaatcatttacatacaaaaaccaaacataagcaagtagaatcgaatactttaatcaaataaaggacagccaaactgtttattgtcaacaagtagacttacaaaaatatcaaacttcttcttgagttctccagaatcttgtgtcccagtcgtgactgatgttccaatctaggttcatgaaccaaaaaataaaattgttggataaaagtataacatattcaagaaagacattaatggttaaattaagaagtcttactttagatccaattgaacacgttactagtaaaatagaagatacagagaagaagacactatgtgatgacttagaaaccattaagccggattaacacactaattgatgataaaattattcctagctatagcgatacattaccgactattttggtcttaattatccaaacgaaaattaaaataaaacagagaaaccagataaggataagccaaaagtaagggacacgaaaatataataaaaacactagatactagtcagattttggatacgcgaaaacagacaacaatgctcaaaagcggaaagtgacattgagtttgaattccacaatgattgcaacacaagtatcaaactttatcaatctaaattgacggcggagcagtgaacaatcatgcacagtaaacgtcagatattgcaaaatcgagatcacgaatacagaattgggggatgtgaaaatttacctttctgggtctacctacaggacgtcctcgtcctctcttaggcttcataataagcctactgataacaccaccaatcttaggtggtcgtccacgtccacgcttcatccctggcgcaaccgctgccacattttcaccacctactggagcaacactaacaatactgctagggtcaacaactctcctaggccttcctctgcgtctagcaccattagcaacataaggatacacagaggcagtagaagaaacggatttgggcttcctctgtctcccagcagctcgacgacccggtggtctacctctacgtttcataattccagccataaccgaagcttgaacgattggtgcagtagcaggagcagcagaaccgttcttccttggacgaccaggtcctctcttcgccgactctgtaaccggagtcggaaccggaacaggtgattgaacttgctgctgttcccagattggctgtccgttagcctggacttgattggtcggtggaagttgctgtagtggttgtggttgagattcaggtttaggcttaggaggacgaccacgacctcgtttcagaggctgagaagcagagccagaagccatgggatcgttgttacttgaatggagaatctca

SEQ ID NO: 436 - DNA, 76816 bp, Arabidopsis thaliana
gatctgggaacatcgagaccttgagcggcggcagcagcagcaacagctacactagcaggaggagtagaagaaccagcaattttgtaagatttcttaaccatagaaagaacaccactggtcttcaaagtcttgagatggtgagtcaacaaagcagcatgagcagaagttaaaccggtgtaacatctctcgatgtatctcgaaattgccatcttgctcgaaccatccggttcgtttaacgccgcaatcgcagcgcaaatcatctacacacagaaaaaaaaaattagtaacaaaaaaaaaagtaactgaatttagttataaaggaagaggcttttaagattgaacttacttcggagtaaggagggtggggcattgaaacatgtggagataactgaaacatctgcggttgcgggatttgcgtttgcgtttgcggctgcggttggaagacgacatggttattgtacggatttggtcctaaaggatgatgattggaggtgggaaaatgaggaaaaggggtgaactgaggaggatgatgaggatcaccaagagatggatccatggatgtgagatttttgcagagcaaagagaagagaagatacagtaaaaaaaaaaaaaagaacaaaaaaaaaaaagacagaggtggaaggtgagatttagatttagggtttttttttctttttttttgttttttgctctgagagctcttttgatttttttgtttttgtgaaaataaaatttttgtgagagaaataaataaagttaggttggggagagagaggcggaggagtagagacgaaaggatgagaagaaagattactattaaatctaaccgttgatttgttttctatcgacggttttgacgaggatcgatgacgtgtcatatcattttgtcttttattttaaggattttgtgtttctttactttgatttttttcatttttgcctcttagaattttgctacattttcgctccaatgtaataaaaaatcaccaaaattttaaaaatggaccgccaaaattttaaattatttttctgaaaagaactcctcgctttcagtgtaaaacaattttgttgattttagaataacatcgaatgaagtatatagcaaacactgttacattaagtaacccatgtaacaaactccattaaagagtgtatgataagtaagagatgtattgagatgagtatggcaaaacaaatgcaattactaacttctatgtcctctgtttaggatttgaaatcgatacatttacataaaatttagtttcaaatttatattttctgtgaattttgttagagtatatatctatttgcgaccctttaacttaatcacaaaatgatacatcaaatatgtttttcattaaggaaaaattacaagacattaaaatatttttaaacagtaatgtatgatatttacatttgaattaaattttaactttagttgcattttaacaaaatatttgatatatatatatatatatatctatatatatatatataaatgtacgacgtaaaacaaaaataacaaataaatgtaaacctcttattatagatgatgaaagataactttatgaaaaaaataaaatatggaaaaatatatttaccaagtgctaaatacatttttcttttgtcttgtatcacaaataagcgtgatatatttaaaagaataattgaaatattaaatgatgaaagataagttttaaaattttcaaaatatggaaaaacatgcaattagtaagtattgattgcaaattttaatttgttttgtacaaagaagcgttatttatttaaacattataataaaaatgataaatagtgaacgatgaatttaagaaaatttaaaatatgaaaaactagaatttataattgtttaatgcaaaatttataacaaacaagcatttttaacgggtaatgtaaaggatacaaagtgagcgataattttaaagatatttagtggttttacatatagttaatgttttttttttttttttagaagaactttttttttcatttgacattttaatattgtttaatgaacttttgtgtattatatgtgtggattcaaaagggtagttggatagatttcaccatttgaattttgaagtagcaaatctcaaataaaatcaatgggactaagaacaattgataaatctatgggggaacaagtgtcacacctatctccttggtaaagccagcccatacatcacggtacccaaaaagaatcatccaacaagagaattgttggtacatattactgacattacaatacgatattataaagagtacagtacgtttatgcttatgcattaagcgcaagtaaaacccgatatatgctcatcattcaaactccaagtatcacctgagtcgtgtcgttttcatacaacaatttatgtatgctcattcttttaatactaatatatctgtgttgtgatgtgtgcatgcgtgtgctcgaatactttcaagcaagggtcaaacaaagtgcggctggtaatagacgatcagaagacacaatcaccagacaccaagtaagcagatgacaaaagacgatcaccacaccagaattccaacaaaacaaaagattatgatatgttttgtcgcctctgatatgtcacactacacagtacacacaacctcttataaacaacacttttaacgggccgaattatcagccttcaatataatgtttacttatgtgatggacctcaacattacatgggcctatctgttgcataattaacagttttaagacccttttatttttctctcgaatttgaaatgatttgtttatgttttttatttaaatgtttttgcatatttggttgggtcctctcgagtcacacacgaccggagacgtgcattagaagagttacagagcagacatttgctggcatcttacaattatctcaaacataaccttcttttattattaggctattggccctacccaccaccaccatttttattttctttttctcaaacacgctttttgaatttcaatattatatactgtccttatcaaaaaatagttatacgatttgttaattttgttagcctaatttttcctaatctggttatgtcacggacgcaagttaaattcatctgcggtgtttttaggtgttataaagccatgtgaatgaagttaattaaaaaaaaagcaatgtaaatagtcaaacatgccctttaagaaaaagagaaacacacgcttcacgtgagtcgcacgtgccaaacccacctttcatcttcttcttcttcttcttcttctatcttccgcatccttcggacaagagaaccaaaccagccaacaaaaaataatagtaatggagagtcgaattagaaagagagaagcacgccatacctgagagattcgtgcgtcgacgacgtgaaaatcattattatttactaataataattgttattgtcaatcgatgataattaaattaaaattagtttaaaagtggtggtggaggtgtttgatgggtgctagtcacagcaccaacgttaataatcatcctcattctcggaatgcttctaatcatcctctgaccaacagtaacagcaccagctctcgtcactctgcttcatcaagtgatcgcttatctgttagtaatttacggtctcagctcacaactatttacagaaatcaggaagaagaggaagaagaagaagaagaagaagaagaggaagaagaaggaggaaaagagaaaagagcagaagaagaagcgaaaagtttctcccttgttagagattttgatttgtctggtttgaactgcattagggtttctagaaggaattatattctcatggatcctcataaaaaggttcgtttttgttctctatgtaaacgttttgggtattgcttgctcatatggatctgtcgtttcatttatctgtttgatttctccagatttagaattgatttttggacctcgtaggttttgttgccttttgtgattatgagtttctgtttaatttctccaactacattggacggggaactgtagcaaatcattgtttaattactgggttttagttattagattgaaaaggtcaacactttttgtgattcttatccaaaatttctggtgtttatttgcttgggaaatggtggaaaatgcaaagccatctctgatcatttggatcttttatgtggatttggttgcttcatgttcatgattttgcatttttcgcctcggctttatgccctctggaattatcttactctgtggcaacttaccttatatacgtgatctgaatttttttttagaagtagtagaaatgctacattgttcatttggtttcttcttgattatgtttcctttgcatcggctcttaactggtttatgattccgtatagtctcaccctgaatctatggtaccttataaagtctagaagatacatatgatctgtagagtttggagaactaggcaaaattcttctcagttttcatatctttctatctaaaatctgttttggtatataatgctactattttaggttgcactggagactgagttctttacagaatacggtgaagctagccgataccaaatccaagaagttatagggaaaggaagttacggtgttgtggcatctgcaatcgacacacattcaggcgaaaaggttgccattaagaaaatcaatgatgtgtttgagcacgtctctgatgcaacgcggattctaagagagatcaagcttctcaggttgctccgccatcctgatatagtggagataaagcatgtaatgcttcctccttcacgccgtgagttcagagacatttatgttgttttcgagttgatggaatcagatcttcaccaagttatcaaggcgaacgatgatcttacacctgagcactaccagtttttcctctaccagcttcttcgtggtctgaagttcatacacacaggcgagtgccttggcttgagaaattcgtgtttccttttgtccattactgcttttcaaactcaatctgatggaaaacttttttattcgatacagctaatgtgtttcatcgtgatttgaagcctaaaaatattctagccaactctgattgcaagttgaagatttgcgactttgggcttgctcgagtgtcctttaatgatgcaccttcggctatattctggactgtatgctactcaatgaaatcataagtttctttttttctatattctctgatgcattaagtgttgtgatcaaatggttttcgcttctttgcaggactatgttgctacaagatggtaccgtgcgccagaactttgtggctctttcttctccaaagtaaaatgcaattctctattttcttttttgcaaaagttgtctgattcacatattatgacaccacaacctgaggttaaaacggattattgctttctttgctgcagtatactcctgccattgatatatggagcataggatgcatatttgcagaaatgctcactgggaagccattgtttcctgggaagaatgtggtgcaccaattggatattatgactgatttgcttggtactcctcctcccgaagctattgcaagggttagttggtagagttatctatttctgtttgctaaaacttgcatgctagaatttctgtgatgtcttatgacttatgaattaaaagttttataaaccatgactatttgcttactagtactttccggccacagttatgtggcaagtagtttatgctagctttggttggattcatattaattggtaggaaaactcacttaggtatgtgtcccacagaggtatgggaatactactgttatatcattactagaccaggattgattgtatcagatttctatttcctgtaatgatgatcagtgttttgtgttgttgcagattcgtaatgaaaaggcgaggagatatctcggcaatatgaggagaaaaccgccagttccattcactcacaaatttcctcatgtagacccattggcccttcgcttactgcaccgtcttcttgcatttgatcccaaagaccgtccctcagctgaagaggttagctcctctatacttgttttttctagcgtttccacttcaaaatttcagagcagtttcaatcgctctcagaaaaggaaacattatatatacatgtgtgtgtgtatatacaggcactggcagatccttacttctatggtctggcaaacgttgatcgggaaccatctactcaaccgattccgaaactcgagtttgagtttgaaagaaggaagataacaaaagaagatgtgagagaattgatctacagagaggtacactaatctcttactgtttttgcttcactaaacttgtttggattgattaagctctgaacaatggcaaaatgtatcttcttcctttttcgcacgtatccatcgggtaatcgtaatccttacaaaagttgaatgtgatgcagatattagagtatcatcctcagatgctgcaagaatatcttcgaggtggagaacagactagcttcatgtacccaaggtatataaaaacatttagaatccgtgttcaaaatttactacgaattatgagaagtgaagataaagattttgtaatctaaatgaaaatgcagtggtgttgatcgctttaagagacaatttgctcatcttgaggaaaattacggtaagggtgagaaaggctcacctcttcaacgccaacacgcttccttgcctaggtatacaatttcgtttgttggtttgtcagtaaaactgatttcccggattcttttaaagtttgcatcatctcattccattatgttgtgttggaacctcttctgtttcagagagcgagtccctgctcctaagaaagagaatggatcacataatcacgatatcgagaacagatccatagcgtctttagtcacgaccctcgaaagccctccaacgtcacaacacgaggggtcagactacaggaatgggacgagccagacgggttacagcgctcgcagcttgctgaaaagtgccagcatcagtgcatctaaatgcattggcatgaaaccaagaaacaagtccgaggtaaaatatcaagaagcattagatgagatgtattatatagtacaagtttgtctacacttgttcttcagattcttgagttttttgcagtacggggaatcaaacaatgatacggttgatgctctgtctcaaaaggtcgcggctctccacacttgacttgtttcagagattgaggattgaaacttgttgctaacagtagacggctgattctacaagtcttgtacacatctctcagagaagacgaagaagaagtctgatcttgatagagatattgagagacatgactcatgagctatgaacaaaacaacttaaccttcattggtcttcaatttgtccatcaagtcgagttgtattaaaaatggatggagaatataattaaagaagaattgtgttaacccctggatttatgcctgacaagtatttgactttatcaggcattataaattatagttaaagtgtgtgttttcttcatgacccatatgtgcctaacctaacttgatttactgctgaatttcttctttttagtcgtcccatttactttttctttgttctcttttggtttacttactaataatctctttagagctggtgaaaatgctgttacaagctctacatatcataaataacttgaaaagatcaactttaaagtagtctataatatacaataatgggatcaattacgaggaaaccatagtaaagtatggtctcttctgaattcaggcatattctcaagtgattataaggatgggtattttctttttctctaaaagactaatttatccttttattgtttcttcattctttcttccttcttcaagctcttgattcagatgcgagtttgatgaagatggcttagttgctcatgattcacaatcagattgttttacagttgagatggatcgatctgtgtctataattaaagcctttgggttccctaaacatcatcccttagggtttagttttcttgcaacaaaacttgtttaattagttccattggattcatcgaaaaaggttggtcatagaaatgttgtgtgaatcatcggaggagaaggaaacgagatttgattgttgattgattcaaaattaaatctgggtatttatcgtttgtggagttatgggtttagtaattataggaagttccgataatgagtttatttttaatttggattttcatatcatgggttatgggtagttatcgtcttctttgtacttctcaatttcaatttggagacagtgaggttgttgtctcacgacggagaagatgaagatcatcatcaacacattcgagggcaaaatggtcatttacagaccaaaaagtacccagacttataagcccaaataaaatatgtttctattctaatttttgggtcaaaatatgcccatatgtacaaaaacccctacaataatgttgtaaattttagtttcttcttttactctatagtctaagtctatatccaaattgactgactaagtttatttttgatatgatatttgaagtttgaacacggtaagtatattataaatttaccatttgtaactctatagtaaaatagtctcttgtccttgtgacgtaagtgaatccatcttgcattacgttatagatagatacttttgtaatggcattcccgaaaaagggttttgtagtgttatagtttaagcagctttcactacaacaaaccattcgcatgcctgacattacctttttaacatggagctccacataattctttctttttcctttttactatcaaccaatagtgttttgtgggtaaaatggatataaaagtaaaattccatgaacatacttgtactattaatctcgagataaatcctagactcctagtgtttatgttcttgtggtcgtcgtcgtccaactagttcttgcttcaacaaaataagaaacaaaacaaaaccaaattaatagagactcctagaaatcaaaggactaaaaaacacttggaacaaaaagacagaagttagacttctttttcttttgagatagaatattttttttatttcatggaaataagagtaaagttgttatacaactctttatttttctttatcaaaaaaatgttttattacaactcaaaagtttcatgaaaattgacaaaacagctaaagtataagtctataaccataataaaactaatctgacgacttttttcttatagctatattagtgattgaaaaaattgcatggtctcttgttttccatgacatttaagttgcgaaaaattaattgcattatattgtaaactaattaacggaaaagtttatctgcattacgagacaaacacatgctagtactataattttgtagtttatctgcattgttgaaatcggactctgctaattttattgattatacagattacatatcaaatctagtaaatatgtagcgtttaaaaataaaataaaaaagtactcaaatatgataagctaaacttaaacgaatccttccaaactcttatgtattgaaattattaacaaataacagtgaacctgtcgatcacttgcctctgtgatctttcaagtttcaatgcaaagaacaatcgtcccgtgattcacaaccctcaatattcaactaaggttaccctaataagtaataatccaatatgatttcattattcataaaatagtcgccagcatggattacgattaaaaagtttattttttctattattgtcctacacactgaaaaatggagtgttaacgaagcataagaaatgttttgtaattttaagaatgtttgatcacaaatttttttccactgatttttttacattattaaaactaataaaaaaactgacttagtagtattaaattggtatatatcgagatcccatttgtgatattttattacacatctcttccagtctctcactctttgtccctctctctttctctattactctgtctcctctgttccggcgatgttccaacacgcgccttcttccatttccctcatcatcatcttcctcttcaccattctatcacccgtttcacctgaaccggtcacagtccagccattccgggtcaaatcatccccacccgcaaccatacccgctttcccggagcaatccgatttctccggctgcccactcgatttaccagaagacctcttccacggcatcaagtcagcttgcagcggcaaaaagctccacaaaggaaaatgttgccccgtactaggcgcgtggctctactctgcttactcaaccactgctctaagccgttcgatttccgccgccgcaagaaactcatcctcctcctccgccgcggtaacgactcctgaagaagatatgcctttgcttcccgatgactcggagacttgcgttgacggattagggaaatctctgaggcagagagggattgagctcactagaccgaacgagacttgcgacgtcgtttactgctactgtggaatcagattgcatccgttgagctgttccgaggcttttagagtgaatgatgaagggagactcgttggagacgagagagttgatagattagagactgattgtttgagtggaagccacaacaatgctgatggattctcacctcttcttggttgcaacaagtgcttgaacagtctctataaggtaaagtcactaactttgctgctatatttagaagctgccactgtgaagttcaaatggaattaggttggctaaattggtaaaatgtgtgtgcaaatctagtaacttttagataatctatagataccctgaagcgttgttggtgtttagcttctggattttgtttgattgactgattaagacaattttttggatgagtaatgaggaattgatggactagttatagtagttaactatgtaaggtttagtccaaagtttagaagcccttttttaatgatatttatttggtgtttaaggattagggttttactatatgagtgagtgaagatttggaattatgtagtttaggattctttctgatctatccatcatatggcgaatggtagtaatttgggaaaagttttgttctttagctttttgttctctttctatctgacagtctgacacacatatacgcgctaacagaatccgtgatctccacgcgacgttttgtcttccatcatatgatttcattcttctgcatcttaatcaccaacccaccatagccaaaagcttagcaactagttgccacctttctactttctacaatcctcaatcattactttagtcagcagcaacaaaccctaatcaaaacaaacacttctgcttcattttgcagctaaatccgaagaaaacttcagggacaagaaacccatcaaaggaagaccgaaacagaacagcaaagatgcacaacaaagactgtgtcctcatgggtctcacttggcttctcgctaagaaccgtactgcttatttccccactgtcacttctgtcctccgagccgtcatgctgaaccacgatggcgtgccacgttcatgtgctctcggcagcgacggcatgcctttagccgtcgattcttccgaattctccaacggctcgccaacttcacttcagtatccgcaccacttggtccacttcttactttacagcgttatcacattagtcctaataaggtcgtggtgacgtggcacaccatggttggatttgattgtgacgtggagcacgtggcattacgtggttggttgagagaagtgaaattcagatagagagaaagagagagggctttggttctgtctttgtaaattagttttttggtgtcgttgttgttttagtagccatgttctttaacattttattacatcaaaaaaatcttgttgtattttgtcaattaaatattgaaaaatcacaatttgaaaatatttcaacaatattttcggtcatatcaaattatatgagcgcaatcaatataaatatatcagtttttgggaggagaagaataatagtcagagaaaggcatgtgagtaatggggacgaggtggtgtggctggtttgagagagacagagagacttgtgacagctttgttcttatgtttccttatcttctctctaaccacggatgctcctataacaataatacattcatgattcatccctatcatattctatattttatatgaattatcaatgcgaccaagagatgtaaaaagccccacgactgacactttattttctcatatagttcaaataatatttcattcaataatcgaatgcttccattcgttagatttttcctttgagaaatattatgaaaaagatatttcataacattttttttgtggtagtgattagatagaggttcactaatgcgccaatcaactgctagcgattcattgactttggcattattgcgtatataactgggctgggctaaactaacttgcccatgggccgcacatttacctttttggccaaataacacacccattagtctaatctaaaattacaatggtaaaaacatgagagattgaggaattgattaaaatggaatgaagataatagagaaataatttggttccactcatttctaatttagtagaaaatatataatttttcaaaattgttcataattcaaggtatttccaacaaaaatcaatggaagtttattattcttaatgttatatactactctgcattatgatatgtaagtcttaagaaacaaagtgattagcacaaaactattatacaactacactttacattatttttgggttatctaatgagtttgtgccagagaagtgaatgttgcaacaatgattatcattacattatctttctaattacaacaactaaatattaacaaatgtaatgtcaaacaaaactcaaaaagactcaaatccgtccttccattttcctcgtctctcttcttccccgtaaacccaaaaacaatctctgcaaagtcctcggttctgatggagctttcagaaacctatgcttgtgttccatcgacggagagaggtagaggaattctgatctctggtaactcgaagtccgataccatcctctacactaatggtcgatccgtcgtgactctcgaccttaacaatcctttaaaggtctctatctatggtgagcacgcttacccagctactgtggcgcgatattctccgaacggagagtggatcgcgtctggtgatgtgtcggggactgttagaatctggggagcttacaacgatcatgtgttgaagaatgagtttaaggttttggctggtcggatcgatgatcttcagtggtctgctgatgggatgaggatcgttgcttctggtgatggcaaaggcaaatctcttgttcgtgctttcatgtgagtttggttttgctttttagataaagatttgatttttatagtgcttagctcaatgttgttttcgttgattttgattgatcggactaaaggttttgtttttctgctggtgttgcttttattttgttgaatcggatcgatattaatcagattgaaattgagcattttgtttcttcttctcaactttgatggattattgactcattgtttgtcttggtttattaggtgggattcaggatcaaatgtgggagagtttgatggtcattctaggagagttcttagctgtgctatcaagccaactaggccgttccgtattgtaacttgtggggaggattttctggtgaatttctatgaaggtcctccttttaagttcaagctctcaagcaggtcagatattcatgtgctccctttctttaaagaaatatgacactttcgatatctgtttaaatttcctgcttgtgagtttctgaattgtttacgagattgctgtttattggtcgacagagagcattccaactttgtcaactgtgtgaggtttgcaccagatggaagtaagttcattactgtgagttcagataagaagggaatcatatatgatggaaagacttgtgagatactgggagaactgtcttctgatgatgggcataaaggtagcatctatgcagtcagctggagtcctgatggtaaacaggtactaagttatatctgtttgttgttccgtattctcaactcttgcctgattccctcatattacgctcaaactacattaggcttaaacaaggtctactagaatagcgtatggaagtaattggtctaacctgctgcagtatgacgtacataaatgaactatcttgggtgtatctatgaagactgaatgacatattctctatcttctagttgttgattacatcatggttgatgttatgctacgtctgtactcacgtgttgtatatgtttgaatcatcaaccaggtgctcactgtttccgcagacaagtcagccaaaatatgggatatatcagacaacggtagtggatcattgaatacaacattgaactgtcctggatcatcaggtggagtagacgatatgcttgttgggtgtctgtggcagaacgatcatattgtcactgtttctctaggtggcacaatcagcatattctcagcaagcgatctggataaatccccctttcagttttcgggacacatgaagaacgtctcttccttagctgtgcttaaaggaaacgctgattacatattatccggtagttatgatggactgatatgtaaatggatgctaggccgtggtttttgcggtaaattgcagcggacacaaaactctcaaataaagtgctttgctgcccatgaagaagagatcgtgacctctggatatgacaataaggtaaactggttctcactttaatttttattcacatgtaggacttgtcaccttgatttctgcagtgtctgaatttggtgtttaggggattgaatgtaaggacgaaacaagtgaattaggtttttttctctctgaaatattggcaattctaaagacacaatggtctcttaagattattaacactttggaaaaatatactaatgatcttgtggtttagagaatttaaaagagcgatcactgaaggccaaatggtctttaccttgtaagactagcagtgactaatattttttatttcgtaggttatctaattgcttccaagcattattgttattgaagcaactaactcacgtttattcactatgtgattcttattcagatatccaggatctcctataaagatgatcaatgcacaaatgaagagtctatcgacattggaaatcaaccaaaggatctaagccttgcaccactctcacccgatctccttctggtgacctttgagtcaggagttgtgtttcttcgtgatgggaaagtagtgtcaaccatcaaccttgggttcattgtcactgctttggcagtaacacctgatggaaccgaagctgtcatcggtggccaagacggtaaactccatttgtattctattaatggtgactccctcaccgaggaagcagttctcgagagacacagaggcgccatcagcgtcatacgttactctccagatttgtctatgtttgcatcagctgatttgaacagagaagcagttgtgtgggacagagtctccagagaggtaagtaattaagattatttagaatctctccatgaatctggaacacaaacactgatcttatatcgtccctttttttttaaacagatgaaactcaagaacatgttgtaccatagcgcccgcataaactgcttagcttggtctccaaacagcactatggttgccacaggatccttggacacgtgtgtgattgtgtatgaagtggacaaacctgcttcgtcacgcatgacaataaaaggagctcacttaggtggagtatatggtctgggttttgctgatgattcccatgtagtgagttctggtgaagatgcttgtatccgcgtctggagctttactcctcaataagacttgacgtaaattataaagatctctggacaagtcctatcttgtctctttggaaagcttctactacttttgaaggctttttttgtgaatcttccgtttggccgtggctgtgttgatgtgtgtgtctgtttttttttttgtctgcatatcttttgtcaaaaatgaatgctctgttttggtctgaaactgagatcttgagtcagattttttttcattatcagaagattactgatacagaatgggacttgagattgtgctttctctcaatgatttttgggctctataatatttgttcttcttacaaaagttgttttctgaagtagatgaaaacagaggagatttttcaattaatttatctgatcaatagttaatcaaccttattaacaaaaatgattaaataattaatctcgcttataattctaagcctgaagcaagaagacacacattgatcctcgttcataattcactccccagtccccacattctgtcccatagtgagcttcacatgtttctttttctcctcctcctctctgcttcccgctccggcgaagagtcgccgtccggagacgccgtcccattggccaccggcggtcttaacagaaagagttttccggaaggattcttgttcggaaccgccacgtcagcttaccaggtcgaaggcgagacccaccaagatggtcgtggtccaagcatttgggatgcattcgtcaagattcctggttaatctcataatcaatctaattacaattcactaattaaactgattagttaatcatttcgatttcttatttaccattggtaaaaaaacacaggtaagattgccaacaatgccactgctgagataacagtggaccaatatcatcgttacaaggtacttcttgtcactaatcttttgttcctaaatcatcatgtatatatttttttttgtgtgtggttatattataatgtacatcctttggtgttcatgttaatcacatttcaggaagatgtagatttgatgcagaacctgaacattgatgcctacagattttccatttcatggtctagaatattccctggtattactggataatgtataaaattaattacattgcttatattttagattaagattagtctataacttcagcttatgaatacagagggatccggtaaaatcaactcgaatggagttgcttattacaatagattgatcgattacttgatcgaaaaaggtatagatttttagtacattgaacattcatagacactttgatttgatcattaattgtcttatgaatgtaacttaattcttagggattacaccgtatgctaatctgtaccactatgaccttcctttagccttggaacaaaagtatcaaggcctgcttagtaaacaagtagtgtaagcaccaacttgtgatttatcttttaatctttagtctcttactgcaacatcctcaaaagctacaatcatttgatatgaggcaatttacagggaagattttgcggattacgcagagttttgtttcaaacatttggagatagagtgaagaactggatgacgtttaacgagcctcgtgtagtagctgctctaggttatgataacggcatttttgcgccgggtagatgctctgaagcatttggaaactgcactgatggaaactctgcaactgaaccatacattgttgcacatcaccttatcttggcacatgcagcagccgtccagagataccgccaaaattatcaggtatgtaataaccttataggctccttcaagttgtttctatgatattaaacatgtatatgattactaaagatctaactgacaaattcttctcaggagaaacaaaagggaagggttgggattctactggattttgtttggtttgagccacttacgagtagtcaagcagacaatgacgctgctcaaagagcaagagacttccatgttggatggtaacggttcaaacttttggactcatatttttccagttacattttggtgagcttataagaatatcttttgtgtggggataatgtttgaaggtttattcacccaatagtgtatggagagtacccaaatacgttgcaaaacatcgtgaaggagagacttccgaagttcaccgaggaagaagtgaaaatggtgaaaggttccatagacttcgtggggataaaccaatacacaacttatttcatgtctgatcctaaaatatctaccacacctaaagatttgggttatcaacaagattggaacgtcacttttaactgtaagtttttgttcatatgtacatttatccgttatgacttatgaatgaacttgatcttgcttagattatagaacatataactagctaagttagggtctgaatgtttcaaaagcaaatatgtcagtatgagaaaaattactctagacttggaccaaaagtaaggctggttcgtccttatgggatcggactgtggcaatataaatgtgcatgatattaatactgagaaatcttaatatgtgcagttgcaaagaatgggacaccaattggtccaagggtgagataaatatatgttttcttctgagttttgttaactctctctgatgattgcttagttgtctgattatgaattaatctaattttattcaggcacattcagaatggttatacaatgtcccatggggaatgtacaaagctttaatgtacattgaggaacgttatggcaacccaactatgattctctccgaaaacggtattcaatataaatttttgttccacatccaagatctctagagatgttaagtgtataatctttataggtatggatgatccgggcaacataactctaactcaaggactaaatgatacaacaagagtcaagtattatagagactatttagtgcagcttaaaaaagcagtagacgatggagccaatctaactggatattttgcgtggtcgttgctagataatttcgaatggttatcaggatatacttcaaggtgcggaattaactaatgaatacctattgggtatatgattatttctgagaaaatgtatattatatggtactcttctaatgatttttttctgcctaggtttggaatagtgtacgttgattacaaggacttgaagagataccccaagatgtctgctttatggtttaaacaacttttgaaacgggaccagaaatgatgtggtcaatgtgtctatgatttgggttgttaacgagaggtgaatgaatatgtcatatgtgtataacttaagaacttgtcttcctttgacatttcaacgcttacataaaacagcagcaagaaatttggttcttctatcatagaacttctacattcaacaatgtatgctatcatcctcatcctcatttttttttaatttctattcactttaccgtggctcagtttctatttatcaagtcattcaaaattagaaaaatattggatttaaaatggatgtgtaagttcttccaaatcacttgtatcaaaaagatagatgttgatgttatgtgacagggcaactaattattgcaagtgattggcaaaaaaggaatcttgatcaatggatattttgagatgctaaaatgcttgttagactcgacgactcaataatggatgtaatcattcctcttccactgaaaaatctcataacacgattcacatcacatatctttttagacaaaaaatctttagtttccgtaccgtttatcacatcaatggatattttaagcctaatgcatgcacgttctttgaaatgtgtggacttaaattgatttctttagtttctcttttgttgtcattcactactcactactcactagccgtttgtgctttcaagagttgaatgaagaagaactaaggaaaaatacgttttcacgtgaagatttgggagacaagtctaaggaagtggggcattcatggtccacgaggactgaacttaatggatcatgatttgaccagtttgcccttgtcggcttctgtgtgttcacgttttttcctttggcgctttacgattcgcgtgatgactttttctcaaaatgtgggccggacacgataattctgttccggccattacacataaatatagttgtttttatcttatgagaaaagttataaaaaagaatcatattccgatttgggtaaatttttttaagcaacattgtgactgattttcagatataatttggactctggacacagctacgtaaaaacttactgtgtttagaagatatgttttatggaataaatccatgcaatatttggcagtcaatcccgatatcataagagtatggatcagcttctacagattctctgagaattttatcatttggtaacaaatcaaattgttgcaattcggatttttacctctatataagatgatgtccttttgtgtcatctccctatgcataagcatcaatatactttctacttacgaagtcgttacaaatgttaaatgttagtaaaaaatcaattaaataaactcattatattataataaaaaaacaaagacaattactttctcacattcttttcaccaaaattctttacatagtttagaaaattatatgatatatagttttaaaatccgaatttggtgaaatatatctagttttatttagtattcaattttaaattcataatgcttacagccttatcctatttattaaaaaaaaatccaacctttccactaatgcactcccataacaatttaacatcgttggttcatgtattatttgttttgaaaacaaaaggcttttaaaagcctataaatatccacccaattgttatcctccccaaaccaaacggtcaaacctcactcaccatgagacaccttagctcacctccatggcctctcctccttctcctcctcctctcttctttcacctccggcgaatcctctctgtccgcagaaaaaaacaaattgcacaccggtggtctcagtagacagagttttcctaaaggattcgtgtttggaaccgccacgtcagcttatcaagtcgaaggcgagactcatcaagacggtcgtggcccaagcatttgggatgccttcgtcaagattcctggtaattcactatttaaacaatatataattacataattaacaattgttaactaatataaaaataaaataaacagggaagatcgccaagaatgccacggctgagataacagtggaccagtatcaccgttacaaggtattaaactatactaatcttgaatcttactaaatattatccaaatattagaaagtgtttttgatttaattagttacatgcatgtgttcatgatattcacatttcaggaagatgtggatttgatgaagaaactgaacttcgatgcttacagattttccatttcatggtccaggatattccctggtattatataagtaaccatatatagttatataattctgattaagattagtataataacattaagcttatgaatgcagagggaagtggtaaagtcaactggaaaggagttgcttattacaatagattgattgattacatggttcaaaaaggtatcaaaccataacgtttcttataaaacactgatttgattatagaatgaagtttaacaaatctaatttaatgcttagggattacaccttatgctaatctgtaccactacgatcttccattggctttggaaaacaagtataaaggcttgcttggtagacaagtagtgtaagcaccaatatgcaaagctcttttatgcattcctcaaaagttacaaactttgataatgcaaattttacaggaaagattttgcggattacgctgagttttgttacaagacatttggtgatagagtgaaaaattggatgacgttcaacgagccgcgtgtggtagctgctttaggttatgataatggtattttcgcaccgggtagatgctcaaaagcatttggaaattgcactgaaggaaactccgcgacagagccatacatagttactcatcaccttatcttggcccacgcagcagcagtccaaagataccgcaaatattaccaagtaaacaaataacttctaatacgttttcttgatcttcttgatgtgatatgatgaaataaacctatatatatggctcttttgccagtgtactactaatcttaatgaaaattttccaggcgaaacaaaagggaagggttgggatacttttagatttcgtttggtatgagccgcttactagaagtaaagcagataatcttgcagctcaaagagcaagagacttccatatcggatggtaaatgttaaaactttttaacaaataaaaactcatattttaccatcaagtcttggtgagcttatagaatatcttttgttttcgggtcatgcttgaaggtttattcacccattagtatatggagagtatccaaagacaatgcagaacattgtgaaagagaggcttccaaagttcacggagaaagaagtgaaaatggtgaaaggttccatagattttgtgggaataaaccaatacacgacttattacatgtccgaaccacatcccaccaccaaacctaaggatttgggttatcaacaagattggaatgtggaatttggctgtaagttattggaagattcataacgatatgtagattttggattttgtttacagtctttagattttgatcgtgacaattattaacttgcagttgctaagttggggaagccaataggtccaagggtgagatatacacttgattatatgtttttttttttccctaagcaatatatatacaagtgtctaagttattaaataaaccacttatcttataggcttactcgtcttggttatacaacgtaccatggggaatgtacaaggccttgatgtatatgaaggaacgttacggcaaccctactatgatcctctctgaaaacggtattaaagaaacaaattaaaatcttcaatcaagtttctttttgttttgttatatttctataagattattataaattttagagctttttataaatgtttgaacatattttataggtatggatgacccgggaaacgttactctagctcaaggactacatgacaccacgagaatcaagtattacaaagattacttaaccaaccttaagaaagctagggatgatggagccaatgtggttggatattttgcgtggtcattgctagataatttcgaatggttatcaggatatacttcaaggtacttaaaaatttataccaaatgtatgatatgtagaataaatcaaggttataattaatatctgtttttgtttattgtataggtttgggatcgtttatgttgattacaaaacattgaagaggtaccccaagatgtctgctcagtggtttaagcaacttctgaaacgaaacaacaaatgatctcaatgtatcaatgccgggtggatttagtttttaaaaaggttggaattgatgattgaagaaataatggggccggtttagtcactttgtttattataaggggggtgaattgtaacttgaactctctccttcttcagttctttgacttttcaacacaaataaaataaaagtttaagaataaatttgcactatgaaatatgaactcttgtccttttcaattttgtgagtttatatgcatttagaacataacggtctttgaacattatagatttataaagttgcaatttgcaagcataaagttggtaatcgaattgatgtaattacccttctttactttgtactaaacaaagcgcacttagccacttaacgctaaaacatcgtaaggacatacctgtcatttccacaagtgccactcgatttcgccactcctacagtcctactcgtcgactgctcgcttaaccattgaaaaagtgagccaagggttttgattattttcgacgtctacggcgaatctctccgcatcttcatcgatttcccggcgacgtttactaccgccgttttactcaatcgtgccagcttaagcaatcgaggtacccattttaggtgttacgctttgattctgcttttaagcattggacaattccggagaatatgctttagtttcctctcttttggagaatgattcggttctaggggaaagattgttgatttcgtgtttgtattcatcattgattgaaacatgcatgatgcattttcgtggttcatggtttttcacggcttcttatcattttctctgtcttttttttttttttttttttttttttttttgtttcagtgtgtattgaggtataccagagatagacataaatgagatggatgttgacgagatcgagtctgctgggcagatcaatatttctgagctaggagaaagttttctccagactttctgcaaaaaagctgcgacatctttctttgaagagtttggacttataagtcatcagcttaactcctacaacttcttcattgaacacgggcttcagaatgtgtttgagtcctttggtgacattcttgtggaaccgtcttttgatgtaataaagaagaaggatggcgattggagatacgcaacggtgaaatttggaaaagtcactttggagaagcctacattcttttcggatgacaaggagcttgagtttctcccatggcatgcaggcttcagaacatgacatactcagcaaggatcaaagtcaatgcccaagttgaggtaactaaactaacaaaatctttgtcgaaattaagtaagcttgtctggatttgatgaatgatttcccttgcttgaaaactcagaaaggccagttaactatcactttctagttcaacattatgcaatatgtctatgtagtcgagagtggaataccacatggtatgaaatataaaagaaaaacatcttaagctttttatttatttagttcttccccattccctcactgttctttaattgagtgtttcatgcttgtgtgcaatgactcttgtacagtcaaagttttgatgatgtttctgttttgctgtccatgtatcttattcttgtaaatgtagtttattgtctaactgcatcttcactttataaattactaggtgttcaaaaaaattgttattaaacacgacaaattcaagactggacaagatgaatatgtcgagaaggagatactggatgtcaaaaaacaggacattctaattggtagcatacctgtcatggtgaaatctgtcctttgcaaaactagcgagaaaggaaaagaaaactgcaaaaaggggaattgtgcctttgatcagggtggatattttgtgataaagggggctgagaaggtgagttaaaccattttgggatctttttgcatatccactatcatgggatttctattttgaactattttagtgtatagcttagtggaaattagttctctttttctaatatatactggaaaaaatattttcaagttgttatacaacttcctaacgtgattataatctgtcttgcaggtgtttatagctcaagaacagatgtgcacaaagagattgtggatttctaattcaccatggacagtctccttcaggtccgaaactaaaagaaataggttcattgtgcgcctctcggagaatgagaaagcagaagactataagataatggagaaagtactgacagtgtacttcttgtcgactgagattccagtctggctcctgttctttgcgttgggtgtttcatcagacaaagaagccatggatctaattgctttcgatggtgatgatgcaagcattaccaacagtctcatagcttctatccatgaagctgatgcagtgtgtgaagcttttcgctgtgggaacaatgccctaacatatgttgaacatcagatcaaaagcaccaaattccctcctgctgaaagtgtggatgattgcctccgtctgtatttgtttccatgcctccaaggtttgaagaagaaagcccgattcctgggctatatggtgaagtgccttttgagcgcgtatgcgggaaaacgaaaatgtgaaaacagggacagtttccggaataaacgaattgagctcgctggagaactgttggagagggagataagggtgcatcttgcacatgctagaagaaagatgaccagggccatgcagaaacaactctcaggcgatggcgatttgaagcctatagagcattatttggatgcttccgttatcaccaatgggcttaatagagccttctccactggagcatggtctcatcctttcaggaagatggaaagggtctcaggtgttgtagctaatttgggtcgtgcaaatccattgcagactctgattgatctgaggagaacgcgacagcaagtcctttataccggcaaggttggagatgctagacatccgtaagtgaaaatttccacctcccctggtatattgaaatatatcccacgtactttaactaactgatatggttgcatttactcaatgttacatgtcttcagactgttttaaagatattcatattaacctatttagtatacgatggcgatcacagtttctgcagagtctcgtcggtttataatattgagtttgtatagatgttgctgctattaagaaactttgatactgtctttcttgtttctttgtcccttggtcaatctatctgttgtcctgatgcatgtattgagattatccattttggttccttttcaatgtgagcggttacacaattaaatcgtgctgggaaactgaactatggctgcattgtttttaatgttggccacaggcatccttctcactggggcagagtatgctttttgtcaactccagatggtgaaaattgtggtcttgtgaagaacatgtctcttcttggacttgttagcactcaaggtttggagtctgtggtggaaatgctctttacttgcggaatggaagagctgatgaatgataccagcacaccattgtgtggcaaacacaaagttcttctcaatggagactgggttggattatgtgcagattctgaatcctttgtcggggagttaaaaagcaggcggcgccaaagtgaattacctctcgaggtatcttctgtttcagcaaatgttttgctatattttgatattcttgtgctacttgattatttgctttggatttttctgcttcagaaagtatcctatgtcgaatattatttacatatatgtatcacaacgttatctgcagatggaaatcaagcgagataaagatgacaatgaggtgagaattttcactgacgctggtagactactccgacctctcttggttgtggaaaatctccacaagttgaagcaagacaaacctacacagtatccttttaagcatcttcttgaccaagggattctcgagctgatcgggattgaggaagaagaagactgtactacagcatggggaatcaaacagcttctgaaggaaccaaagaattacacgcattgcgaattggacctatcattcctgttgggtgtgagctgtgcaattgtcccatttgcaaatcacgatcatgggaaaagagttctttaccagtctcagaagcattgccaacaagccatcggattctcatcaacgaaccctaacatccgctgcgatacgctgtcccagcagctgttctatccccaaaagccacttttcaagacattggcgtcagagtgtcttgaaaaagaagttctatttaatggccagaacgcaattgttgctgtgaatgttcatctcgggtacaaccaagaggactccattgtgatgaacaaggcttcattggaacgtggtatgttccgttcagagcagattagaagctacaaagcagaggttgatactaaagactcggagaagaggaagaagatggatgagcttgttcagtttggaaagacatacagcaaaatcggcaaagtagacagccttgaagatgacgggtttcctttcattggtgctaacatgagtactggcgatattgtcattggcagatgcaccgagtctggggctgatcacagtataaagctcaagcacactgagagaggaattgtgcaaaaagtggtattatcttctaatgatgaagggaagaattttgcagcggtttctctgagacaggtaagttccagatcatactgaatcgagctgtttttcagagaatgcattcttatgatgaatcaaatgttccattgattggcttttacatcttgcaggttcgttctccatgccttggagataagttttccagtatgcatggccagaagggtgttttaggctatctagaggaacagcagaattttcctttcacgatccaaggcatagttcctgatattgtgataaacccgcacgctttcccttctaggcagacaccaggtcaactcttggaggctgctctctccaaaggaatcgcttgtcctatacaaaagaaggagggtagctctgctgcatacaccaaattgacacgtcatgccactcctttctccactccgggtgtcactgaaatcaccgagcagcttcacaggtacattcttcacattgtcacttggtttttagctcgtaaaacagaatattgaattatatgcaatacagattgacatttggttcctagggagtacagatggatgatatcattaagggtaggaactaattattaataatgttgcctggttggagatgtttgaactttgggactttggctcaaaagctgacatgatatgcataataccagcaaatcgagctaatatactgcacaaggcactaagctagatttgagcaccttacttgaaacatgtcatagtggatctttgttttgtttcctagtaccagaagtgagcatgatttatatgacgggcaaatatctctgtaagaccaaaaaaactaagaagttggatgttctctggttgattaaattgtgcctgcaaaacgtctagaggatacacagaatgggctcaaaagccatgtatcagtatataattagttagaggattgatgctgtgagccttgtgattatgtatgattcgttgaacctttcttagatcattgttgattgccaatggtaaatatttgtggttagggccggcttttcaagatggggaaacgaaagggtctacaatggtagatcgggtgagatgatgcgctctctgatattcatgggcccaactttctaccagcgacttgtccacatgtcagagaacaaagtcaagttcaggaacaccggaccagtccacccgctcacacgccagccagtcgcagaccggaagaggtttggcgggataagatttggagaaatggagcgagactgcctaatagctcacggtgcatccgctaatctgcacgagcggctcttcactctaagtgactcttctcagatgcacatctgcagaaaatgcaagacctatgcgaatgtgatcgagaggactccaagcagtggaagaaagatcagagggccatattgcagagtgtgcgcatcctccgaccatgtggttagggtctatgttccttatggagctaagcttctttgtcaggagctgttcagcatgggcattactctcaacttcgacaccaagctctgctgattccccgtcattattatgtaaatagcttaatgccttaagaccatgatgatatgtgtagtttgcttcaatccctgttctggttagtgttggttttggtttggttgattctgtaagggttatccgaaacgaagaaatcgttaaaccaagccactgaactaaatcttaagtgttgcttttgtaagagttgactctttaaccgtaaatgatgatcggattttgtaaaaatcagttcttttgtcaacgctaaccggtttatatctggttttctatgtgttttataatgatccgacccagacccggcccgtttgcactgatgccgccaatgttaaattggtcagacataaataaaaccttaagtattaggaaaacattcatcgtcttcttcttctagaggcataaacccttggcttggagccgtttctctcattcttcgatttgattcaatttcattttcataaagaaggatttctctttctgtatcgcgatgaatcggaacagcctatacgaagctgatgacgatgatgacgatgacgaagaagatgacatcggtgaagacctcgaagatttaagacgcgcatgtatggtctctgacgttaattccgatcaattcgcgtcaaaaaccggttcaattgaaccggaaggagtcggtggcggagagataccgtcggattcagaaaacgaagatgactttgagatgcttcgtacaattaagagccaattagcatcttccaaggatgcgggtagaagcagtggtcctcccatgggtttgtccttgctctcggattcggagagtgaagatgatttcgagatgattcggagtattaagagccaattgtcattgtccatggatgtgtcccttcctccaattggtttatctgacgatgaagaagatgatgcctttgaaacacttcgtgctattcgtaggcgattctctgcttataagaatttcggtgagcacaattttgaaatcttatacttgttttcttttctatttgcgttaaagctactgatttgttagataatgtttctgtgttacctttgcaatgttcgttctatggttatctgaagactctgcctcaactgatagttttttgctgatggtaagattaatttgagttccttcagtttcactattggaagctagttgttataaggtgtgaaaaatgcagactttttcatcttgttatttggtttttaacagtctatttatgcaatatgtattgtccctgatggaataagttagaagctctctgtgcttatgtttgattcttgatatgatgaattcatgatgctaggatgatattggtttgcttgtatggtctctgacgttaattcccattagttcttcttatttggtttgcttgcttgtctttttatccagtgttttaagtggaaaatatgcttatgtggtcattttcttactatttttctgcagattcggaaggaaaattcatgaatgattctcacgggaagaaaaagcaggtacataactcggacaatgaaccttcaagcgaaatattgagtagatctaatacttgtgaaagctttccagatcacgggaaatcagttgtcactgtgccagactcagaggatgtacaagatggtcatatgccagctgcgagttcaagtttccctgaagctgcacgagcgtttgttgatgcaatcaggagaaacagagcatatcagaaatttcttagaggaaaattggcagaaattgaagcaacgatcgagcagaacgagaaacacaagaaaaatgttagaatagtcaaagattttcaagcttcttgcaagagaattactaaactggcactctgtcagaggaaagatcctcgtgtcgaattaatctcaacacggaaatctgggccttgtgatagctccgaggtaattgggccttgtgatagcttcgaggtaatactttgatctagttttcctgcctctgctgtttttttgtagtcgttaaaaaaagtactgcttcagctgttttctgttgaccgtgatggaaaatgtttcttatcctaaatcccttgtgtttttttttgtagggtaatgataaaaagatatctcctttgacgttgggtccagcggaaaacccttgtgttgaaaattataggatggcactagagaaatatccaatttcagtgaaacgcagaaaatggtctactgaggagaacaaaaacctcgcaaaaggtttaaaacaagaagttcaaaagatactgctttctgaagcaattgaacggtccaggtactacttactcatcttcttttaaagtgcaatcattaaatctgctgcttaagatcttttcagatgcagacttagtttaggtttttctcattttaattttttcgaaagagttgaatgacagatatttcttaacagtgacttggaaggagctacatatgatatagacactatcaatgaatcgatcggaaatcttgagatcacaccagaaatgattaggcagtttcttccgaaaattaactgggattcgttggatatcaaggaccgttctgctgcagaatgtgaagctcggtaagttcctcctttatttgaactctggttactaagataaatcagcttttaatcatctatgggtgtacatataccatcactctcttattttgatatattagtggattttcttatcctgtgcctcattgtaggtggatgagctcggaagatccattgattaaccacggtccgtggactgcagcagaggacaaaaacctactccgaactatcgaacaaacgagtcttacagactgggttgatatcgcggtgtcactagggacaaataggaccccatttcaatgtttggctcgatatcagagaagcttgaatccaagcatattgaaaaaagaatggactgcagaggaagatgaccaacttcgtactgcagtagagttatttggggagaaagactggcaatctgttgcaaatgtattaaaaggaagaactggaactcagtgctcgaataggtcagttttatcttctacattcacccatttctttatgagttagatattaattactgtagtatgttaagaggtagcctcgtccctttccctccatctgcaaattatatgaatttaatttagttcagttcgatcaattgcctcaagagctagtttgtttggtcaaaaggtctatagggtttataaaccacccataaagtccatgtttagtcgatgtgggattatatcataacctcaatatgcactcatgtctcattggtgacaatcctctaggattttagattgagttacaaggttatgttctgtcattttatgtgcttgtttatgtctgcattcagatacatgattgaatatctaatttcattctctctatactctcagatggaaaaagtcgcttcgccctaccagaaaagggacatggagcttagaggaagacaaacgtgtaaaggtagctgtgacactctttggatctcaaaactggcataaaatttctcagtttgttcctggacggactcagactcagtgtcgggagagatggttaaattgtttagatcccaaagtaaatcgtgggaagtggactgaggaagaggatgaaaagttgagagaagcaattgcagagcatggatatagctggtctaaggtggctactaatctgtcatgtcgtactgacaatcagtgcttgaggagatggaagagattatatcctcatcaagtggctcttttacaagaagctagaaggttacaaaaagaagctagtgtaggtaattttgttgatcgggaatcagagcgtcctgctcttgtcacaagccctattttggcactaccggatatatctctagagccagaacccgatagtgtagccctgaagaagaaacgcaaagccaagtaagttaaatagattattccttacatacacacacacacacacgtagcttttgtgaatctaactaaattcacctttttgttgattcaggcagaagaagtcagatgcagagagacaaccaaagagacggagaaaaggattaaagaactgctcaggagatgtatgtagacaagagaatgagactgtttgtgaaaatgaaccgaacaatggaggagaggaaaggatgttggcattggaatgtcatgacgagatccaagacaatgcaaaggagaagccaaaacaaagacgcaaaagtgttgcagaaactgtttgtgaaaatgaaccaaacaatggaggagaggagaggatgttggcattggaatgtgataacgagatccaagacaatgcaaaggagaaacgaaaacgaagacgcaaaagtgttgcagaaacatctaacaacaccactggtttaaaaaaacttacgcctaggagaaggaaaatatctgcagttgttcctattaagaaccaagatgcaccaaattagttgtttttttggctcttgaaaattttgaaatttattgtatgtataaatatgtgtaatccaaacatctttagaatagtcactgattctaacaacaacgacaacaaaaatcttgaactcaacaataaataagttgaactaggcattggtagaaagagtagttgaatgcattacattttttttcgttcacggtaaaaggttgttagacgcaatagctctgtttaatttactaaaccctatcgataaatattacatgaacacttattctaattagtatccacaaagaggaaaatcaaaactgtctgtatacaaataatcactaatgagattttataataagagagtacaatatcatgacatcacttgcttctgacgaacttccttcgagtgttaataccattcgtttcattgcccattttcttcttcttcatcttctctaacttctgtctatgtccttcaatatctgtctttatcactcgctctctcatctcgtctggtagcaacgccagtctcgaaaacttctttggtgacacaaatccaccaagtctctctttgatgtggttaaacgcaggaacaagtccacgtcttatgaaacacccgtcaatcaggtccatcgagtttgattctggtaaagacaccgagtcttttagctccaagtcgaagcagaacggcgagtccttcaaccacattctgagagagtgagctttggccactagcagtcccgttctcgtcttgcagggaagaaatggagaacccatttcccaaagacacgcctttagcgttttatcaagggatataccgttgtactctgcggtccctgtgattaagacaactgactttggagactctgggtagccttccagtgatgcatcctgaaatgggagaagaatagtaacagagggttattggtgaatatgagaatgattctcaaacgatctttagttatgcaggcatttgtggaatatgatgtgaagatgcagagatattaagagagaagaaagagatgaagtgcctgcatgtggtcaagccatagcgtcagggcaacaagtgctgcacctccagacagccttctgaaatccgcaccccagtccttgtccgccaccctgaaaaatcaaagtgaatcacaaatgttactgctaaacactctgtgcatttggaaacatttgcatgagaaacaagtgactagttcatgggcgagtgttaacaccatttatgaacgtatacaagactgacctaaaaacatcgagactgaagataccccttttgattcccaattggaaaacccatgatgcagtagctctgagttcaaacgcccagagaagattcaaaagagcattaacaaaattgagagcagcattgtcctctatggatttcagtttctcgaaccatccatccacctcagaaactagcaactcaggtcttccagctaaaagcctggtaggtatcattaaaaaaccagagaaaaaaattcataagaatcagtaccatatgatatgatcctgtatcagattttatattatcataataagaaaagccacaaacatgatcttaacagaactatactctttaaggaatgcatcagatcatctatacctgataggaagatcaaaaccaatatcttcaagagctttaagcagcaacatgacttcaattttttccttggagaaactcgccgccctaacaaagcaagtccatatcctgtggtctggctctaggccctctttcttcatttccaaaagcctttctattccactgttataatctttgctccgaaggtaagcatcaataactgaactataaggcagagttgttagttccacttctgtgtctttcaggttactaagaactttttcagcttcttggggatttcctgaagaactatatgaaaccataagcagatgcattgtagcaagtgttggttctattcccgcattcttcatcatttgcaataacttctctgccttggagtcgcttccagaatctcgggatattttcatcattgtgtggtaaaatgaacggtctagtttcaaaccttttgagagaagctcttcaaacagttgttcagcttgttcaaggcatttttgcttaccaaaagcagagatcaagctcttgtatgtgtccagttttgggtccaaaccaagatttctcatttgctgcataagcaagtacccttcttctggtcgtctgtctctacaatacattataatcagagtattgtaagtggtctcgtctggttccagtccagtttcttttatcctctggtatacttgaactgtcttcttgtaatcctcgatagccgtatacatcttcagcatggaattccatatagcaagctcaaccttgaaattggcctcttccatttcagagaccataatttcagcatctctaactcgtttccctttgcagagaagctcaatcatcatcctataaaggcggattgtgggtaagtaaccagcagctttcatgctactgtatatcttctttacctcaaagatatttccagctcgggcaaatgcgtcaagcatcaagagaatggagcttttgctaatcttaaagcccatatcttgcaattcttcaacaacaacgtagagctcctcgagtctcccatcaacacacaaagcatgcaacaaaatattgatggattcaacagtaggagacggaccatccctcatcatagtgttaaaaatagcccttgcccgctcgtaacagccacactgagcataagccgacatcaagctgttccatgtcttcagatcaggtgttcgtccactttgtcttaggttgccaaccacactctccgctttctgccatagtttttgttttccataagcctcaatgatatcagtatacataggcgaacaagcaaagtggaagccttttgtctcagcctgattaaccacttgatgagctgtctctggaaagccaagcttgcaatacacaacaaccatgcttttacaaacactttctgaagcttcgcagccagatagtctcaggtcagagaaaacctgagaagcttcagcataatgttcatttgctacacagcagtgtaatagagtctcatacatggtggaactgccaaaacaccagccatgaacacatgggtcagcgaaatattcatctagagcagcgcttaagttgttcaccttgcaatgtagaacaattagagcttcagttataagtcttttagatccactggcatgctctttcaaaaattcaagtaactcaaacgcttctgaatgcctgcctgatgaactataggaacccaggatagacaatagagtgtcgttttccaattcatagccattggtgatagccactttcaactgtctagcagcgagatcaaagcattcgcccttaacaagcactgatgaaatctctagtgggttcatgccacacaattcttccatgtctctgatggttttctgaatgtcatctgacctgttttccttcataagtccaagtatcatcaactcatacagagtgtaagacggtgtatgaccatcagaaatcatatcacggtataaaccccaggcctttcttgtctcgttgcctcttagtaatacatccaacattacagaatacgctaaattatcaggtttagtgcctgagcgcaacatgcaactgaaagtatcctcagcctcctctcgctttccagccttggcataaccacagataagagcactgtatgtctgcagagttggtttgatcccaacatcaagcatctcagacattaaagctgcggcttccactgttcggtttgcttttccaagagaatcgatcaaaacagtgtaagtaatagcatcagggttcctacccgacaaacctttcatgtccttataaagctgtagcgcaagatcaagttgtccctgcttgccatacatgtgaatgatcgtgttgtatgtcatctcatctttcccaaaccccattttctgcatctgttggtacacctccttcaccttctccgtatttctttctctggcaaacgcatacagcaaagagttgtatgtcactgcatcagggaaaaaacctttaagctccagctccatgaagagcctctcagcttcagcagcaagcccacatcttccataaacagaaatcatagcattataagtccacaaatcaggctgacaccgatgagcttccatatcctcaaaaaccttcactgcaccatccaaattcgaatcccgcgaacaggcactaagaagagtgttgtaagtgatagcatcaggcctaagacccgaattcctcaccatatctaataactcaacagccaaattcggagtcaacccaccagatttaagcctagcgttgataagagtattgaaactaataagatctggaacacaccctctctgacgcattgcatcgaccagctcttgtgctttcgaaaacttaccactacgtgaataaacccccatcattgcgttgtacacctgaaccctatctccgacggttggctcagccctagtgaaaatctccaccgcaagggattcctgattccaccgtcccaaaacaccgagtatagcagccaccatccgagcgttaggagagtgccaatgacggagattgagccactcaaaaacctcaagagctcgttgccaactctcttgaccaactgatttcacgacgaagcagtaatcagtaggagtcatctgaacaagacgagcatcgagaatatcagcaacgaactgattagatttcaagcttagaatcttatccgtcagaaatttgactctctctctccagtctttagccttaatcaacgccactttattcatcttcttcactctccttctccgagtcgccacggcggtttcatctttcgtcttttgctcctcgcgggaggcaattgaatcgacgacatcacctgaatccggtgtaccggcgatgggagaaaccggagaagaaagagtttgtgaaggtgtggaatcataaatctcacggagattcaaatgtggccatcggacggcgggagaagctcgactgtaagtgaatttctgggaagaagaagtagtgctgctgatgttcgcttgttcatctttaatctcaggattaagagtggcgcgaacggataaagcaggaaaagctaaagcccctgcagaaaccgccattaatgtcttcttctctcagcttcataaatttcgttgtaccgttaaaagatgagaagcgagtgaaagagaagagtgatcttttaaggttcctgagaaagtgagaaacaaactccttgccgtctaagatttttaccaacaaacaccttgctgtttttaactgtgacaaggattttatgaagcgagacgaaagttgcgttataagaccaattttaaagatgaagaatataaaatgcaaccaaaatccgtgaccttttgatagagtgtatgatgataattaaacaaaatttgacaaaatacaagatttacatgagagccagtttggaaaaattggataaactaaaagcagcgacaatgttgagagagttcctcagcttaaagttgtggccatttgatttgcgctagacttggaacataagaacagatacgtgggtgataaaggctatgtagcgctcccgcgtctctgtgtctttatccaaaaacacgacaactttcttctcctcgtcaacaaagaaattcccagcggcaacctgaaactgcaaaccagttagtggttccatacccaccgctaagaacaacttgctccacgacgctgtttcgggctcaatcttagtcgtaatccatatctccatctgtaatgtatcatctctctcaaataacactgtaagttgctcatctctaacactagatagagtcacagtatcttcattaaaagagtgaaacggtagacttagagggggtccaaatatctctcttgtaaaatcataacagagtaagaactcagggagatgcttttgttgagtatttcccttgagagacacgccacgtgcagaaaactgtatctcccagttcgcagagttaatgttagggatagtaatattcatccgtggtttagaggagttgaggacttgaggtagtagagttcatactgtacgtatccgtaacaaggttcactaaatcccttggaagattggccatcatcatctcaaggatcataaataagttaggttaatgcttcagaagatactctcctctgcttccggtggttacaaatttgaagacaaagaaacccaccctaactgaattgggccaatcatgggctttagaaatctaataggcttgtaatgtggccggtgaaagagataagagtgatatattatagggatgaattgtgaagattgaacctcaataagaccaatcggaagatcacgaaggtaagtgtaatcaaaatcgtgaccttttgatatatagtgatatgataatcaatggattgtttttttctcttctggaaattaaacaaaaattgccaaaatagaggtttgcgagagactaatacaatactgacgcagtctggaaaaattaaaagcagctaaacttttttccggagatttcgtgacttcttcttcatcttgttgtgtctctagtaacgaccaataccccagaccctgacaactccatcagtgtaaccactgaacaatgtgcttccatctgcactccagttcaagcttgtgcagtagataacctgcattttcattacacattcccattagataccattatcaatctcttcctatatgttaacatcaaagtcaaaacctttggagcagagcaacatttaaagaataaaattcctagtttcaaagctaatgggtaagggaaaagatttcctacatgcaatttctaaccaaaatttcactttttttttgtcataaccaaagataatttcatcactacttttggtgcattcactaacctatcaatagagaaccaattactatagtgaaatcataagataatgacgtaccttcttctggttaccagttccaacaccaccttcattcttctctgcctcagacttgagatcaaccttcaagtcctcaacaacagacttgctctcaagatcccaaatcctaatgctattctcagtagcagcacacaaccagtatctgttaggactgaagcaaagcgagtgaataatcgaacccgcctcaagcgagtaaagcttctttccttcagccaaatcccacaacaagataacaccatctttcccaccactggcgcatagcgaaccatcaggcgagacagcaacagtgttgaggtaaccagagtgaccaacaagagagttcctcagcttacagttctggagattccaaactttcacagttttatcccaagaagcagatacaatagttggtacaagagtattaggactaaacctaacacaactaacccattccttgtgaccatcaccttcagagatggtatacttacactcaccaagtgtgttccaaagcttaatcgtacgatcacgagaagcagacacgatctgccggttatcagtagagaatgcaacagagagcacatctttcgtatgaccaacgaatcgacgagttgtttctcccgtggcaagatcccagagacggagctcaccgtcccagcttccggagagtgcaaactgaccgtccgatgagagaacaacatcttccacgaagtgagagtgacctgtgagcctacgctgagcaacaccgtaagacttatcgtcctttgtgagtttccagaggatgatggatttgtcacgcgacgctgtgacgatgatgtcggaattgtcgatcggcgtagcgatggccgtgacaatgtcggtgtgggcgcgcataatgcccttcaatacgagtccctcggccatggtttgaggttttcgggtttcttcttcttactcacgaaaatggcgtaacagagcgagagattacgaggtcgattgaaatgtttggtatttatactctaggtctaaaaatgaatcaaattagggtttagtgtggtttctgcgaggagactggctcatttgggccggagtttccgagtcaggtataaatgggcctcttctgaaataaattttgttggagcatttttgttgtgatatagttgagaaatgtttgatcagagagggaacataagagcaatttgaacgaattcgattgaaatgtacaagagtttactaaaacacaaataacacaatcgtagtttgttcataatttagctttgattcttattaaggttttaatcgtgaagtgcacagcacacagtggctttgtgatgaccttggtacactttcacttctttgcctgctggcatcgaccacaatctagccgtcatgtccgatgatgctgtacaacatcatagaaacccgtttaaagattgttctgatatgtttttcagtggtttaagttaagacagagattagtacctgttacaagaaattctccatccactgagaagacgcagtcccaaacccatctttgatgtcctgttatataagatttgatgatagtgtaagagacgataatggagaatgaatgctgttgacagtaacatggagaacatacctgttaaaactttctctagtttaaaaccatcgacgttccatattttgacagttttatcagatgatgcagtcgctagatatctgctaacaaatatgtaagagcttcgaaaaggagaggatgaagaaaacggttaaaagagaaagtataagaaacatgttacttgtttgcaggagagaggagacatttaaggatgtggccattatgagcttgcagcttatgaaggggctcaaactctgtcattgtctgtaaaagattttgaatttttaaatggcatggacaattagagtaatgcgactacaacatggttaaacaaaagaaaggtttgcatatcaggaacactacctgttttccacgcaacaagcgccatacataacatgttccacggttgttagcagcgactaccattgtcccatcccacataacagttaaagaccgtacagctgtatcaacttctggtacctatagttaacctcaagtgattatctacggattttcagaaatgaaatgaagacgtgtcaaaggcaattaccagttcacagctacacgaatttgctctgagatcccatacacgtatatttccattttggtctccagatatcaattcagtctgtacaaaaaaaaaaaacaaagttcataataaagactaaggaaatagttcataataacagctgagacaactaccaaaatcacagcagtttcaacagtagcaatacaacaactctcttaaacataaaacgaagctgattcccacagcacaacaataacagatgacttcatgtacctgatttgggtgtaaaacaactgtattaaccgctgcaacactttcatactccttttggcaacccggagccctgcattttggtttacgagtcaacaagaatacaatttagaacgttcttagtatttttcgtaactttatattcaatatctccttatcctttcccagaatccacacttgaataaatctataaacttttagctaaagatgaagatgacatgatataccttaagtcccagatcttaactgtgccatcttctgatcctgaatacatccattttgcatcacattgaaatcctactgccataacattgttggtgtgtgaatcgtaagtcatcacctaatacacacgacgactccatcaagatcactcaagcaggtagaaggaagcaaacaccacattgagaaaaaaagagaggagttttacaggttgaggactattggaattgacatcaaagagtcgaatatgaggattgcaagctgcagctagataatgcttatctggggttatctcaagcctatttacatgctgcaattacaaacattaatttgtctcagttttattaattactcagaattcacaaaatcaagggagagagagagagaaacaaaccgaatcaggatactgaatggtacggtaacagcgaccagtttcggcttcccagaatcggatggtgtgatcatagctagccgtagcaagaatcacagaaggctgactcattttcgatcgattttatcccgattgaaatattaaaccaaccatttcgtgatttttgctgattcccagaaaacaaacaaacccccttttcgaaataatcaacagaagaacaagctagggtttggtgattgaggatcaaaaaacaggggaaagaaaaaggtgcagagaactgtaaattgaagagaagaagaaaaatagggtttttaccaagcttttctcataattaattaacgcggggaggttttagtataaatatatatctattggggtttatttaaatatacgaaaataagtaaagggctattttgttatttatgaaaagtaataagaaaatataaagaacaactatttgttcactacttcactgacagacataacggctgagactccttggaagcttttagagacggcaacaatggcggctacgaaagctctggaatttgttttgccgacgggcttcttcatccagccgtcattgaaccgtcgcggaggagttaggctctccgtcgtcaagtgttccatttcttcagtcacctctacaggcaccgcatctggtaacgctcgccgatttccccatttccgtattttcacagcttgattttttcccagaactttagattcgaattggctttcgattcaaatgttatgtatatatatgattttttcagattacttgtaggctcttgattcgtgccttaatcatcgttttggttattgtttcttttagtttggatgagctgaaaatgtgtgtgaatgttgaaatgtgattcaaacaagagtaaagaggggagttaatgtgtgttaagacacatttgtcagttttggttttacaataaatttgggggtttttatttttatgtttgtaggacataatgagtccatgggtttaatgggtgcagatacatttcttttctatataagcatgtagtctcatttgtgagaaattatcagagatatcagagacatctgaaagtcattcacagaattaagtatcattcagctaaacagttcttaacctctgttctatcatctctgtttctaacagtgaattccttgttttaccggttttgtaggttttttagagaaaccatggagctcatacaatgctaggctagtgttagaagatggctctgtttggtcagctaagtcttttggtgcttctggaacccgtgttgctgaattggtatttaacacctctttgacagggtcagattcttttttagattctaatttagatttctagatattataactgggtttagaacattactcattttaatcctaccagatgatcttgacacacgggcaataacccgtcgattaagagaaagcggcagtcttaacggtgtgcttagcactgatggatccaaaaccgacgaggaacttttgcatatgtcccgctcttgggatatagtaggtctgaattctttcactgccctccttaaaatatgatcagcgtggaatatgtgattgagctctgtctatctgcttggttgaatattttaggccttgatctaataagcgatgtttcctgtaaatctccctacgaatgggttgaaaaaacaaatcctgaatgggagtttaagacaacctcctcacgtcacagggaatcctacagagtgagttgtactttctcttctctaatttacattctcatcgatttcctcactagcttctaactctgttttcatacttccacttcaaaaggttattgcatatgatttcgggatcaagcaaaacattctaagacgggatttcctcactagcttctaactctgttttcatacttccacttcaaaaggttattgcatatgatttcggcatcatacggttgtgaaatcacagttgtcccatcgacatggccagctgcagaggcgcttaaaatgaaaccagacgggattctattcagcaacggtccaggagatccttctgcagtgccttatgcagttgagacggttaaagagcttctaggaaaagttcctgtctatggaatctgtatgggtcatcagttacttggacaagctcttggaggtaaaacctttaagatgaaatttggtcatcatggaggaaaccatccagttcgtaacaacagaaccggccatgtcgagatcagtgctcaggtatgctccatttactatctatagattataaccacacaagattaaacagtctaatctttcagttctaatatagtttacaaatatgatgggaaaataaaaattattaatcaaaacttagttatatacttatatatgtaactctgagaacttgttgttacatggctgtcgagttcagcttctcacttcctagtacagtaaactaaaaaaaagacgtctctgttttgtgtctgctgaagattttgattgatattgtttgtgcggattttggcaaaaccataactatgcagtggacccagcttctcttcccaccggcgtggaagtgactcacgtcaatctcaacgacggaagttgcgccggtctctcttttccggcaatgcatgtcatgtctcttcagtatcaccctgaggcttctcctggacctcatgactccgacaacggtattaaaccattctttcttttcccttttgtctggtacctatcaaaacgtaaacgctactaaaacgctatgcattaatttttgcctaatcttttcatatatgcagcatttggagattttgtggagcttatgaaaagatttaaacgaagcacttgatctcggctaaatcagtgatctagcgaaggagttttgtttaggtggattgaagttggagttgcgaatttttttgtcgtgtgagaaataaaatagcataatgactgccgaaataagacaatttagttgagaaacttatgcaagtttgatatttatactaacatcaaaagtagcttgcttgccatttttgttaggaactggatctggtattttgctcaagtatggttttcttggcccatccacttctaatgtgttttgtaactaatgcaaaatgtgcattagaagtggattggtcaagggaagcgtacttgtgcaaaatgcggcagtccaattcctaacaagtttggcaagcaatccatttttggtggcttgtatgtaccgagctattacagactgacggttttgttttgtaactaaagaggagaaaaaaactctagtatatgatttcaatatctatggatcctccaatttagttttctggtttagatttttttcttccttatcttggattttctggtttattaggtttagaactaaataaaactgttatgtggttggtttgataagattttggtttcagttggaatatcaaaaaatatataatgggtcttcaaaacattaccattcgttgataataaaccctaagaaaatcaagatggccgacgacagcgcaacccccggtgtaagagtccctagccaccgctacggtcgtcattaccatcggcggaaaatcaaagaagcagtagactcaataagctctttacctgatgtgatcctccaacatatcctctcctttattccgaccaaactcgccatcacaacttccctcttgtcaaaacgatggagacatgtatggtgtgatacaccttctctttcatttaatgattacagactggaggctccatttatagacgaaaccctaactcgctatacagcttccaagatgatgcgttttcacctccataccagcttgatcaacaatgttccccacttagaaagttggatcaagttcgccatgtcccgtaacgtggatcatctgtccctggatctctggaatcaagttgccaataagtttaagtttcctgatttcttccacatcaattcatctctcaagcaactcactgttgtgttagacttttctgatacgatgattgccatatgctgaagaagttgtacttgagtacttgtcttctctctgatgaatccatggctaacattctatttggttgtccaattctcgagagcttaacactagatcactgcggtggactaagggttcttgatctcagcaaatcactgcgcctgagaacattagaaataaactgtaacatttgggttcccgagctaacggcaatgcagattgtggctccacatacccattgtctcagattgagaaactctaaattaccatgtagtcttgttgatgtctcatcactgaaggaagctaaacttaacatttgcattgactcattttctaaaaccatcaaggctgactttcttcaagtcacgctgttaaagatgttggaaaagttgcacaacgtggagaagcttactttgggtggaaactttcttcaggtagatggactagttattatttgtttttctttaagtttaggaatgtttaaatctatggtatatgcatggtactgaatacagcgttttgctattcaatatcttttatgtagattttatccgttgccgagcttcgtggtgtccctttcccgatgttcaaggtgaaagatttgactctcgagacagtcatctttcagtatgttattcctggtatagaaagagtgttacaaaactcacctgatttaaagaagctaacattactcacaaaggatttctaccataaaccggtatattttactaccatatatataaacctcttttattttccatgattaccttttctgtcatccaagaaccatgttttttttctgttgtgcagggtgagtatcttggcgaccacatggatttggaaggctttaatctcgatcaatgttggaaatcaaaatatggtgtcttttggaacaagtcatgtttggatgtagagtcagagcacgttgtttcattcgtggaacttatgcttaaaaacacaaaggcattagacaagatggtcgtactgttggaagaccattacgttaggtttaaagagatggttccaagactttctcacaactataatatctccattgccctctacaccttcaagccgcaaagttagattagaggtgaatatgatcattgagtcttattgagcattttaccccaagttagattcttgattttgattttgatgaaaaccagctgtataaccggtgaaaaccagcgttgattatgtccaagatagtattaaaagaagagatagtagttagttagttttttttgtgtaagtcacaagttcttacgaaattagagagggaaaaattattgaaatgtgtgttgctattaaccttttggatgtgatctctctatcagattgttaatttactaattcttttgaaccctgatattggaaatttacatctagttctagctcaaaaacgatgtaaattaagctctaatttttttcagtcggtaagttttcaattatagaataacatgtcagtcagtattttgtttttgttatgccgataacatttcaattttggtgtggaatgtgtagttctacttgacatgataacgaacgaagcctcaagcctgtatatacgagataaaatcgaagtagatagatcactggatggatccagatcatgttggggaaaagagacattaaagaggttgtagattgtttgtatatccgaggttgtcgttgcatgaaaagagacatataagtgaagacaagaaatcttgaaaatctctagttcagtccaaaggtttgaggagagtttgaacattatgaaattgcttctacacgtgggcctacttataaaccggaaatgtcaatggaaccggtttgtttgttggacattcattatatacaaaattgactggtaatgttagtccattttattaaatgttggatttaattttgtacctaaataagcatatatatatatatatacatatatataactgaaagtatttcttgagctaatggatacaaaatctacacaatacggttcggtttgattcaatagccaacactatttgatttttctaaaccaacgataaaatcggtctactgaaattactaccgagtttatcagttcaacatctttcggtcggaacgtatatgtatatgttggttgacctaataaagcaaatagactttggttcggttaagttcggttaaataaagaaaaagcagattctgagctttgtttgtgagattcagtttccaatatcagagaatctctgtgtcgcctgaagtgataacattctcattattcacccaaggagagagatcggagctaaaaagccatctctcgccggaaaatttctcagttttcttattaccttagccacagacaacaagacgacagaggaatctaatcttagccccctttcctctctgtctctctctatatctctgtctttaggctttgagatatcttcaacacgaagctttttgcttcttttttttatctctttaaaaaattccagccaatggttcgaatccaatagtagcttcaaaggtcatggatttagtcaggtgtgttctaaattctgatctccttatgtattcctttctctcgctattggtttctagttccgtagggttttagatacgtttgcaactgaggacaattaggtttcttttaatccacatcacgattgattcaaagttcattgtgtttctgtaggggtttgtggaggaaacatagaaggaagattttggtgacgacgacttgtttgggaagtgggtatttgctctataaactatacaatgcccatactcgtaagctcgctgatttggaacgagagcttgctaatgagcgtgaaaacgacgagatcatcaaaacccagttgagtttttgtaacctctcgtctttattttttgcttgtttatcgatttctagtccttattggttttgttctctctatgctctatgttagaatgaaggcacatttcgataacattcagatgattgctgatactactacattgcctcacgcaattcatcacttgagtagtcgtgtagttgaagagattgatgtctcgagtattatggataagctaagcaaaggcaaaggaatattgattccttctgagaagcttcaactctggaatgagctcaaaattttgagtgcgttgttgttcccttacttgtacttctcgtgctctgtggcaacattggatcttctcattaatcaatctttttaaatgtgtttccttgtgttcaggtttcacgagaatggtcttgtccctttggtcggtcactatgcttagtttgtacattagggttcaagtcaatattttgggcagacatttatatatcgacactgctagaggtcttgggagctcccatttacttgtaagacattttacttttctctttttattgtcttaagaatcattgttaagctacttctagcaaattggtcattctgataaaattttgtgtactttcattctacttgttgcattgtatcttgagatatcaaaatttcaaattgagatttcaaggggtagaagttgatattttgcatcttttcctttcaaaattatcgaaattagtgtattcattggtcttagatataactcttggctggattaccacaatctttaccaacgtcatttccttgatatgtttttttctcaggacgaactagatctcatagagagagatgatgaacaaaagtttttgacaagcgctgattttcttgcgaccagtggcatgccgagtttgatttctaacatgcagaacgcagtgaaagaagttctcaaggggtaatttacattacaaacctacttatcaaagatgtctcccttgtttctcatccttgaagattgattttatggtgcctcaaactcaaatgcctatgaagaatcactatacttttatgaacgtatagcgaaatctaactatgtgtgtttaattgcagaaagcagttaaaggatgtgttaaccacaagtgctcttcgagaaactgtgatgcggattctcgatgtgtttatgagcacaggaagtccacaccactgggtagattatctaatgatgtcccaagacgcaaccactgatgtttcctcttctgatgcaactgttaccaagtttcatctactcataaccgagacacgggaagtactcacaaggtaaaaaaaatctctgctctttaacccgcaaaagacgaacaatttcacttctttaaagccttgtcctcgtttctgcttcaatgctcaaagcaagaatgttgcaatgtagcctgttaaacatttcttggtcttgttttcatgttgcagcaatgatttttcaaatgtagcagagatctcactcaagtgttgtgccgttgcgttagtagaggagatggaaacgcagaccggtctggccacagggatgcaattggcaaagctattaccacagattgagaaaaccatgccggagatttcagctgagccggagaagaaccggttcttgcaactcatccgagatttgcctgaagttaaactcttttttactcttttatacgcaaatatgcctcagtagcattattaaaccccattgccaaaaattgtttcctgatcactttttatcatatgtttcgatttacttcaaaatagtaaaaccaaacatctctagaataattgttcaatatctatatcaaatcatttactaatatagtaatattgcagcaacaaaaaaggacaccgtgtattacatatctttcagtttttagggccctagaagcccaaggcccaataaaaccgggtcggtgatattaacttcttcttttttattaacttgggtctctccatctttctcagttctcactatctggacactttcgatttctgaagttgagagacgactatggcgacgaacaatggtgatgtcttgatgttggaggcgacgccggaggctgcgaggccctgggctagtgcggcgaatgcagaagttatcgatgcgcttccttatatagacgacgactatggcaatccattgattaagtcggaggtagaccgtttggtggaggaagagatgcgtcggagctctaagaagccagctgactttctaaaggacttgcctcctcttccgaagttcgattttaaggtgaatttcactgtgaatccttttatcgatttgtttgttcgtttctctagctagggtttggaaattttgttggattagggtttaaagggaatttggtgaattccaatcttttggtttctgggttttacttcatcttggactttataggagtgagtgttgattttgggtttgttatgatagggttcttgttctcttcttctattcgttttcttaacggagagaaaagaggagcatagtgtttagtgatttatctaaggttcaattaattttagtttaagggttcagaatcaactagaatcttaagattgaatggaatcctcatgagcaactggtcttggtagtagaagttttatgatcttgtagctagttttatgatttaggtctaaaggtattgattgatttgtcgcttttgttttgttgaaaacgaatgtagaactgccctgttcttggcaaagagtatgagcgtgttagagctgggaagcctcctgtgcggatagatttcgaatcccgatacaaacttgaaatgccacctgccaataagaggaatgatgatgctgcctggaagcagtatcttcagaagaatcaacggtcattgcaacagaagctgattgagtaagcaaagtttctgattttttctaatacatgattctcttctgtatatactgggttttcctgttttaaaacgtggatttttttcattcacaggcttgagaatttggaattgatgtcaaaacttggccccgagctttggagacagaacaaccatcgccttgaagtatttttgaccaggtttgttcacatttgtatatactgcagcattgattgaatttgaatgagtaaaagggtttaagctttttggttgatggattgtatatatcctagatgatctgctgaagcattattgatatatatgttgtccctcttgcttgcataatatgcttctttggctgtagtacacgagatttgcctttcgttattcttcatgtgctttctgcttgaaagtttctttgtttcctttaaacataagaaaggtcttcgtgagcttgtaacatgtcattctttataaaactgtacccagtctctggcttttggaacttaaccacagtgagattgatttcaaccctctatttgaaccctatttgcagaatgcaaagactagcacaggagcagaatgaggaaattgaaaaagtaaatcgggaaaggaagtatcatcaggtgacaactcttttgaattatcttcatcttcttccttgcacttttctgtttggtttacggggtaatctaaaactttgttgtgtggccattatcagcaaaccacatcatacgagctcaatgctctatctcaagaatggagacagctctgtgttaagaatatggagattcagtctgcttgtgccatgcttgagacacagatcgattcgttcaagaaagaagctgctgaaaggtgaggaaaatgttgtcttacttctttatatcactcgtaagagttgaattttaagcgtaaaactgaaactcgtggggttgtgtgtttcaggggttggaacttagaagagaaactagagaacgtcgagccacttcaaatgcaatgaggcgcctcccttgctcttaagtaacataggttcagagcaaaacaactgttggtcagtttggtttgagttgtgggttaagagaatcaaagacgagacagtttcagttatttgccagttttgtgaaatcctctgctctcctgtcaagtggtgtgtgggacaagtaattgcttttgaaagtatcgaaactctttaatttatcgagcataacgtttacgatttgaaatacaatataaatttttgtatttagaaacatatattctctctctatattaagatgttgcatcccttattctcctataatcagaatgcagaaaagctcctccgtccatttttttcttcttggatagattcaaaccaatataatatggttcttccatgatattacttcttgtggtttcgtgtggtacaaattgaattttctactcaaatttgaatatatccatgcataatgcataatgcattgtattgtaaatgatccttgagcttccctttgtttaatgttaattagacgcacaaaaaaatgtatagataaaagttaaagtgacggagccattgctcataaacattatttttcttaatcttataccaattttcacaaaacataaaaattatgcatttcctaccgactaccaatcctttaaataaatatatttgtatatacgtatttgacataattttcaatttaaatattacaattaaaccaaaaaaaaaaatcacatattggaaggtgcacacgtacgtcgtcatgcgacccaccaacgaggctataagacacggaactcgttagaatgtctctttcctacttaacaaccttcttatattgccttttaacaaagaaaaaaaatccttcctatattgctattattattatgatgcatcttattatcacctaattaattaatggaaaccccatattctttctcaacacatttcaattggatgttgaggtagtcaccgcacgtttttggatgattataaagtaaaagcttctcttaagtagatttagtccttcatccatagtaagactcaagttatagcaaaacaagcaacaacaaaactaatcattactgattgaaaatatgcaccatgcattatgcaataattaattgtaaccagtagattggtgatgatacaatttcagaattagaccagtcacgatccgcatatgacattatgatcacaattcacaaaacatatttactaacaattatctaaaaagttttgacatgtatatgtaaattgtttgtcatccattgacataagattgggtaacgattgctatgtatgtcttaactactctataagttttttcaacggagttagtcctgataagatggggatgcttaaaacttcataagaccatatatacatcaattattgaattcaaatatacaaagaaaaagaaaaaaaaagaatgtaatgagagattgttggaaaaagtccaaagtcgacaatcgaacaaccaagtttcacataagtctagaaaaacttcaccaactgttagttgattcatagctatcaggccacatttgattctgcctcattcgttaataggtctcaaggaaacaaaactaaacaattagcaatcaatcatttagattttggttgtgtctgtcataacagtcaactacaaactttctttcattttcattattttattaaagaaaagtactagttatgaacttctaatcaatttccatatgttcaatatttttatttaaatatatgtttctaactacaatctatatactctttttgtgtaagttgtagttgtgataatatgtttgcttgtttttttttgtcaaccacacattattatatataatgtatgaaaataaaaattcttcattgataatctaatttggaaaagaaaaaattgcaaataaaactaacatgtcctttaactatggctgaacaagctaagatgatttataaagcaaaataaattcgtccacggaaggtttgagaaagtggataatttctcggggttacgggacatttgatcagcttagaacaattgtctcgaagtctaaaacttttttatcctattggaataataatgatatattgaaaatttggaaatgtcacaaaccacaagaaagaaagaggttaataaaccacagagaaacacaatgctcatgaaaatcaaattcatgcttgacaattttattaatcatttgttattttattttggttgttcgttataattaatatctattaatttatttgaaatgaagctaaaaagaaaaatcgtggggagcattcattaagctgcttactaagacttgttcttcgactaatacttcatgccctccaaatccttcctctccaatgccgacactcgcctgatttataaaattaataagatcctcttcttttaataatacactaatgttcatctaatttttattttttaaaatctataacacctaaacgttctttccttgatcctgtcttaaaatccagacatttatagagacaataaacacacgaccaatgtcgtaaaagaagttcttaaatactttacacaatcctctccgtctttcacattcattcatccctctacattagcacgaagattggtttcaagagttttcttgtaacccaagaaagaaaaagtttgtgtaacttgagaaacaacataatgacagagaaggatcttcttttcgacacgatacttgctcgaagctttatcagaaacgagccgaagagacttggctatggagctttcattgcctctcttctctttgttttcactctttgcactgtctttaaaccttacctcagccctctaccaatcggtatgtcccttaccacgttttccaaaacgtcagagaacgcagaaacactcattaataataacgtttatctttctttgttcagtggagatgcaattatcagtggacgctggtctcagaatgctgagaataacagaaccgcaagcattaaggagcagcaacgatgaaacatccgcagattcagataaactcattatcccaacgaatcaagataatgttacatcaagtgaaattattactcagagcctaacaagttctgaggatcataaactcaacgacacaagcatgccaaagaattatcttgattcgtttaattatactaccaacactacaatctccaaagaagaagttatttcaggtcaatatacttcaaattattctctacaattgtcttcaagttgttatggtttttagtcaatttattgatattttgtcttgaaattgttatggtttagtcaatttattgataattttgtcttttgggtgaattttcagatgaaaataaattggagaaaactatgaaacctatatgcaccaagctagcaagaacagagttctgtgaattaaacggcgacgtaagagtccacggtaagtccgcgactgtttctgctgcgatcacgtttgcgttttcgggaaattccacgtggcatataagaccttacgcgcgaaaaggtgacacggtggcaatgaagcgcgtgagagaatggacggtgaaattggaacaaaacgctgaccaattagaaaacgctaatttctcgcgttgcgttaggaatcacagcgttccggcgatgattttctctctcggaggctactcgatgaacaatttccacgatttcaccgatatagtgattcctctgtacacgacggcgcgtcgattcaacggagaagtacagtttctcgtgacgaacaagagtccatcgtggatcaacaaatttaaggaattagtgaggaaactctctaattacgaagtgatttacatcgacgaagaagacgaaacgcattgtttcagcagcgtcaccgtcggtctcactcgccaccgtgagtatttcaaagagttgacgatcgatccttcgaattcggagtattcaatgtccgatttccggagttttctaagagacacctactcgttgagaaacgacgccgtggctacgagacagatccggcggcggaggccacggattctgattttggctagaggcagatcgcgagcgttcgtaaacaccggcgaaatcgcgagagcggcgagacagatcggattcaaagtcgtggtggcggaagcgaacatcggaatcgcgaaattcgcgcaaacggtgaattcctgcgacgtgatgctcggcgttcacggcgcggggctgacgaacatggtgttcttgccggagaacgcggtggtgattcaggttcttccgatcggtggattcgagtggcttgcgaaaacggattttgagaaaccttcggagggaatgaatctgaggtacttggagtacaagatcgcggtggaggagagcacgctggtgaagaagtacggacgcgaccacgaaatcgtgagagatccatcggcggttgcaaaacacgggtgggaaatgttcaaatcggtttatttggtacaacagaacgtgagtattgatataaaccggttcaagccggttcttgtcaaagctcttgagttattgtagagagcctagaggcagtcgatgtaaatcatatatttaccgcatccatatactgtaaattcttgtagttggaatgttggatcgtaatattgttatcataaaacaattatatttatcgaaatttctgaactgtcagttattattctgatgaggctcaatcgactaaccagagtaaaccgatatcgattagaaaaagaattatgtggcttacactaaattttatgtaactttttacagttttttggtcagctttaatctgttttgaatagcttttcccccatttaacggatatttttgtcatgctttctttccttctcttattttggttgcaaattaaattgcatgttttaatgatttctgtaattttgatatggagctaaatgactcatcactaactcaatatgaagcaaataaagaaaaaactcccaagacttctccttcttccttaaactctaccaatataagatcgaaccactttgaacatgctctagctagttctcttctttaaaccagtaccctttatattcattctcaataactaaaacgttatagtgaaaaaaaaaacacagataatatcgtcaaacaaattcttaaatacctcacataatcctctcgctctcccacctagcttgaccttcatatctctacattagccagtaaactctgattatagagtttcttgctgaagaagaaagaaaagttttgtgtaacttaagagtcaagagatgacaaagaaggatattctttacgatacagtacttgctcgtagttttagcaaaactgatcagaagagactttgctgtggagctttcattgcctctcttctcttggtcctcactctttgcactgtcgttaaaccttatctcagccctttaccaatcggtaagtctcttaccacgttttgccgaaaagccagataacgcaaaaacaatcattttaacgtgtatctctttctttctttcttcagtggagttacagttatcagttggcactggtctaaggatgctgagtataacagaattaactaccaacactacaatctccaaagaagaagttatttcaggtcaatatacttcagaattttctctacaattgtcttgttatggtttttagtcattttctgtatagtatgatacagtttgttcttttgattttgtcctgactgaatcttcagagtgcaataaaatggagaaacctatctgtcactgtaacacactaggaagcaaagagttttgcgatgtaagcggcgacgtaagaatccatggtaaatccgcaactgttcttgcggcggtcacgtttgcgttttccgggaattccacgtggtatatgagaccttatgcgagaaaagaccaagttcctgccatgaaacgcgtgagagaatggacggtgaaattagtacaaaacgctagtttatcacgctgcgttaggaatcacagcgttccggcgattcttttctctctcggaggcttctcgttgaacaatttccatgatttcacggacatcgtgattcctctgtacacgacggcgcgtagattcagcggtgaagttcagttcctcgtgacgaacaagaatcttttgtggatcaacaaatttaaggaattagtgaggaaactctctaattacgaagtgatttacatcgacgaagaagacgaaacgcattgtttcagcagcgtcatcgttggtctcaatcgccaccgtgattatgacaaagagctaacgactgatccttcgaattcggagtattcaatgtccgatttccggaaattcctcagagacacatactcattgagaaactccgccgtgactacgaggcggaagccacggattctgattttgtctaggagcagatcgcgagcgtttgtgaacgcgggtgaaatcgctagagcggcgagacaaatcggatttaaagtcgtggtggcggaagcaaacacggaaatcgcgagtttcgcaataactgtgaactcctgtgacgtgatgctcggcgttcacggcgcggggatgacgaacatggtgttcttacctgataacgcgatcgtgattcagattcttccgatcggtggattcgagtggcttgcaaagatggatttcgagtatccgtcgaagggcatgaatctgaggtatttggagtacaagatcacggcggaggagagcacactggtgaagcagtacggacgcgatcacgagttcgttagagatccattggccgttgcaaaacgcgggtggggaactttcaagtcggtttatttggtacagcagaacgttagcgttgatataaaccggttcaagctggttcttgtcaaagctcttgagctattgcataatcagtcagtgtaaataagtaactttcaagcattcgtgtactgtaatcttgggaacgaaataattaccagatcatttggtctagtttagatttttctcaaatttgtttaaccgtccccttaacaaacactcaagtctgaagtctgaaccaataactgggccttttgggctaactcataaaaactcaaaacaggcccatttatcaaacaatagcgtataccctagggcttttttcaaattctctattctctctttcatttccagaacactcttgtcacacttccatttagggttttctgcaaatttctccgttcgagatcaattccgtcgagatctcaagctctctcactcgtagtaaaaaaatggcggcggtagcggcaccaatggcttcgaagccccgtggatctaaagctgaatcgttcgtagacaacaagcggagagaagatatccgattcgcgaacatcaactctgctcgagcagtctctgacgccgtccgtactagtttgggaccgaaaggaatggacaagatgatttccacggcgaacggagaggtaatcattactaacgatggagctacgatccttaacaagatggaggttttgcagccagcggcgaagatgttagtcgagctttccaaatctcaagattcagccgccggagatggtaccacaactgtcgtagtaatcgccggtgcgcttctcaaggagtgtcaatcgcttctcacaaacgggatccaccctactgtcatttcagattcgcttcacaaggcgtgtggtaaggcgatcgatattttgactgccatggctgttccagtggagctcactgatagagattcacttgtgaaatctgcgagcacatcgcttaacagtaaggttgttagtcagtactctacattgcttgctcctttagctgtagatgcggttctctctgttatagatccggaaaagcctgagattgtggatttgcgtgatattaagattgttaagaagcttggtgggactgtggatgatacacatactgtgaaaggtttggtttttgataagaaggttagccgtgctgctggtggaccgactcgtgtggagaatgctaagattgctgtgattcagttccagatctcacctcctaagactgatatcgagcagagtattgttgtctctgattatactcagatggataggatcttgaaagaagagaggaattacatattggggatgattaagaagatcaaagcaactggttgcaatgtgttgttgattcagaagagtattttgagggatgcagtgactgatctatctcttcactatttggccaaagctaagattatggttattaaggatgttgagagagatgagattgaatttgtcaccaagacattgaactgcttgcctatcgccaatattgagcatttcagagctgagaagcttggccatgctgatcttgttgaggaggcctcccttggagatggaaagattttgaagatcactggtatcaaggacatggggagaactacatctgttctagttcgtggctccaaccagcttgttctagatgaagctgaaaggagtttacatgatgccttgtgtgtggttaggtgtctagtgagcaaaaggtttttgattgcaggaggtggtgcaccagagattgagctctcaaggcagctcggtgcttgggctaaggtgctacatgggatggaaggttactgtgtgaagtcttttgctgaagctctcgaagttattccttacacactagccgagaatgcagggttaaaccctatcgccattgtgactgaactcaggaacaagcatgctcaaggggaaatcaacgcagggatcaatgtgaggaaaggacagatcactaacatcttggaggaaaatgttgttcagcctctgcttgtgagtaccagtgcgatcactttagcaactgaatgcgttaggatgattttgaagattgatgacatcgtaactgtgaggtagtgtggtagtttctttcaaaacaggtcccagaacacttctattgctctatctaagcttttgtttcgtttttttcatgtgttgtgcttgcacaatggttttgaacttagactcccttttcttgcaacatgtgctattgcagttaagtggctttatttgtggtttagtgcgattgtatttctttctagtgacttgtgatatcaagatctctcagttttttttgtttcatatgttgatttagttttggttatgaaagtccaaatggtaggagtagaaacagaactttaattactgggactcaaatatttgatgcatgatgggtcacaaaatcagttgcctatctggttaatcatagactgggtcacaaatgttatagattcgttgtatgaaagattaagacagtacacagttgcatgaacatgagttctccaggtcattggtctgtctccaaccagaccggatcagaacatttgcttctctattgtcaactttgatttaatgttaccatcttttcatttttattcataaataaattgcaacccaattttgattacaactcaaaagtaaacgactaggatatcaattgtatgagagacccacttgaggagcctgtgtgttggccaagttcttgtatgtgtatgtacagagaagtaatgcgttgtgtttgcagcacttttacacttcagattcagaattactcttcttgtgttgtgcctcaagtagatgtttggtcagtgactctggatcttgttgactctcttcaagagccagttttctttcttcgtttttgccccaaagaactaagtagagccctagcattataaacactgcaccaacaatcctgcaaagccaaaaagattctattagatcgagtaatcgagagaaacaaaacccgatacatcccgttttcaatgcgcttaccctcccgagtataactgatcaccaagaataagaaacgccatcgcagcaacaagaagtgtctggagaggctggaaaacagcgacaaaaactggaccgcttttgtagatacaccatgtttgaagataaaccaccaaccctgacgctattattccctgtaaacacggccaaaggaacattcatttagctaatttccattgattcagatcaaggaaaaggaagagagagagacagagggagggagcttacggcgtataggatggtgaagagctcttcccaagagacgatgatccaattatttagatcagtttccacaaagagagcaataaccagaaactgaatcagaccaaagaaacatgtgaaggatgttaaagtgagcttcgccgggtattgctttagaacaggagcttgaagaaccatccaaccagcccatgacagacaatgtcccataaggtataaccatccgagtgtcaagctgtgcgagttgtcagatccgaccacctcttccttttgcatgttaaggccctggtcaaatatcggaaatcctctgtacaatgtgatcacggtggctccaccgatgctcacaagagttcccaatacttttgccacaccatgtttcctgaccaggtctatgtgctctagccttgattcatagaggaagatcaatgttagacccagccatgaaaatgattagaatggtatttctaggaggacgaagttgctagggtaccttaaggcacaagccatgatgaaagtgatggcaggaacagagttctgcattgcggaagcaaaagttggagttgcatagtaaagtcctaataggtagaatccttggttcgctgtgatgctgatgttaaaatacacaagcaaagtttcagcattataatcattgatttaaggattgaggaatcggttcttattattgtgttctcaggttaagctataccctatgagtgccaagaagaagaactgagccagtaaagagattgtaagtggaggtctttcttttctgttgataaacaaagcattgtaagagtactatcaaccaaagaatacaatattcaaacttgagatcgtaccaaaaagccctagagctctgaaagatgtggaggcttacttttcgaagaagtaagcgaagggacctatgaggagaagggcaaggagattcctataaacagggtacacaactttgctgacaccaatgttaagagcaactcttgagacaatgtggaagcctgcgaaacaaaactgaagtgtgatcaatgccaccacgagcttcaccttctctgatactactcctttccccattttctctttttcttcttgagctcttcttttcctacttcttctttttttttttgaagtttgatagcacatcaggattgcttttatactaaagtgtgtggtggtgacttgtgatttaatatacaaaacaataattatcaattacacaataaagaaaatggatgattaaggaagaaataaatgttacataatttcttcaagtgggccactatagttgtttataattaatgattatgaataataatgctgataaaagatggttatttgactgtaataatacgattcggaggttgaatgttttacgtgacttagataatgtgggggatatgtttgtatttttatttttattcaaatgatttagggatatatatgtattgttagaagtttcactcatgttcaatgagaggacaccactttgggtcctttatgtcatctaaaattcatacacctacatttacaaatttgtatttgggttgtgcaacggcgacaatagtaatacaaaccactattttatcaatgttcacgttgaatgttgacatatacatatatgtttaatttgattttaagtttgtgtttctagtgaattcttcatttggggattcatttgatttctattatgtttatatattcgtttcttatgtaataatgagtttatggaatcgaatagcatgtggtctagctcataattaggcatcttgtcttgaatgtggaaaaccattaataatttgattgataagtttactaatatctcttcgaaggagcactaaccaccgtttattcagttaacttgtaattgtttcatgtcattagattccaaaaaacggctacaatcaaatgtaccaattaggttggattttaaaactatgacatcttccaaaaagttatgttaaacatataacttgacctaatgtattaagaaactattctgttttaaataatgtttagcaatcatttaagtaatttgtactatgtactctcttttctttttcttctagtggccctaaagagggacacatgcaagattctccattttttcagcccatgatatgaaaattctcagtttgaattatatataatcaaaatattccagcttcagaatccaaaagaaaattaaggatcaaaactgaaacacaaaactaacaacacaatcatcagatcaccaaaatatcaaaaacaaactggcaaaaaaaaaaaacctagacatcaaatctttttaaaaaattcagtcaagaatccctattgagctcagattttaacattaagaatatctgcagaatgaagttaacttagttgtgttttcaacgacttagcacacacctagacatcaaaatcttttaagatttaaaacagacccaaatgatccttattgatcttatactactgtatcatgaagatgaaggattgtgttttcatctacattgctaattagtgtgatcatatatataaacatcgtatcaacatagattgtcaaaaagataccaagaaaccccaaaaataaaatgaatttggtgagaagaatgaatggaagagtatataaaagagacataaataacagatccataaaaggattcaatgataagccttaaagtcaactaattgggttggtagtaccgtttcacacccaatttcgatttgtcttgccatgaaataacaagacagcaacaaaacaccatctacactttcttctctcttccattatttagaataacgtgcacaatggccctaatgctcatttatattcaaaagagcctaccgaagcaatcgatttgggtttctataagagcaaaatccattatttgtggctctagccattggtgaagagcacaagtgcacaactcagtagagcaacgatttgaggcgaatatggagatttaagagagcagcatcaccaaatccaattagataacaccaattcttccttgtactcatatgaaagaacaaaaaaaatcggacaacaatatgactccttgtagtacacaagtgaagttgagactagattctttcatgtacatattttatcaaagagtctgagaaacgataaacagagacccatataactcaaatgatttctacataggctcagttttaagtcagcttaaaacaggagcaattcttcagggcttgatctcaagttttaatgtcatccaatatatgttattgcttatcttactaatgtttcatcaattgctcatcttgctagtgttccatcaagcttgggtttgacgtggtttaaacaatttctgcaatagcaataaagagcatagaatcatcgaccattctagtaaacagagaactatataagcttgatcaatcacaggcttacctttcttagagcatcaatcgaccgcactttctcatctctcttttcacaaaagcactctccacaccagctggagaaatccttgtgatgagttttgagctctctaaatacagaactgcaaggaacaacacgaaagacaagcttaataagaaaccaaataaaaatggaaagtcaattgcaatgtaaaaaaagatgcatggcagtctagaggcaagttttagatgctatttaccttctgcaccatagaagcatattgacccgatgcccgcatgttgtggctctggcaccatggcggtggcggccacggtgaagcacagcttgtccaggtatatgacaataatcatatgtttcctgctttcgcagaaaaaaaagagttgtttatattagctatcagccatatacagaatgttagaagacaagaaagcaacagaaaagagtggcatacatctgcctttgttgctgtgttcacatgtttttcacaccgtgtgcctctgaaaaatagctcccctcccacaaattgattacccaaacaaacattcagcgttacttctgaatcatccacatgaaagcctgaaaatttatataacatctgataattttcagccagaataacgtgagtattggaatatatctgcatttaggacaactagtcaggtcatgggaaattatacaggatatgtcaaagggtctcacctaaatcaacatccctatctttcccatattcaacaacaaaaccatggtgagagtccagagttgctccacccacatcactgaagaatactgcaaaacaaaagattcgaagtagctttttagttttaacactgtgaacatattaaacagactttccaataatagactatgtaatggatttaaaaatatattgcctttagagatgggacgtataaacccctccatgagtttgtcaagcatggtgtctagaccaaagtcgtcaagcacagcaccgtatttattcatggtgtttggtctcattatccggaatttggtctcacccacccacctttcaaaattgtctatctgcatggtcaaacaagagcaaatgaacaaaatacgaaggataagagaaaaacaaaaaatggatgcacattacctcggctagcatcatctcacaaaagctaggctggagcatgtcaaagacgaaaacaccaggagacggttcagatattatatttctgaagctttcctctgtgttttcatttatcgccttaaggaaagcaggaacgaaacatactgtgggaactagagtatacaactccttgtgaagtggctgcagtagaaaaacacttcaaactactaacaaatgactggagcagagcaatacagaacacaagaaagctcaagaaaggattcacacctgataatttgttgtaatcttcagcctatagtcactgtgcctttgagcctgtagcatcagccaaacaaaactacttaataaaactcttgagctcatattgacattttcaaaccattcatgcaatatcttctaccaaccatcatctaaccagattgaaatttccataaccacttaactaaaagtgaaaccagttcatagtagcaattagcaaaagctcaaattttcataatgaagtgtagcttctaaagcaattcacagtcatcaatacaagtaaaaacaaaattcaagagagaaaggtccaaatctagtacttactctggaacgctctccatgaggaagatgcctaagcataatatcagtcatgaatttgattttctcatcacgattcgagacgagcatattcggaggcaagtacttctccagactagaatataccgagtttgggaaatcaagctgcagatcttcataactatcgggtctatgctcgttgttagggtttagccttagtctctggcaagaaaccatcgtagaggtagctctcaatgtcgtgggagccgccgaatgagaattctgacctgcaattgttccgttaccttccaccgtcgtcgtcgtcgtctcttgcgaaccttctcgctgctcacttgacattactaaagaaggcagagaattcaagtgagaaaaaactagggtttcttcttcacactacattccaaaagcaaaaaatcttaaaggggaattgaaatcgactttttaagctctcgatctggagattctgatttttgagttcccgttgaagttagggtttctgaatgttccctcgaagatttttttatcttttatttatttgttaatattacgcacgaaaccaccagtcatacgccttataagaagagttaaatgattttctagcccatctattaggcggcccattaaataattcgaaccggttatttggtttaaactgaaattaccggtataatcgtggaattgaaatcattcgactttgagttgtctgttagtgcgttattggttaacacgtgagagatatcgatagtctcctctggagtttgttaagttcacacgtgtgaatgaaagctttcgctctcaaagcttggtgctttttcgtctcttgcctctgccaaaatcttttggccgccatcgatctttccgatcacggaacaaccgtacgaattgaaagtatctctgcggcgaagtagaaatgtggacggaggaatctttggatttagtgcttgtgccgacgggtctggtcgtgatggttgcttaccatgtctggctcgtctacgctattcttcaccgccccaagctcactgttatcgctctcaacgctgagtctcgacgacaatgggtcttctctatgatgactgtatgtttttttctcttctcatttctattgttcctcttttggtgacattctgggattttcttggtatttctgattctggagattttggggtctagattagggtttatggcaatagagctgctttgttcgtgattttaggaattgggtattgagagtcttacggctctcctatcctcaattttcatgattctgaagttttcgaagtcaactaaaaactagtaaaccataaatatttggatcttcaaacatcaggtagcaaaattgagcagggtttatgatgagtaaagatgatgagattaggagaagcaaagtcttggagctgtcaagtgatgttagatgtgaatcttcattagtagaatcaatgttataatagacggttggctatcttccttggaagcttgacatttttcaagaactcttcttgttcatggaggatatgcatcacagatccctatagttcacaactctacgcatatttcagctagaatcttggagctagttaatgaggttcattggataggaacagagtcatagacatgagaaacaagaacacagtcgtgtgtctgtccgttaagatccgaattatcggtggtcttggctctcagtattggttcttttgcagtagatgatataagtttatctattgttatttccaggaaccactgaaaaatggtaccttggctgttcagacaatccggaacaacataatggcatcaacccttttagccacaacagcaatcactttatgttccatcatcggcgtctttgtaagcaactcgtcatcttcaaaatccacggcaacaaatctcatatacgggagcaaaagccctcgcttagcgtcattcaagaactttgcaatcctgatctgtttcctcatggcctttctctgcaacatccagtcaatcaggtattacgctcacgtaagtttcctagtcacagtgcctgtctcaagagggaaaagagagcactgcgagtacgtgtctagaaacctgaaccgagctagctacttctggtctctcggattacgggctttctacttctccttccctctcttcttatggaccttcgggccaatcccgatgtttgtgtgctgttgtatgatgtcctcgattctatatttcttggacacgaccactagttttaccaggcatcttcatagccaatcgttcagagaaacggctgattcaatggacggcgaaatcgaatcagctgttcatactctgtagattcttctctgacttttgttgtgtattaagagttatatgttaacggtgtcttttgtaatgtgatggaacaactttgtctgcaattatgtatgcgtttgtgttttcatgttacaatgattagaaaacattacaagatgaaaacgcaaacgcctacctaaacgcaaacaaacaatcttaagtatgttcatcactgaagaaagtaatggttttagctttttctgttcttggttttaggtttggataactaagaagaattgttattattcacacaggccttaaaacaattttgttcttgctttgtttccacaggattgagtaaaatccataaacgaaatgttcaagcctcaaactgtttaaacatgactagatacgcacaaaaaggctcacgctcgataagtacattaatgaaaccttttattaagatttaaggacaaaagttcgattcttcttctaatgccaagagacgttacaaagctggagtggcagtgacggcggaaaataagacaatggggatgtctttaggtgatccgatatcggatacgaaggcgaagagatcatacaagatctcattgcattcgtatccactatggatcatctaaactcattcatggaatctggtacctctaattggctcatttcccccacgtctcttagaatcggagaagacagagagaaaaacctaaagcacctgacggactccggacagattgagcatgcaggaataaataagcgcgacactcaagcaagcaccaaagatttggggttttccgaatattttttaaggatttgaaacttctagactgggctgggcctaattaaaagattattagcctaccaaaaaaagttcgagacccatcttctctcttcttactttgttgtctctctctacaatctatatgttggctggccagctgagacaaattacttttgcatttggacgatgatttgtctatttttcttgttaatatggttggtctgttgttgtgtctggctgttcgttgaatttcaagagttttatgttattaacgagtgtttttgatgatatctcatggaacaatttcctttgagttttcatgttataaatgctcgcgtaaatgcaaacaaataattgaaataatagtggtctactatgtaataatgtgatctcaaaaaataatatatatatatatatatatatatataatgtgatctcttgggtttaattcttaatgtattcttcttcttcttcactcaaagtaaaagggtttggttttgaccatggttcaggtgttacactacaaatagtataaaaattaaatttttttgtatgtatataataaaaaaaagagacaaataaagttacattgtaagtggtcgccttaagaagaaaaatcattcatattttattcttcgtcgatcttctgttttgtgtccaattttagaacttttactctattttcatacatccaatctccttgcctctacaatagtataccaaataaacaaattgtatttgttatgttggtcgaatccaaagatcgattttaacattgttatgtgtgtgcatgactaatgcaaaatttacatatccaagattattgttgaactttgtttgtagacaattcttttcttaatctatagctgaatctttgctcaaaggctgaatctcagtggattgtcgttgaattttgtttagaagatctgagtacaataatcatgtttgatagcatcatcgcgattgtgttttttttttttgccattgaagcttcttgaaacacctgccaaatgaaagaaagtaaaagaaaatttagtagtgagaaatttgacaacgcaatgttggcttggaaataatgaccaaactatcaaaccaaactgcattactattatgtatggaaaatgatatatatatatatatatatatatatatatatatatatatatattacaacattgatctagagataacacgatatggagatcaggttaccaaagaagaaaaacatttttaccggcaatgatgaagaatgtataatgttaaacttataagtcacctaaagtatgtgatatatatgcacccatgttagtattacgcatagatgtgaatgtgtatatctatataattatagatgtatgcatatatagatgtgaatgtgcgtatatgtaggttagagagaagaagagataaaggtggtgacagaagtatagagagcacaaaagagtagagatgcaggttctctctctttctctccctctctttctttgaatttgttatacatattttatcatccacatgcggtgtgatgatatatatgtatgtacttgcatgtcatccttagtgctctctatcttctgtcaacaaccaacatcactctcaaacctatgtgtgatatgcaacatcataaagtatgtatgtgtaattaagtattataatgtttgaatatgtgtaagtatatatatatatatagacaatagggagtgtatgaagtgacaaagggaaaatagagagtaatgtgtatatatataggagtaagttgagaaacctcatctccacagactgtacccaaacgttgactctttctacatctagctacattcccctccacacacaaagatatacccaacaccaacataaatttcttcatttgaaaaatgaaatcatatgataaaacaagttttatccctaatgaagatttcaaaacactaggagaatgacttgaataaaatatcaatatgagttcaaaattggaatataatattcatccatatgcatctactagacctaattcaaggtaagctatacattagaatataattggctagagtttataatttattctgttgagttctaatatcagaatattattaatattcagcatccagccagtagatagcaccaaattcttccgtataacgatgccacaatctggttaggaacacgagccaatcaatgtggtaatcatgtgacatgatcagatgtggaggagatttatttgactccaaagttttgtttggcaatggctggcaaaaaccctaaacccaccaaccaaccgtacgtcctcaatgttagaggtgtgtagggtagcaacaccaatttaacttctcacataaaaaataggacaaaaattgaacctttcgtgtgtttcaaccgacaaaaccaaaaatagtaactttgtaaatagttatcgtgaatagtattctaacaaaataagtgatcatctactaatgttaaccgtaacagttattatctctaacaattcgtttatatgatgaccaaaacatataaaatagcttttgattacatttaactatttaagaaataagaattaagatagaataaaaaagctattaactagttcttcatcacctttaattaaatagttatttagaataaatttattttgagaatcagtacaattgcataaatgaatacaattatgtctataaaaattcactcttattagttatttcaactcttttaggcataaagcttgtaaaactttttttcttctttaaataataaaatttggaccctttaattttttataattaatttcctgtagatttaaaaccaaatcttgataacagtcgtggcagatctagatcatcattatctatgcataacacgaactcgagtatgaagaatgaacctctaactggctgagctaaataaacttgactattttactctatctttgaatacgatattgtttcaagggtatagtttcatattaaaacacttcaatgtggctgcttcttaatcaccacaaaaacaagtacttagttagtagtgaaaaactaaaaaccagtttaaacaggtagatatacaacactgtttagataaccgagatggttggcgaattaaacatagttttattaataattgaagaaggaaaacgacagatcaccaaagtagggactatgacattaagaagggaatcaaaacttagtgtttggttattcatgggtttgtcctttttctcttgtaattcagttcctctttgtcgtcttcagttactcttattacttctttgggggttaaaatgtgaaagcctattcatatcaaatcatggatatgacttatgcaataatggacttgttggataacagtaagtgggtgatatgttttggaagtagtttcagtttttttcctattggagaaagagaagaggtcaaaaaaggaatcataacaacttgatttggaggaggaagactttaaagagtgatagacaatggtattaaataagtggggaagagtactatatactgatgagataatcattaattgataaatggaattttcattgcagagtggcacatgtggttaatttaaagctgaagaaacttgtgagccccatattcttcattacaaaaccatttatgtcttattgtagtgtagactgtagagtacatacatgtagacggaccatcgaattttgaaattcagatttggtgtacctttgaaaattcatatcattatgactcaagagtctacgtatctctaaaaatgttcttgtcttctgtgatactttttttttgttagccaggcaatacaaccatcaaaaactaaaagcaataagaatggttggtgcgtttctacttaggttgtatctcccacgctaaactagtgagcacgagttagtcatttaagtatagctccatctaattatagattgtgtccgaacttcgcggttcaaaatcagtgtttctttttcgaacttctattggttgttatcgcttgtacttttttgtcgtacttttttttagtcatatttgttgtaaattttggattttctatttttttattttttttataacctttgtccaaatataaaaatgatataaacacttaacagttataaaaaaaaaactaatatactaatgcagaatttatatcaaaagtattttatttctttgtgtctttcatagtttattagttaaccacaaatatactaatgcagaatttatatcaaaagtattttatttccgtaacattcaaattgaaagtaattaccttttgtcataaaagtaattatgttgtggcagttataagtggttaactacttacattgtcgaatcataaaaaggtaagttccatatacattacatgcaaaacaggagggtttgaaagaaagcatgggcttaaaaccttacttacaagctatttattgggccgattatttaactcatcaattggttgcaatttgagcacttacgtaataatcatgtggtgaagggttcgaatcctcacctctacatttaccatttttgtattttattcttcacaaatagtgggcttgaaagccatatatgatcttcatttcttgtaagttgtaactcaaacgtactttattcaaaagtgatattgggagataaatctccatttagccacagtgtttatttatttttgataatcttcatttaatcatagttattaacttaatatggtaaccgatattcaaccgataaaacaaaaaaaagatc

SEQ ID NO: 437 - DNA, 34067 bp, Arabidopsis thaliana
caagtcaataagaaaaaacccaaaaatatagtaactgctaaaaaaaaaacttaattttgcgatacagaaatattttctcaccccaccccagattcaccccattaaccgtttcaaaaggaaattaaggagttgttcatagtttcgtttgtaaattgcaattgtaagtttgtaactgtaatagaattagattatttagggtttgcttgatcctcgatctgtgatcgattgatctcgcttcgcacccagcaggtatcatttttattccattatctctccggccgtgtagttaatttgttaatgcattttatgtttgcatggtgaatctaacgattttttggaattgttttatatcaatccgaaacaaaaatgattaatatttttcgagacaaatctttgcgttgatttatgatatacgaacaaaaagaagaaacaaaccctattacagattttatcggagaaagtttgcataacaaaccatatgtatacagatgttacaatgaaagtgatatttcaggtttatttaatgagcgtgaaagatggctaagataatgcttggatctcactcggttaagagccatggatggaaggtggctcgtgaacatctttgtgactggctcatcctcgtagtcctcggtctcatcgacattgtactcaatgttatcgagccttttcatcgctatattggacctgacatgttaaccgatctcactttcccattttatgaagacaccatccctatgtgggctgtcccggtaagtaaacttgtttcccaagaaacctttgtcttcattttgcattccatcacaaggaagtatttcgattttcgctgattgattatttgtatgtatggtgtgtgcgtgtagattatttgtatattggttccgatatgcatcttcatagtgtactattactatcgaagagatgtttatgatcttcatcacgccattctcggtgagttaatttctactactgatcaccctcaaatgtatctagtcctatagtacttacaatttcaaatcgaaatccatactatcatatattattgatgatcaacgtgacaagaatatttggaaattgcgtataggtatcggattctcatgtcttgtgactggagtcaccactgattccatcaaagacgcggtcggtaggccacgccctaacttcttttaccgatgttttcccaatggtaaaccggtatgtacatttctatggatccatctcacttatacgttaatttcccggtttatcatgagggaattgtttcttattttgtgcaaatcggaaagaaatgcagaaatttcatccggatactaaggatgttgtgtgtcatggagttaaaaagataatcaaagaaggttacaagagtttccctagtggtcacacttcatgtaagttgttctaaagcattaaaaagacaagtaacaacatctgaattgattccggtttatgttaaccgcttgattacggtatacatgcagggtcattcgctggtttaactttcctagcgtggtacttatcgggtaaaatcaaagtctttgacagaagaggtcacgtggcgaagctatgcctcgtgttcttaccgatactcatatcaattctcatcggaatatcacgcgtagacgactattggcaccattggaccgatgtcttcgccggagctatcatcggaatttttgtcgcttctttctcttacctccacttttttccttacccttacgacgaaaacggtattaaaccaaaacaaacaaaaaattaccatcatgttattgctttcttgataataataacggttgatgacaatattttaacaggatgggctccacatgcgtattttagaatgttggcggagaggagcactggtcgagccacgacgatgactcgaaccggttctcgaggaatgttgggcaacgacgttgagcctggcaactccgcgtcctcgccgcacgatcgccaccgtgaaagcactgattctgacttttgaaaatttcctccacaatgttttaaaaaaaagaagttaattatccgtgtaatttttaattgtatgattgttttcacttactgatatataatatgtatacttttcattaggttgacattgttgttcaccatgtttagaaaagtttgatttggagatgtttgattaacacgtacatgcttcattttggtttatataatggatatataattagtgtgttattaagttgatattgttgttaactatgtttagaaaagtttggtttggttcaaattggtttacttcgattccccaatttcctctcttgggttccggtttcaacttgcatccacattggatccgtagtaattaagaaaagtgattcttcgtcccaatttgtattatttttggggaaattaaaggtactgtattatgttttatttttatagtactctactataatatgagctcaccacatttttgataaaataaaaatatcttatgaagagtcattagtaatgttcaatgtgcatgattgtggcaactggttatgtttaatcaagtttcaatagttacgtctaatttggagaggaaaactttgggaaccgaacaatgtaacgtccggttgaagtaaaccggacacggtaaccgaaaattatccacatgggtttggtttagttttcccaataaggtccagattcatccgccttcttagggatccacttcagcttaacataaagaattttgcctttgcaaaagaattgctcccgacaaattagcaattagactaggtatcccaaaaagcaataacagaggattaaactctctcatcgcaaaagacgttacgcatccaatttgggtaacccgaggctacataaaactgaagcgtcccgtcagacgtaacactgttagcaatgagactagttcctctatttgctgatgcaccttctacgatcaaccgccaatcagagatcagactcaaaatattcaagattagttgttttcatctttcttacatgaactgtgattttgtgaacataattttgtttttcttctttcctcgttacagttttataaaaataatttgtgaattgcagcaagccatcaagctaggattatgttggaactcgtaaagaagttaaaccatgtcaaaggacacaaaataatcatattatacagtactaaacattctacatcaaataaaataaaattatcttaagtacacagctttctaaaacacaaacatcaacattatatattcggatacaaatacatttatactaatttccaaattgtattgttttatcagatgtaacaatactttaaccaattgccgacaaaaacttagatctttttaataattaattaaaaacagaaaaaccaatcttaaaatctcagaaaaactttaatttagatacgcgtaaacagctttatatgtactttttttgttgtcattacgttaataaaatataaatctgatggtaccaaatttataaatataaattacctggcgatgaatcatcatctctgtaaatttctccagctcactttactctgcagagaatctaacgtttcatctttattttatttttatacaaatcacaatttatttttcttattaataataataatagtgattatgttgacgattaataaaggattagtttcgaattatcaatatataaatccgtccaactaacctatcccgtcgttatcgaaccaatggagaccccactccctcctttatcgcaactaaccccaaatcctactcccgccgccgccgtctcttccgctattccggcgccagttaagagcgtagccgttcagcaaccgatcgatggatctccacgcgccgttgctactgataccggaggtattcctgagccacttgcggctgttcccggcgctaagcttcgtcttatgtgcagttttggtggccacatcatgcctcgtccacacgacaaatcgttgacgtactccggcggcgagactcgtattgtggttgttgatcgacgtgcgtcactgtcttcgctccgatctcgtctctctagtatgcttctcaacggccggtcctttactctcaagtaccagctccctagcgaagatctcgattcactcgtcaccatcactaccgatgaagatctggagaacatgatcgaggaatacgatcgcgcggcttcgtcagcgacggcgactgctacgcaacggctccggttgttccttttcgctaacaagctcgagaccgccgctactatgggatctctgcttgacggcacgaaatctgacacatggttcgtcgatgctctgaatcaatctggtttgcttcctcgtggtttatcagattccgccgccgtgaataataccttggtgaatctcgacgaagctagcggcggagagaccgagatccaaaaccttgaaactaatgttggtggcgagaacaataagcgaggggatttggttgctaacggtgtgatttcgcatcaggagatgcatatgagctcgatgcctgattctccaatgatggaagccgctggttcttcgataggatcttcttcttcatctccttccacatccaatttgccaccgattcgcgttagagtcagtgaggaccagaggatagaggaacaattggcacagatgaccttctcaaacatgcaaactcagaggcaatttgatgatggcgttagcttgatggcaaatcggccaatgatgattccacctggtgccatgaacgatgctgcgatggcgtataacaacgcacctggtgatggtactgctcccgcaagcaatggccatgtctcacctgaagacgatcgatccgaattaggtgtatcaactggctacaggaagccacctttgccgatgcaaccagtaacgatcccacctagaactgttggaggctatggcttgacatcccctgattctgttgcaaggtactttcatcttcccctggactctctctagttatttaggtagctataatgatctaggtaatttctgatctcaacttcttagtttctccatcattttcttcagcttgccttgaatttgtagtttcatttgcactgtttctgtttctgttctataatctttacatgtggtttgtattacatctctgatagtggctaagtagctaaaagaaatagatcattggtttgaagtatggtgtatgaatcgatgatggagaaatcatcttaaactgtcaaatgcttaagaattttctatgatctttatcatcatctttgttttattacaccttacaatcagagatttttcaatttggtgttctagatatttgtgtagatattggtatactctttgaaccataacgttacaagagatgttagctttattcttttgaatatgatgatactcaatgctgatatttcttgttgtttatacattacagtgatactagcatttcttctgctacttcattttcaaagccgatgtactaccaagaccaacctccagctctgccaagagctcctccagtggcacagcctgaaaccacctcggcccaaagctctcaagtcttacctcagactgaaaacacttcagcccaaaccacctcccatgtcttatctcagccaggtacgtacacaactatggatcaacaacaacaacaacctctggctcaacaacctttcttacaccaaggcgttcagtatatccctcacccatcacaatacataccaatttactctcatcagcaacaaaactaccctgtttacgtgatgtccgtcccacaatctcagcagtatatcccagcaggaactcccccgctctacccgaactcaaaacccggcacaaactcgagacctgaagctgcccagaacgtttaccgagctgctccccctcaggttattcagcttcagcaacagcatcagtacatgggttacgctggagctcctcaacatagcacaaacgcaaacgccaattacggtactggagctcctcaacatagcacaaacgcaaacgccaactacggtggaccctttgaatacacaaactctccaaacgagacagtgtattaccacacacaagctcctgctgcaaacactgccattccattagcgtctccataccaaagcatgacaccagcagcagccgcagcagctctagccgatatgtccaagcaaatggctcttgacggcggcaaacagcaacagcatatggctgcgtctcagccgctttaaacgctggatctttggtaataaatgcgcaaagtgttaagtatagccgacacggcgcgctctgttctttttgcgtattacatgtaacgtcctgttacatctcgttagatatacataggatttgctatctcgttgttcttatcgtagtttgcttatgtctctctctcttttctgataaataaatatgttttggatatttttttaagttctatattggaattatcttgatccgaagattacacaaaaactcaagaaatggaacaccagtgtatactagatatagaactgtgaagtgatctgttgaggttgcttcatgctttgtcactttaagtgatgcattcaacacttgaaaacttgatattgccgctcagaaaagaaaaaaactccattaacaagtcaagagaacaattccagctttttaaacacaacataaatctccattagcttcattacttataaaacgttcaatcacatatctccaccatggcctctgttaagaccataaacatgtagcagtgattgaagtaaccaattcatcctctgcaaaacttgattccttagctagcttctaggatttcctcatgcgcatcgagatcaaaatcctttgaattcactcgaatcatatgcataaaacagaatcatcttagcctctaacctgaggctctttgattcaacttgtagtcaatctcaccaacagcttatactattgtagattcacgtcaataacctgattgaacaaaccgagtttcaaaacagtacccctgttcaaccatcttgttaaacagaacacaccagcaacttgaaacccactactagtagtaacctttaccatgtcacttatcagcaaaccttgtgatatccctaagacacgcccttaaaacagcttacatatcaactctagaatccttgatgtatctttcaagctgtaaagaaaaacctgcaatacttcttcttgtatgcaactaccaaaacgaatttggctattacaccattcaatttgcagtctttagtcaatgcccttcattttcttaaaaacaaaatccttcacttgactgacctgcagataacttcccatgagtagacacttacgttgtctcgtcatcaaccaagacaaatttatgctcatgagttgttgtcttctaaatgcaatttgaatcctctgcatttgcattcctttctaggacttcttttcagctgctaacaccagctttgagatgagttgtttatcaggcttgatacacaacactttcatagtcttgaagtgaaataccttgagacaactcctgcaacacttacacatgtctcttttcagttccttctttagagaattcattgaaccacttcaataacttcatctctatttacacgttagtgtcttttctgaaatttgcagccagcaactcctatctagaaacctgcaatttatttctgaaaaatctgcagtctacttctaaatgaccttaccaacaatcagctccaaaccaagcctgtatccaccttgtaccatctttgagctgaaaacccgttgataataaactgttcttgacttgttttcttataagcatattgaacttccatgaatctgataaactagtgaattacacagccctttaactcttttatcttcagctaaccttctaagacaacatccacaaacatagctccaccatgaaaaaataacaaccttaagtatatgtattgctaactaaaccggacagatgaaactaaaccggagattaagacatttaaccaaattattgattcaggttctgtagcagattcaggtatgaagaagagcttttttcctgtcacaacctaaaaccctaaatctctgatccgccatgagaggagctctcttgagaaatgcatctctctgcgctcgcagaatcattctttctcctcgtataacccatcagatctcccccaatgttccctttctcgctccaatcgccgctcctgctgctcccaagttcagatttttctcctccgaatccggtgagaactcgactacggcccctgagtcttcgccgactgattcacccgagaagaaagatctcgttgtagaagatgtaagcaacaaaggtaaaacacactctatcctcttgtttggttacctcacacttgaaatggcctttgtattagttgaaatgtgtgagtttaattctcatctcaccatttctcaatacctcatagttttcaattgatccttcgatacaagattcgtagcttcttatctcatgaactagtagaatagctgtaggtaatcgtttgaaattgacttcatttattggattttgtggtctcagagcttaaaagccgtatagagaagtatttcaatgagggtaatgaagatgctttacccggagttattgaagcacttctacagagaagacttgtagacaaacacgcagagactgatgatgaattgttggaaaaaatcgagtctctacctttcaaagatgatgtcaaggatgaagattttgaatccgatttcgaggaagcacattctactgacgaagaacttgaggatttgtacaattctcccgagtatgtagctgaaaagatgaggaagaatgagtttttcaacatggatgataagaagtgggatcacatgattagagaaggtatccaacatgggtgtcttactgatactaaagaatgcgaggagattcttgaggatatgctcaaatgggaccagcttcttcctggtaatggctcgtttattttcaatcttcccgttcatcgactcacatccttagacatagattaggttgattaatagactaatgtgcgtcgttatagctaaacacaatctcttcgtggaacttagcttttgtagttaacctttctatttggatttttctgaatcatggtatgagaagttgagaaccattcgtttttttaactcgtagaaggtaatgtactatgccagatatgttacttctcggatcagtagggccgtttagagaatatattggtttgttcctgtgatgcgtacatatgaacatttctctaactgtgtatgttcattcagatgacttgaagaaaaaggttgaagcaaagtttaatgagcttggagatatgtgtgaaagaggtgaaattgaggctgaagcagcttatgagctttttaaggaatttgaagatgagatggtaattcagtatggggatcagatggaagctgagggtcctccccaatttggtgaaacagatgcttccgataggaatactgacttggatgatccccctggtaaaggcccaatcctcaggtggcaatcaaggatagtttttgctcctggaggtgatgcgtggcatccaaagaacaggaaagttaaaatgtctgttacagtgaaagagcttgggctctcaaagcatcaggctaaaaggctaagggaacttgtagggaaaagataccattcggggaaagacgagcttacaatcaccagcgagaggtatatataactataaatcttaagcttttcgtgagacaagaatgttgaatcatgaaatgtttttgtcctgtcacaggtttgaacaccgagaggaaaacaggaaagactgcttaagaactctttacgggttgatagaagaagctgggaaagccaacaagatcgctgaagacataagaacttcatatgtaaaacaaagactccgtgccaatccagcttttatgcagaaactacaagccaagatcataaggtctaaagaatcagatgccatcaacgcttgaacaaaacttttcccggttagcgcctttcttgtctcaccaaataatctgtaggatcgtcttcttttggcaatcatttgatccgttatggcttttcagatccatgaagaatctttgatggtaactcctatcttagtttggtttgcttgttgtatctcatgaagacatgaaccttggctgtgctgttggtgtctattagagactagttaacgttttctcagaattatgaatctctcctaaagttaaggtttcagatatgtttacgggttcagaatgaaagtaaccaaaggaaagaattggtacaatttttgtttgggttttgtatcagatgtctttctaatttttaaagaaattcaatcagtaagataagaaatggaaactaaataaattattgcttcaatatacgatagctatacatctataaacgaaagtaaaatggtcggactgttctgtttatattttcctgacgaagaaaaatgaaatctcaacctccacaaccaccaccgcaaccggcaccgccacaacctccgccaccggtagaggtgcctgaagtggctctgttgtcggagactccgtcggcacaagagaataacagagcggagaggatacaacaaccgatcacagccaggaacacaacatgaaacaggtaactagcatcgaaatgtgttgttgtggtggccatgctcattacatcttctaataagtgtctcgccatctctctttctctagttaatgtggatgagattaagttgtttaacgtgaaaagctttcctacttatagccgataaattcgtacgtaaggccactgacttttgataaattattcgttcagtagtaagatttctttgtaattaaatttttctttttaagaaaagaagacttatttgttaaaatatagaaaagactgcaatacaagacttaccagaaagtcatccattttagtctactattctcctcctctcaactaaacacatttgactgcggaattttgatggaatcacgtatattagatgaagataggacccggtttataataatttctagttgaagattatgtttctttaaaaatataaaacttgtaattcgaaaggctaggctaattttataggtcaagattatattatgcttttaaagaaatttaaagttcaatatttgataaattacatacatagttctagttaaggttttgtcgaggaagtttagttgaagataaggatttttgaccatttacattagcgtgagaaaagtcaaatgccataatataattatcattaatcataatgtataaatcagcttgaattgcctcgtctttttaaaaaaattataaatattgaagtgattgttcatggcctttgttaaatccaataaaaatacagagattttgtactgtttagttatttatcattggttatcattgattgttcataactttatgcatgagaagctattaagtctctctcttctatttcacgtggactccatttttgttgttggtccaaatttgactatgcaaaatcaaattcttatcaaaggactttcgacgtaacccaatgttcttcccttttttcttttggcgtcttattcttctaccactaaccaaatttaattcatcatggattatgtaatttcgtaatctaaaagcttccgaaacatttgaccaaacaagaatatataactccgtaatatatatttttatttatgtatacaactgccaaaaaataccaaacttccattttttaccaaaaaaatatcaatttttttattttataagtatctaactttctaacaaaacttataaaatactttacgtccataccacatattttgacgtacgcagtttgaactagctaggtgtgagcatcgatttttgggtatagtatgtttcagatttttggaaaaattaaagttccttaataaaaaggaagattgaaaaatgtgttagaatagtcgatgttaagcgagagagaaattgtaggttaaaacaaaagtgaaaagtctaactccacttattattaacattgtcattttcaaaataacaaaatatctctttgacaattttgtagaacaattggtatctattttagacaaagtttggtttggacaaaaaacgaaaatttggtattttgttttgtattttttcccatacatgtaaacaaacgtacgtatcttgatatttatccgaccactttcgctttcgatttagtgtttatttattttatttttatagaagaaaattattattgaaaaaaaaatagctcggttttggcaaatcttaacgttataacaggttttaggaatgtgatggtgatataatgtgcaacagatttgcagcgatgtgctgatgatacccgcttttcaagtgatttggtcgatttatagtttattattatactcatcaaggttaaaactagaccaatatcattaattggagaaagttaccataaacaagttcttgttaattatttccctagaggcttgattttcacaatttcacatcattattccatttgatgatgattatcagatcttaacttcttcttcttcttttaacagatatgtatattaatttgggttgatgaggtcgcataaatacagtagcaaacacattatctctataagtaaagaatgatcagaattaagtaaatttcttgtttttgacagttcctcttgggattttactaagaacattcgtatcgactttcttgtacagcttcttcatcttcctcatcaacttacccgccgctgtatccacgtcgtcctcgtacatctcatacataaccggtaaggtttgcatgcttacaaaccctgaacgacacgacgtccattaattccgttaattaataaaagggaattaaatctacatatatagttgagtatcatgacttaattcttcttacctatgaagagaagattcacaaagttgaaatatgtcccgatgatggatacgatataaagcgagatcgttgtctggaaatatagtaaccaatttaagcaaaataataatgaatccaaagttatatatatatatatatataagtggaaaattattattctatataatatcttacgagaaaaaagagaggaggatctcttccacaagcaacgtcaagaagctttgtgaggatttggttgaatctaacatggaagcttcttgctaattgtttgaaagaagattcgtctagtacaacttctggtattagtggtctttccctgcaattttgtttatttaattgtcgttttattggtaaggaaatcttgtaatttgtatatttttaaccaattgatcatgagaaattgaaaaaagattaatcaagtaaagatataaacataccaattgagaaaatcagaagcagtagaccaaatgaagaaaaaaagcatggaggtcatggaagcatgacaaattagggttatgaaattgtattccactacttccattaagaaccataagatgctcactcctatcaccaatgttgctgctattttcggctctctccataacagaatatccgcaactgttaatcacgaatgcaagttgttaaaatttagtgtttgtctacattataattttggtgataattttggataatagcaaaataaaatgtgatatttgaagagaattgatggatataaacatgtactttcacacacgcataccgattgaaccgatataaagtttgaaagagagtgagacaaatacctttaccacctccaaatatagagtgaatagatcgttgacgagtgaagagcttagttgttttatggatcgttctttcgtcttcagaatcggaggacgatcccgtaaatattggcatggttggatcaaatttattaagataaaagttactgcggtaagaaacaacaatgaaatgaatgtaatcactatgtaaaatagttgatttggattaggagaaaatgtgaaaagcaacaaatataagaagaaagaagaagagataggttctaggcttgggaacaaaggtaacaaaaacatattcaagaagcaaagaatgggaatggttttgaccttgttccttctcccatttatttcttcatcttcatgtctcaataaactattcaaacccctcacgtacgttgcatatattttaactgagtgttatcttcccggtataagtgaagacccgaagatctggtctaaaccgtagcaatttgaaccgaaccggtttataacaagacgccgatttaaccggagttgctggagttaagatgattccgttcggaattggccgtgggatttgcccgaggcttggaacgacaaattggtgttcgcggtggtgatgaagaatccgctgagatcaaaaaatgttttcgattttatcatcatcttcttcttcacaactcgtcaattcaactctcaatttccaaaattcgccgaaatctccgatcaccgttatgtcgaagacgtctaaattcaaaaccctgacggagaatttcaccgtgagagtgcttaaagcagagaatcgcgaactgaacgtggctctgctctcacctttcactatcgcttcttcacggcttgattctgtcagtaatgttgcgattcggattgagctcaacgatggatttgtgggttggggagaagctccgattttgccgtcggtaacggcggaggatcagataatggctatggtaaaagcgcgggaagctagtgagtttctgagagagttaccggagatgaaactcggtaatgttcttcaggagatcggaagatttcttcctggtcatcagtttgcttctgtaagtctgacatcttgtatagttgatgctaaagttgtgattttgaggtcaagttaaagttcaaattttgggtctacattggctttgatctttctctcaaggaagaaaataagaaaatttctgaagtgggttttaggtaagagctgggatggagatggctatgattgatgcagctgctaagagtgtaagagtgccattgtggaaactatttggtggagcttcaagtacgattactacagacataacagttcggttctaactttagctcttcctgctacaatttcctttcaatttttgtgtgtttgcaaacaaattcctaaagtttatagtcattggctcctaaagtgattcaactatgactataacttagattatgtgtgttaacactgcattcatagtttctcaagtatgaaagtatggaatgttaatggcttgaaatttggagcgtatgaagttttgaattgtttgtagaatgttaatggcttgaaaacaccgggaacactaataaattactcaagtatgaaggtttgtgtgatttgtggttctcagattccgatagtttctccggctgaagcttccgtattggcctcaaagtatagaaaacgaggttttgaaaccttgaagctcaaggtgggaaagaatcttaaggctgacatagaagttctccaggctatacgtgcagtccaccctacttgttccttcattttggatgccaatgagggttatcaaacagaggaagctgttaaagttctcgagacgctgcatggtaaacaggtttctgaatcatttttggaattttctcagttaggtattgagcgctagaggttttaaaaaaggataggtgtttggaaaacttctagcctgttcaaactttagtagctggcgtttcttttctcggttaaaacctgaattgttgtgattgttttgcacagaaatgaaggttacaccggttctctttgaacaacctgtccacagagacaattgggagggtctcagtcacgtgactcgaactgcaaagaacagattcggagtctctattgcagcagatgagagttgcagaggcttgactgatctcaaaaaaatcatagaaggtaatatcgtagatgttgtgaacatcaaactcgccaaaaccggaatcctcgagtctcttgaggtaattgaattggctagatcatctggcattgagcttatgatagggggaatggtggagactagattagcaatggggttctctggtcaccttgctgctggccttggatgcttcaggtatactcaaatttgtaaacaccacatttctttctaatgtgaacatcataattctaacaagttaagaaggaatacacagattcatcgacttggacactccgcttcttctggctgatgatccagttcaaggtggctacaaaggtaaaatagtctctgttttcttcatcttgcatttttccttgttaaaaagatgattgaaattcaaaatgaacaagtctaatgcttgtggttttgttgacagcatgtggtgctgtctatgagtttaaagatgaaggcggtcacggaggatatcttcagtggaatgatgttgctcagtgaaattccttttgtctacttaggtcccttttcttttgttcaataggattttaatcgtaagtttaatgttggttttgggttttgtaaaggctaatcttggtcctaaattctcagtatgtgttagttgagagtgtatgtaatctagaatctttgtaacttcagccccagggagtaataagtgtatgaattcattacagtgatctgcttgatatctgtctgaaacacacaacacaggtctaagtcacagagcttataatagatcacaatatgtgattcttgtttcgatctttgattattggggatttcatttgcagagtctgttttgtcaactaattccagacttttattttagtcattatttgtgagtattgatagagagaaagtgaaaatgaaattgcttttcttgtggaagaaataagagcaaaactggtaggtgtagtggtgactggtgaggcgtgaaaatctcaacagatgtacagagatttctggtaaaggtccaattaaacactggactagctatttatttatttttaattacagaaaatattatttggctaattacagaaaataaaatgtcaatttttatggtcatctgagttttgaaaagaatccaaaatagaatacaaagcccaaccaaaagaatttaagccctaaaaaaaaaaatacctataaactaagtcgaaaaaaaactttaaatttttcggaaactaagctatatgcaagaaaaatataaacactagaattataaagcagaactcttaaagccaaaatccaaagatatcgaaatcatatactaagaatagagacaaacaaacttaaacccgaagaaacaccactaaatccaaagacaaaacatggtctttttttgaaaaatttacgaaatagatttaccaatgttttttttttgttttttttttagatgtaccaatgttgttcatggccaacccatcaatgacatatgcctcctcctattacgaggaaagatgatatttcgaatccaagtaaccaagactttataacttggcaagcaaatgcaaaaaatgagcttaatacttggcaagtaaaatgtcaacttgccaacttgtcaagaatatggcttaaatgcgtattcaaaaagcttaaaatgtcaaaccaaagttgacattggtggctagtccggaatggatgaaaccaccctttaaaaaagttttaccaaaaaaaaaaaagaaaaagtaaaatgtcaatataaacagacaaatacaaatgtttattcaaattgtattggtaaaagctaattttgagaatcgttttctaaaaacaaccagcacaatcaacaattttttatataaaaaaatctctaatatgaaaattcaaaaacatgccgtaagataattattagtgtttttgtttaagataaagttatgtacgttacactttatttatatacaaattatatgacatgtataatgcacattagaaggagctttttaattaaatatttacacaatatattttattacatataagaagagcaataataacaatcgaaattgtgacatactaggcgtgagaatcttaaagtttatttcacgatagataatgttctggacccactttctcttatttcattcaatcatttactaatactattttgttttagtttttttttgaacaaaactactaatactattttgtaagccttgttaatttctctgtgataaagttatatagtttcgttgttacaaggatgtcatctccattttctagtttttgataagagtaaaagtatatcaaccctcaaagtcgagaacacatgtttgcatgagctacaaaaacaacaaccaaccaatgtgtgtgaagtgtgaacatatttgttgtgaaatacgcaccaaacattccatgttctccttgtagtttcagttcaaatgctacactaaagagaaaattggatatgttcattaatttactacaattgtgtcaaaagaagaatgttcaatgagtgattgtggaaatgattattcacacgtatcccaaaacgcacgcttcatctcaagatcatcattttgtaaaaaaatattaattgatttgttgttgttttgtgtgtgtgagattcattgaagtaataatgacgataaaggagacggcaacaaatattggcacgacacaagtaccatcaccgaaagtcctcggcgcctctttcgcctcctaagttttcctacttcgaccccactttgtttttcgtttgttaaattcctcttatttttgtgaatccatatataaaaaaaagttcttttcatggatgaatataatcgtatttggctatttgctgtgttttgtcagtataaatgttcactcttatcaagtagttacttttttggtcgacaaatagaggagttaaaatatatgaagttatatatattgagtgttgatttataatttgtagtgcttctttccactcaaaacaagaaaaaaaagagggaacaaagactaaaaacgttgacaattaaaagaagaaaacactgaaaataaatgaatatataattaagatattagtatcgcattttttttttttgaatactttccccaatgttacccatatgatattcatcaagtcaaagtcacgagagttcttaatatgcatccacattgttaatattccaatgcaattattttagttataagcaatattcaaattgatttaaatttggatggcatgatactatacgaatgcatgataaaaaagcatcgagctctttattaacaactacaccaaaggtcatccaccaaacttgtagattataattatatatgttcttccaatactaaactaaaatgaaaacaaaaatcgaaaaacgaaacaaataagaggccgcactataagcaagtgcaccaatagattaatactggtttataattttttttataatccatatagtatttcttaataattttcttcttagaaaatactaatatagtagaaaaaattaagaaaaagcatttcactttcccactctataaataggaggagatgtcaaaaaccacaacacaccaaaaacacatttctataaactcagaaacaaacaaaagatcaagaagaaacatggtgatgatcaagaccacaatggtttccctttttgctctagcggcggttctcctaatgattctagccccggcggcagaagccgtgacgtgctcgccaatgcagctaagcccatgtgcaacggcgataacgtcgtcttctccaccatcggctttgtgctgtgcaaagctgaaggagcagaggccatgcttatgtggttacatgagaaaccctagcctccgtcgcttcgtcagcactcccaacgctcgtaaagtctctaaaagttgcaaactccccatcccaaggtgttaaaaagtcagaaaagtgtttgctgtttatgatcatcctatatatgtttgaatcctacttttggtgtgtgtttaaggatgtttatttatgaccactataagtagtagagttaaataagtaagtggtactcttggtgatgctttgtatgcatcttatttaaatttttgctatcttattctggttgttgttgatatatatatatatacatgatggtgtaataactgagatgatataatatatgaaaattatatttcaaaaacacaaaagaatcaatggatacatgaaaatcactgtacagtaacacaccaactagtattcataagagaaaatctaggatttcgacttgctttgttacaacttgttcatctcctcgtcgtcgtgatctatgcttactacttttctccccattcctcttcttcttctccttcgtcttctctcttatcgagctctgtttttttatccctgaatgattatctttttctctttccttctcctttccttgacccattagagcagtctggatcgtacgagacagaagttcatcattattaatcgagtctcgcaggtccatgcccaagttcttattaattcttgggttgtaattgctatcttattaggttccgcagttctagcgattcgcaatccacatacaattccaactgacggccaaaatttctttgaatttgtccttttgtctttaatccatcttctttgtccagttgcaccactacaggtctcagttttgattggttcatctttttcttagtgttaaatgagtccaccgatatctcattcgctggtgggtattcgtttagtgtgttgttgtcgtcaatgctatcattgtggatgtcgttcttctgataggagaggtagtacaggccatggcgttttctgtgttccgcaagtaaggatgcagattcaagcggatgagatgaagatgacgaggcttcttcttgatccctggttctaagttttgtgaggaagagaacgaattgaaatttgaatttgagtccaatctaacgagtgcaagtatggaaagaaacatacaaaatgtaacaaaaatctaagaaacataccaccaaacgtgagatttggagcatgcctagggtatccaacagctccaagagcactagagtacttcccaccactggatctcaaaccacgagcgacagcagctctaaaaacaggcaacatcatcgcaaaattagagatttctcgataatcgtaatttcggtgaaatgggccagcatattttactctcttatactattaaacctagcccaataattttctattgaagtaaatagcctacgaatcaaaacatatgtttaagtgaatgagcctgcactatattctaggatcctagatattattaagtactagactaagcttttgggtttggtaaaacgattctataaagtatacgaatttttaattattagaaatggataaatacagagtattttgaatctatctattcctctttgatctaatttagtttagtcgtctttaatgttaaatgtgcaaagaaactgcaatcaagatttggtatactccttaaccttaataaattcacaatttactcaatgagaataagaatggataagggtacaactagagttgaaattgtatgaccataagctcaaattattcatgatataattagttttgatacttgagaagtgaaatcaaaaatcagattcgagggtttttcatgtcggtgatcgtgattttttaaattcggattctgatgtgagagagtaacggaacatgagagggaaaagaaatggacctaaacaataatgtttaatatatattatctatatttctgaaaaagataataataatttttatttttatttttattaatgcatgctaaaatattatatgattttctttgttaaataatttctgaataaatttttcatttgttatgaggtcaaatatttttagttaacaatgtatgtccactggccactgctcatagtcttctttctgtttgatgggaaacaaaatagccaaatactttacaaagtagaataaacaaaaatattagttttgaaacttcaaaatttattctagcttaaggtcctaaaccaattacctcatctggagaaaatacctcatcacataaaggagtcacgatcctaactcttatcttcccatatgtagctatttaatattgtacgtttgacatttggcagtaaacataaacatcaattttgttttctactgttaaagtctatatactatatcaaatttaatattatatttatagtttgacctaactaaaaacaccacgctggctctacatatccataacctccgaatattatctcatctatttttccccaacctacgaatatttctcccaactactgctctttctatttttaaccccaagaaatatatttcatgatgtatatatatattcttaagagttaaacttagaccaaagatcatgtaatttttctcataaacagaatggtttaaatgaaaaataatataaactatgtttaactaaaaaaagcaaaagcaataacaattattcatgagttaacgtaaatgataattaatggtcgctctcgctttcatggacctattaaggttttgtcgttttcacaaggctaaaaataaagttgaagttgaaatgcggtttgattaggaaaatctttattttctactaaggagagcaatttgtttacgcatctgatattttataagtacggacatactaaataaacagttgacataattagtttaattataaagtgccaaaatagtaacaaacatggagattccaatttggaaatacggcatggaacgtttctgatgtaaactataagttaacgtagtttcacataaatattctaatgcactgaaaacattaaacatcgaatctgtgtttctttttcaacattttgtgtgtgtgtttgttttttatacaagaagaacaatcttatgatgaattaagtaacatgatcaacttcaccatttgccaatacttttactaacaaataacaacacacttgtataatataaatggcaaaaagtaaaatcactactagtcgtgtaaaatatatttgttgtgcagtaatttctcgttaacaatgtgaaaaaatagtaggatgattcacgtcaattaatgttgtaagctcataattaatttgatacaaactaaatatataatatagtggcggaatgtagacataactcttatatatattgatgttttaaccaaaaaaaacaactcttatgttgatgataaagtatactataaattgtgcgtcttgtttcacttactgttttttggatcgaatatagagggcccaaattctgaaaatatcgtgtgcttaaaaagaagtagaatttatagaagggttttttaaaatatccaaagagcttttatattcaaaagctgggtcaaataaaatatatatagatatattaataattcaaacaaagatttaataaatttataattaaagatggtttagtatattcaaaagctttgtcaaatattacagtatatataattttgtataacaatattacagatacaataaaattaaaagctgtgtcttatgtgtctcaaaaatcatattccaataatattacccttcaaaataattataatattaatcataattactttttttttagtgagaagatattgtacatataacaatcaaccgatgctaagagattactaagaatatgaagatatatttatgtatatactatatacacatcaagtatataacataaaataataccagttaagctaccaataatctgtcctctatatacagtttatatatggaaaactcaatagtaaatattgataatttcatctgtagtgaatttttgatatgttggtagtgcattactggtaatgcgttatgcattgatttccatatgagatgaaatgtcttatctttatttagtgcaatctgagtattgaaaacaatttccccagtttttttttttttttacgtcaaatattgtgtgcttattttaaagagaagaaaccaacaaagagatattccagaggacacggctttgtatgtatctgactaagaacaagacacacatgaatgatgaaggtgttggtcgggattgatgttaaagatgtaccaatcacatcaatatatacatatataaagaaaattaattttaaaaatcaggctaaaaattaacgatacaatattttataaaaacattttctcatgagtttctttgaaaacacgatatatgttcacttttgatatgcagacatgcagtaaactttaaaaatatgttgagatgcatatgctcattgtctttatcttcttttctctcctttttttttgttaattatatatggtaaagtagacttgtaagtaaaagttcttatacagaaaaaggtcgattttttttttgggtcaaattttaacagatttttggaatgaaaactgacgtatcctcttacgaagtgctaatttaaattggagttgaacaagtctcatattgaattagcaaaaatttagagtcaaccaaacatctagacctaaaaaacttcatgaaatttaatttttccaatattgcaaaaccggttcaatcaagttatattggtagaaacatatagtgaaagatatgtttttctagatctactacatgaacagaaatggcaattctaatggaaaaaacagatggaaccagaaaaatagagtaagaacgaaaacttaaatatagaatgttgaaacaagataagtgtaaggatgcatttaaaaggaagagacgaggcaaataaacattatccttagacgaaaaaaataaaacaaaacaaaagagggaaaaaggatacatgaaaagagattgatcactatattgatggatcacaattcacaaaaagccaacccattgcctattgtacacttgcacgatactcgaaatttccaaataattcggaacaaaaaaaacagctatattcattttttaaaataatcaaccaatcgaatttagtcttaaattgtataattgttttaatcatttaggtttacgatcataattaggtggtcatagatgcctatatcgttgcattaattgaagaagggagaataataatcctaccatctatgatcctataagattgcaataaagctatatatatatatatatattcatatagtatatatgatctaatctcttgttaattactatataaattaggtaaaggttaccgtagaaaattacgtggaacaatgttgaaatgcttacataagttgactagtccgtgttgtttttgttctttatagaattatagtcaagaacggcgaattattaagttgtttctgattataaaataaataggttgttgtgaaatcgggggaaaaagaataatgaatacttgttaaatattggtcccctaataaatgttatttattttggttataagaaaaaaaaggaatgtgttgtggagaagagagcgcgagtggaacttgttgctacccaattgtcgccacacttcccacacgtcccctcttgtatcttttttttacttttcaccacttcctttgtcctctgtttttttcccaccattttctacttcatcaatctattccttttgtttttttggtaaaatatgtaaatatcatctatttaaaaataaaatatgaacgaatagatttataaatatacaaaattgaaattttaagatacttttaatcgaaaagagttcccaaatatttacgtaattaacatttttcaaagtttatttaggtttaaatgtaattttctggtgtaccactaactagactatacataatataaacacgactgtgaaacatgatcatcattagctgttgattatctactaaagaattgtttgttatctctacataagaatatatattgaacacgatttctattatcttttactaatttgaaatagaattgtttctagtaatgacacaaaattaattgactcaatctagtaaaccttggagcacatgcaaactcaattaaacaagtttaaacctttgtatttgcatttattaatcaaagcaaaactgtgaagcaataatttaatcaatggtttaattaagaagctaattagctatttggctcctttagattacgaacgggtgctgctacatctcctctctgtcattagtcattactaaatatttaaaccaagttcgaatctgtcttacattatcttatttcataaaatctcaaagccaaattcatcttttcttttgaaagtgctccctcaaaagctaaacctcaaacatataaaatagcaaattcattttaacaaaagcttaatgaattccacgtaagcaattacataacgtttttgcccctagtcagtagagtccctccttctaactccgagaaccagcgtccatgtctcgcggaccaaatgcgttcgtaggtaagacgcttgcacgtgtcgagatgtaatcggtcacgtgccaacctgggttggttgcatcagcatccgacgtggcgatgtgaatggccacgtgctacaaaacctatgtatagaaacacccacccaatccccaagcacttttattcattttctataaaaaaatttacaaggatcgtataatactactaacagttttttttaaatattttccagataaacattaataaaacgataaaaggcaaaaaataaaaaagaaaagaaagcaaaagcaaaatcaaaatcgatatatcagacaacgcctcgacctttctttctttttttccttctcatcgtctccgttgaacaacaccacacaaacaccagaagaacaccagataattcccatggtgaaccgagctcagatttgaaaattgaaggtcgtagacgaatcataaggaaagagagaagtggtttgagatttcttttttgacggacgaaaacggagataagctttgggggaaatggcgacgccgttaccagattttgagacggcgagaggcggcggagcagtggcgtcttcttcaaccacggttcttccgagttctgtgtcttcttcttcttcttcatctcgtccgttgcctgtggcgaattcgttctcggatgacgcggaagagatttctccgatcctgattttcttgttctttcataaggcagtatgtagtgagcttgaagctcttcatagattggctcttgagtttgctactggtcaccatgtcgatctccggctgcttcgtgaacggtaccggttcttgagatccatctataagcatcactgcaatgccgaagacgaggtaatgcgaaaacctggtcctcttcttttaaatttgatctcatcatgttctgaaaactgctgaattagaatttggaaccatctctacttggattttgaactcaatacatatagctgcaaatttgtgtaaatctgacttgattttatcttaaacgaattgtaagtctcaattagtctcttgctgatcatcctattgattctatgagtgcgttgtagatagggaatctattgcaacatatttgtattgctatgttatgaggaagaattgttgacagttgcaaatctgtggatgtaggtgatattttcagctcttgacatacgtgtgaagaatgtagcgcaaacatattctcttgaacacaagggggaaagcaatcttttcgatcatctctttgagctgctgaattctgccacggaaactgatgaaagttaccgaagggagttggctcgttctaccggagcacttcagacttctgttagccagcacttggcgaaagaacagaaacaggtatttttttcttttccttcacatcacagatgtattatctctgttgttttctattaacacagatcgaatatttagcattacgcattggcctttattaattacgggttgttcttggcttgttgataggtgttccccttacttattgagaaattcaagtatgaggagcaagcttacatagtctggcggtttctctgcagtattcctgtgaatatgcttgctgtgttcttgccatggatttcttcttccatttcagtagatgaaagcaaggagatgcaaacgtgcttaaagaagatagttccaggcgagaagctccttcagcaggtaagttttgaattaagatccaactttctaagttgaaagactttggcttgttgattgatattttccttttgaaggttattttcacctggctgggagggaaaagcaataccgtggcttcgtgtcgcattgaagattctatgttccagtgctgtctagattcttctagcagcatgcttccttgtaaagcaagtagagaacagtgcgcatgtgagggttccaagattgggaagagaaagtacccagagcttactaactttggctcatctgatactctgcacccagttgatgagataaagctctggcacaagtcaatcaacaaggagatgaaagaaatagccgatgaggctaggaagattcagctgtctggagatttttcggatttatcggcatttgatgaacgcttacaatatattgctgaagtgtgcatcttccataggtatttgttgtatcctttcatttacaatgaaaacagaataatctcaattttgctattgtttattggctatcttttgtgggactattcaatgttgatttattgaggtaaataactagatttgttttataaagttgatgttgatggccactaaaacacgtttgccagctgtgatgtgttttactttcaagtgatatggatgttgtttatcctttactcttctcatgcttaagcacgtttctgcattagagtgttatcattcgaaaaagagttttatcaaatgttcatatctacatacaactttttttttcttctgacagagattgaattgtcattggactatttttgagatgatctgttcttttctcgtgcagtcttgcagaggacaagatcatatttccagctgtagatggagagttttcattttctgaagagcacgatgaagaagaaaatcagtttaacgagtttcgatgcttaattgaaaatatcaagagtgctggagcctcttctacttccgctgccgaattttacactaagctgtgctcacatgctgatcaaataatggaaactattcaaagacacttccataacgaggaaattcaggtgaactattgcttttaagtgctgtatgatattgtaaacaggtgaaactatgaaagtttggcataagatcatttgatactatatgctatgaagattcaagataccaatttcaggatgtcaactaacttgtagtggttgcaggtgctaccccttgcacgaaagaacttcagcttcaaaagacaacaagaacttctctaccaaagcctgtgtataatgccattgagactaattgaacgagttttgccatggttgacggcatctttaacagaagatgaagctaagaattttctgaagaacttgcaagctggaggtactatctactgtactgccttaaacttaaccttctttcaaattattagctactcacaattttgcataattacatgctttttcttgtggcctcagcacctaaatcggatgttgctctcgttactcttttctctggttgggcttgcaaaggacgcaaagccggggaatgcttgtctccaaacgggaatggtttatgccctgtgaaaacactaagcaacattaaagaagtcaaccttcagtcatgtaatgcttgtgcgtctgttccatgcacgagtaggagtacaaaatcgtgttgccagcatcaagataaaaggccagctaagcgaactgctgtattgtcttgtgaaaaaaaaaccacccctcactcgacagaagttgcaaatgggtgcaagccatctggaaatggtaggtcatgctgtgttccggatctcggagttaacaataattgtctggaacttggttctcttccagcagctaaagctatgagatcttcttcgctaaactctgctgcacccgctcttaattccagcctctttatttgggaaatggatagtaacagctttggtactggacatgctgagcggccagttgctacaatattcaagtttcacaaggccataagcaaagatctagagtttcttgatgttgaatctggaaagctcattgattgcgatggaacatttattcgtcaatttatcggtcgatttcacctactctggggtttctacaaggctcatagtaatgcagaagatgacatcctatttccagctctagaatcgaaggagacacttcacaatgtcagtcactcttacacgctcgaccataaacaggaggagaagttgtttggagatatttatagtgtccttaccgaactttcaattcttcatgagaagttacagagtgattctatgatggaggacatagctcaaactgacactgttcggacggatatcgataacggtgactgcaacaagaaatacaatgaactggctacaaagctacaggggatgtgcaaatccattaaaatcactttggatcagcacattttcttggaggaactggagctttggcctctatttgacaaacacttctccattcaagagcaagacaagattgtgggtcgtataatcggaacaacgggtgctgaagttcttcaatctatgttaccatgggtgacgtctgccctttctgaagatgagcaaaacagaatgatggatacctggaagcaggcaaccaagaacacaatgttcgatgaatggcttaatgaatgctggaaaggatcacccgactcatcctcaacagaaacatccaaacctagtccacagaaaggtaaaagcattgcttagctatttctcaccaacttaatatctaacttgtttaatgtaaccttagatgtttcttctttggacttcataactcatacttaagctggcaactatagtttctctgtgctaagtttgttttgcttatgtcaagtttattttccatatagataatgatcatcaagaaatcttggaccaaagtggtgaactatttaagccagggtggaaagatattttccgcatgaaccagaatgaactagaggctgaaatcaggaaggtctatcaggactcaacacttgatccgaggagaaaagattatctcgtacagaattggaggaccaggtcagatttttttcactatttccacgcatggatcctttattccacattgtcatgcatacagcatgccagacataaatctagaaccccccaaagagataatacatttccctgtattacttgaacttcttttgcaatgcggaagagtataagtggtgctcctgtcctttacagtttcccaatccaaaataacgtgctcagtttattttccactgtgcatgtatatgtgtccttgattgagcaatcttctgatatagagaacctataatctcattcacatgtccctcatacccgaatcctatttgttctagagtaacatttattttaaaattcttctgttggtgcatttatcagtcgatggattgcggctcagcaaaagttacctaaggaagcagaaactgcagtaaatggtgatgttgaacttggatgttccccgtcttttcgggatcccgagaagcagatatatggatgcgagcattacaagcgtaactgcaagcttcgagctgcttgttgtgatcagttgttcacttgtaggttttgccatgacaaagtaagcgaccactccatggataggtaagatcttatattctaaagccagtttcccctaattaaattgaaacttctttgttcgtattttttttctctctctgtgatatgtaattttatatttgaaacatattacagaaaattggtgacggaaatgctctgtatgcggtgcctcaaggtgcaacctgttggtcccatctgcacaacaccttcatgcgacggattcccaatggcaaagcactattgcagtatttgcaaactttttgatgatgaaaggtaaacaaaacccaacagtttgatgcataaacgaatcaatttaccactgtcaaaaatcaaacttcagaagctattctaaccgtgagaaacaattatctgcattcagggccgtttaccactgtccattctgcaacctttgccgggtcggggaaggactaggaatcgattttttccattgcatgacatgtaactgttgcctagggatgaaattagtaaaccacaagtgcctcgagaagagcctcgagacaaattgccccatctgctgcgaatttcttttcacatcgagtgaagcagttagagccttaccatgtggtcactacatgcactcagcttgcttccaggtttgcaaatctctctttctctcattaaacttaaattaacttttaacgcctaaaatcaaaacacttgctgttactctggtctttcaggcttacacttgcagtcactacacatgtccaatctgtggaaaatcattaggagatatggctgtaagatgatccccgcccctcaagagtgtaacatgcatatcacatcatgcaaatattgtttactgaactgtttcttcttcgtttcttttgcgaactccacaggtttattttggtatgcttgatgcactgttagctgcagaagaacttccagaggaatacaaaaatcgctgtcaggtgagaaacactaaaactgctgcgtcttgactatttcttttagtctagtcatttcatgacacacatacacaaatgtttcaggacattctatgtaatgattgtgaacgcaaaggaactacacggttccattggttgtaccataaatgtggtagctgtggttcttacaatacccgggtgatcaagtccgaaacaatccccccggactgctcaacctcatcctgaaaacaccaagaggtttcactcacttgttactctctttttttctttccttttttcgggttttaccctctgtttcgcacaacaatgtgaagaagcccgttgatagattttttttttgtatagtctctgagatattaagattttgaagagtctttatttaggttaccttactatacattttggcttgaacaaagccaaaaaatttcgtttgtttctggaacatcccataccgtcatcctctttcttccacataatccgctatttgtttttgcattaagctgagactttttctttgaagagtgtaaatagttaacaatttttaatagaaaacttttttccactcttcgtatctgactatactatttcttattgttgatgtcaagaaaaaaaaaatctacacttcagagtttttaaattttcgcgagggaaaataatcagggttggttaaaagaaaacgacatgttttagtttgtttatttaaccgtactatcagaaatcaaactaaaatcgaaaagctgacaaaccgtatctgagcgggcggtgaaatcctcacaagcaagttttctaacactgtttcttttatacgtaacgtaacccatcattgttatgtaatggaaagaagaagcagcaagagagccaaaaaaatacttgataattcatcataattccttcaaaactattgaactttaaattaattgatagtttatagaaaagtaaataagaaaatattgtctaaacgatcaaagttcaacagaaaataataaaaattagttttctaaaacactcattcctctaaattttgaaaaagacgtattttatagtaacaaagttgtgaagctgattttagacgacgggtcggaaaaaaaaaacgagtacaacgttacaatcgcgtccctaactctctctctccgaataattcgaacagacataaaataaaatttcgtgagaataaatacacaaaccaaaaccaaaaatccaaaaaagaaaaaaactttgaagttgctccaaaggaaagagagaagaaagctcaccaaaaaaaaaaaagaaaggaatcttccatcttcccacggcggagagaaaccaatcaaatcaatcaatggagcttcctcctccaccggaaagatccaaacgcctccataacttcaccttaccttatctccgatggggtcagcaaagattcctccgctgcgtcaagcttcctcaccacaaccgatctccttcttttccttcttcttcttcttctccttctcccgatcatagatctcacaacggaggactttcaggtgagctcaggctcgatctcgtctacgatgccaacagacctaagctctccgttttgggcaatggaggtgacaacaacaacggcgatgttgttgcagctgctcggccgtggaatttgagaacgagaagagctgcttgtaacgaaccacctggtgatgattccaccaggatcatcgagtcttcttcttctctacggagacatgaaattggcgttaagagaggtggtagcgaagatggaggagattcgcagcagaataagaatgagaaagtgaaattctctgtttctttgttgagagaagaaatcgaacaagatttctctgccttaattggtaaaagacctccgagacgaccgaagaagagacccagattggttcagaagcaaatgaatgtaacttcttcttcttctctctatctctctcgctcacacacaatt

SEQ ID NO: 438 - DNA, 88989 bp, Arabidopsis thaliana
gatctctgttttgactctgaattttcctttattgcagactctatttccaggattgtggttagcagaagaagtaacagcagactcttacgatgttcctgaggctgtggaaacatgaaatttggggtcagcttctctttttctatccaagaaaaatgtatcaactttgtttttcttctactttgtcattttcgttgtaaaaaaggaagaaaaatatatatgtagcaatgtgctcagttttagtgaatgaagaagccaattttacttggtttcttttatattcttcttttgttgtaaaagagagacatcttggtgtgtgttttttttccgttaccaaaagctaattgtaatctctccatggtaatggaatctccaggctcttttttttttgttatcaataattcagctctctgcaactttcttacattgttgttccttatttagtttgtcttgttgcctactattagcagctcaggagttacttaaattagtatcttgctaagattatgagaaaattctgatcctgtgttttgtataagctttttggttcttgtgcatgtttgtgtcaagaacttactgagaaatagtgtttgtgcttttttttagacaattttgacaactttgcagggtcagaccaagctttccttttacaacatctcactatgcccaaggttttatagacagcttcctttctctttggtaagtcaagttacaaacttacaaacagtgttccaattattgaacacctgagctgggagacttgttacttgctgcaatcaggttcttaaatattgatttggtgttccattattgattgttgtatggaaaagaaagaacattgtagttttaagttttgcaagataatgcaaggatgatcatatactgctaattgatctaaaaatcttcagaaaggtttcttgcactttcatgcttcagggtttagatcttttctgcagctaaccatcacttctatagagtatccaaaccatgtcgcaggtggaagccatgatcaggctgataagatatctcattaaaacacgtcaatgtggctaatgttagcagtcaccagcctgtgtggcgagtaagagggtacacgatccacgagcaatataaactctgtcgaaaatagagaaggaagaacaaaagaataaacagtccgttggacacctaaagtagaggtaatgtaatttattcaaacccttgagatctaattagacattatgctctttttctctcagccattgtttcttgcagtagtggcacaccacatccattattttaattgaagttttcaacctctaatccatagacttatgcgtttgttctcaaatgtttccaaacatcatgttcacctaaacctttcctttctttgggacagtcctgcaaaaaaaaagtctctgagcagagtttcatctttctatcaaactaaggttagttttcatttactcatcatttctctgtttctcattggtttcactaatttgttttgaaaactccagcaaaacggaccatcatgatctgcacggagtcaaaccaccagcggttttcgtttgctggtgatctcggccagtccgataaaggaactcctatggaacaacaaccatcaggcccggtccgaagagacaccactcttttggattcatcaaactcagatttcgagttccacatctcaagcaactttgatcctggagattcctcaccagctgacgagatatttgcggacggcatgatcctcccagttcttcctttccaagtcacagctacatccaccatgccaaaacgtctctacaaatatgagctccctcctattgtctctgctccaaccttatcctcttatcttcctcctctgcctttaccattgcctgaacactcaagaaaatacagcgtgaaagaaactcgaggaagcctaaatggacgagggagcggtgcaaattcggattcagaggcagagaaatcatcaaagtcgttttggagcttcaagagaagctcaagcctgaactgcgatataaagaagagtctgatctgttcgtttcctcgtttaacgagaagcaattccacaggatcagtggcgatttcgaagagggaaatgcttagggacattaacaagcatagctcgcagagacatggagtcccacgtccaggggtgaatccatcatctcatatgcgtcctccttcctctttctgctgcagctcgtatcagttcaggccacaaaaacacgccggaaagaatggtggcggaagaggaggaagtttttggattgctccggtgatcggtggtccatctccgtttgggttaggatccatcttacgacttacgaaagagaaaaaaaagaagtaataacagtttttgttttccttcccaaagtaggaccagtttaataccagactcttttaaccaactctttgtttcattttgtaacgcatgagattatgcaactaatgcgaaattttgttagtctttcaaatggtaattacgtaatttgaattttcaaaacgaaaattcataaatatatatatatttacatcccaagtttggttacatgacaataataccaagaaaccataatcctcaaatatgagtattaccaaaaaaaagtggaaattacaaaattggtggtgaagccgtgggagatatctctctcattttttaagatggtactgagaaagaaactcttgatatgaagatgatcgatcttgccattgagagtgaaacgtcttgtccgtaagcatagctttcatatcgaatttatcgaaattcacttcccgattttcgaagaacatctcgaccggagacaactcatcgaacagttcaagccctcttcttcctacagcattatcatcaccttctttacaaccacgtattctggagacaaacgttgtgacttcttgctgtagtctgtctgattcagctgtttttgttatcggacgataagcaatgaacgtctttttctcctcctgtgaatcactgttgagccacatttcatcggctcggtcttcgtcaagtgaaatggttgtctcgtgtcgacctgagtttgcgatctggcgggtggctttggagatttgattgcatcggttatagaactctgcttcaggcgagaactcttgttctgaattgagacatccgttatggaactcatggagtgtgatgagaactggaagtggaacaacaggaccaacgacctcaacaccgggttgctccttctttgaccatttgctactccggcttgaaggattccttaacaagaaaggcggtaactgtgggaattctggaacaactaagaactcgagagactgtttcttcttgtctaccagaacatctgcaaactcagagtagttagagaatgcaagcatcaaaatctctttaggtaagcttgaccaggtttctctcaatgcaatgtcgaaaacacttgtgggtgaattgatattctcaaagactgcggttatgctagaggcagatctgcctttaccaaatccgcaaatcttcaacttcttacataactcttcatggcagattaagctaaaagattcactcttcttgaaatctgatgattctgtcctcatctttgaatctaaaaacccagcgagcatcccttttctgtgagcagagagatactcgagttcgagatagttaaaacgtctcgggaatttgtattcctcgtcatcagggaggtacagtaaattcacctcatcggatttgcaagccgaacctttgtgagctactacttctaaatgttttaaacgagaagcacggaacttgactgcttcaagcttccctgaggatgttaacctgatcaaagtaaaccccgaagattgatctgacgacccaagtggaaggtacttgttcaaaacgccaaaaccgagaacaagaacactctttttctgccaatcaatccactcgggaagagactccttaatcatcacttctctaaatagacaatctccgcatagacactttccgacaggtaagagtagattgtgtggaagctcccatacatacaaggaagaaggatccttcccaacagaaggagaaggtccaaaacagaacatttgagattgtgcattccaaaacgaccctattatgaggcaagaagtattcgattcaaaagtcctaactccaagttcagacaagctatagacatccataaagcaaggcttctcaacatcatgctgccatttcaacaaaggcacacctgatctcgcatcacagagaaatacatagctctgggaagcaagaacaaaccgaaaaccgtcactacccgcctttgcaaacccaacaaacacttctgctccggccgtattcagactctcaacttccaataaacatctcacactgcaatcctcagtgcttttgacaataacaaatagtgcatcagaccgagcaacgatataaaccccaactctccaaccaaattcacatcctaaccaactcttattcactgatttcccttgactctcccaagaaactttcagtttgcaacctctaactctacaatgtctctgactcaaatcaaacacaaagacctcaccgttatctaacaagagtagacactctccagtaacatgagggctccaagaagcgctcacaatcacaaacctcttaaactgcttacatccgaggtttctcaaaaccggcttaccttgagactcatcatacttgacacagtaccaatgaatcgaatacaacgaataaaccaaaacgtatcccaactcgcccgaagaagaagaacacttatacgctccaaagtcactaacaggttgcaccaaaatcttcaaaattcgagaaaacaatctctctgttgccacaaaaacgtcaccttcgtccgaacccgtgacttgtaaaccaccggaatctccataagaaagcagcaagaacccaatttgatcaaggttagtccctgtggggaaaaacaccaagactgaatttttactggggaaaggtagaaactggaggcgattgtaggagagaaccctaacggtatcatcgtgcggattggaaattttaaaagaggaattgattgcggaagaatccgacggagggacgccggagacggagagaaaacgcgcgggagttaagtgaggggtaatagagagaattggaggagagagtgagggagaagagaagagcagctgcgagtctgatgggttcgagaagaaaggaccaatggattcttcgggagaggaggtgatgcagagtttgcgtccccattcatcggtaatcatctccatagggttcttcgacggagatcggcggcgagtaatcatgatcggttaatatgtcggcgcaatttttttaatatatggaccgttttggttctcgttaaccgaaccgagatgtaatttggacggatttatattgttgtacctgaataaaccaataacaaaatttctcgtacagaaccaaaccaataggtaccgtcgttaatggcagaacttgatttataaaaataagaatcattgttatggatacgacgattttgtcattgttatggataaagctctaactttatttgcttattctggaaactttcatattattttgaatcttctttgtgcacgcaattaagatcctctccttgctaccttaattcgaatcttccttgtcgcacaattaagatcacatcctaccaacaaataatgtgatcgtatcaaatgcggaataaggttctgagaaagttttaagcactcagctcttaagcgatcaatccaacaagattaatacactcttctagaaaatcctcagcagccatggattgatttcaaacaaagataagctttacactttttcagcagccattatgttgcaaataaaaaacatggtttcacaagcaactgttgacaactgtaaataaacattaagcaacttagtctatgaataacagtagacgcgagacaatcatacatccactaagcctaatcaactcctaaatacaactttctagtagagggtaaacgtagacgtcctttgatttctccagagtcaatacttaatacggattgggattgctttgatgtatatgacagtaggaaaagcattgaagctcagaaacatgtcaaaatacatatcaaggtgataaaatgtcagcattaaagctcagaaacatgccaacaaaaaacaaatttacatgtagagctccttttcagtgacatcttttccttttgcctccagctagtttgattacttggaacataattcagaatagctggccaataccaaccgctatcacaggtacctcataaacgattatcaagtcttgtttactcttcccaacaacatataacatgtcagtattattgaagcttccgtcttctccattgtcgaaccatctctgacaaatttggacggctttcttctcctcgtcgagcaagaaacttccacgatcagtaatttgatgctaagaccttggtccaagaaacagctttggtggtgtcatgaatcttatttgacacccaaatctcagtcttggaaccctttctacaccgctttaataacacagaaagcttctcttctccaacaacggcttaggaaattaaagcttaaatttggacactcaagaaacataatttgaattaggaaagcttaaattttgaaatataattcccttcttctttagacatctgttattagcttaccctctctgtacgagagtaaatatgtaaggaaacatgatttgattaataacactttaagaaaaaccaatgttaaagcacatctaatggtaccgcttgtgaatatgatatcagagctgaaacgaatattgaaataacttgacgaccaagacaaacaaaaagaaacacacaaagaaagatatagcttattttgtcacctcttttactttgtcagggtattcatgaggcagtgacacaattcatggctcttggttttacattaaaccacactcaaaacaccttttgtgtttcaactttggtccaaagttgtggtttcaagtaatttgggtggcttagtgattagtgaagagaactggaaggttagtagtgggttggatgttatctagctgtacaactttgtaactttgtaagggagtgagtttggtatagaaaagaaaactcagtgcagagacaatgagaaagctttgttagtatatgttttaagaatcacttttgtcattgaattagaaaagcttttagtttcggaacataaatattctcttcttaaaaacattacgagacatggtttgatcaacaaaaataaaactgtgtttaaagcaaggattataacacactagggcagttgaaacataaatatctcataataccacatcttcataaaaataccaattcaaaggatgaaaacagaaaaggaagagattaaatgtagagcttgttttagtaatctcttttccttttgcttccagctagctcgatctgacccaaacttggaacataattaacaataattggcgaatatcctccaattgtctgaactccaaaattcagtagtatgaatttagtatcctccccaacaatgtaaacattgtcttcgtcttcttccttcatccatcccttactcttacaacacaacaagactttcttctcctcgtctagcaagaaacttaggccatgccaaaaaccaacgttaggctttggatacaatgataacaccttgctccacgacaccacattggcctcaccaatcttacttgtcacccataactcagtatttgatgtagaatctcccactagtaacagtgaaagcttctcgtctcccacagcggaaagcctagaagcctcaaaaccatgcacttgacaggggggaggcagaggaacataaccaaatttctctgttccaaaatcaaatttgatcaaggttatgcgaaggtccggtggccttcgtcttctatctatacccaaccagtaagtgtttcccttcaaagacaaacattttctaaagtactccatgtagtggggtggcttgataatatcatcaataaccctccatgagtcagagctaaactcgtagatttcagaatccttgtctaaataattaaaaagctcatggctttgtagctcttatcacaggacttgttatcatatccaagaataaaagtcataccttcgttgtaacgatcgccgagttcgatccacttggttacaccagttaaagggttccaaacgacttatcttgaatcttttcgggaggtgcataacaacaagccatcacagtgaaagactcgatctatattgaactgagctgctgaattcttagagtgaggatcgagtaagctgacctcatttttaacctctagagatggagtggttccatggagattgacgtttataggacaaatcctgtagttcttggtcaacgtgagaggttgaaactgctttgcggctttttcaatgtgctttcttgcgaatctcttgtcatctttgaataaacgattccatcctttgcaagtggatcgtaatcgcttcagagatgtggccggaacaaaacagagtatctcttctactaaatcctttggaagctccggcaacgtcatttttgatcactgaagaaaacggcaagtggctctcaatataatctagggctttccatctttcatttcaagataactggttatgtgcatttagttcccttaaaattataacttaaccggataaaccgataatcaataccaaaggatttggataagtttttttgagtcactcactttatctgccagcaacacaacaaaaccgataagttttggccttagaatcccccttgtcctaaaataaaatatcatcaagaatcttccattaattaatggatctcttatcaatagatttagttccttaactttaagttgtgtatttgtaagatagagagaaaaacaccaattagtatatttgcaacatagcatgattggctttagtggtagaaccgaagaactttaaaagtgaacgagtgatgatttctagttgtacaacttgtaacttgggtgtaaagataactcagagaaaataccagtagaaaagctttgttcatgtttaatgaatcacttttgttaaggacttagaaaagcttgaaaatttgaaacataattctgttctcttctttagaagatctgctctacaagaagagatttgatcataaactttaaaaatctttgtttagagcaaggaacaatactgagcaattgaaacatctgacaatacaacatcttaatgaaatatcagttcaaaggattattcaaagcaagataaattttaaaaacacacagactcacacaaaagagagagattacatgtagaccaaactgggaacatacaaactaagaatagttggctcacatccactggttgcatcttctccagaatcaatttctttgactatattgtcttccccaacaatgtatactttattggacttgttctcgtcttcgtcttccttccaactcacacaacaaatgaagactttcttctcctcgtctaccaagaaatttgaagtaaacaaggcatgaagctccctgctcaaatccaattctaagaccttggtccaagaaactgctccttcggtggtgtcatcaatcttatttgtcacccatatctcagccttggatctcttatctcgccgatataacaaggcgagtttctctcctctaacaacggaaagacgattagcaccattcaaactacgggcctgagagggaacaggaagagacacaggtgcaaatttctctgttgaaaaatcgtaactctgcaaggataggtcaaagcccatatctgttacagctccagcaagcatgtaagtatttcccttcaaagacacgcacttataagatttatcaaagtaccaatttggaaggataccattaagaaccctccatgaatcagagttaaaatcgtattcccaaactttgctaccactacgataaaaccccatgattttgtagctctttttgcaggatatgttcttgtcttcttgggagtatccgagaaaaaaattgtcgccttcttcgtgggtttggatccacttggtttcaccagttaacgggttccaaacaaccattctacgttcgagtttggaggtgcataacaataggccgtcacagtgaaagactctatctatatggaattcatcagctgagttcttaaaatacggatctggtagggtaagttcacctttcacctctgcagatggatcagctccatggagattgacgcctctccgaataatcctgaagttcttcctcatcatgaaaaccagaaactcctttgcggcgttatcgtagtgctttctcgcgaatctcttgtcgttgtggatcaaacggttccatggtttgcaagtagcgctcaaacgtttcagatatgtggccggaacaaagctgagaatctcctctaccaactcctttggaagattcggcatcggcatcgttggtcgccgaagaaaacggcagcaggtggctctcaatgttatgttatcatttgatctattaggataacgtggctcttaatctaattttagggttttggttttcagctttcctcttttggtaattttttaaaattaaaccgatgcacaatatatacttatgtttccaagggaatttaaaggcgatttttcgtatagattaattaagaagccatttatttatttttcttaaagtttaaacaaagtttattttcagacatttaacttgtatatgtagagaaatttgtttaaattaaaccgatattcaatacttatgcttccggagtaatttgaaggcgatttttgcatacaaatttaaaaattatttatttttcgaaattaagacaatgtatttttcagatatgtgattggttattgagaaatgaatttaaaatcaaaatagaaaatacaaattatcacgaaacataagaaaaaaaaatgtttttttgtaatgaaaatgtagaacatcatttattattcactttaatttactcttatacatgacattggaccagtcaagcctatgcctaataagcttgctaatctctgcaggcaacacaacaatatcaagtttggcttcgtggacatgatgtcaaagtgcggttgcgtggtagcctttcatagaatacttcttctcgcgattaagatcacatatatcctaatgaaaaataatgtgataattgtcatatcatatgagaaaaagattctaatacatgttaagcactcaaaactacaaagatatatcaatccgagggcatgactatacgagagtgcaggtcgctaaactggttcgataggaaaaacaatcaatggcacatagaaaacacaacactaattggattaatttgaaacaaacaatcaacatgatgtgttttatcgggatttagtcggaagaacatcacacatttagatgcatttagtgatataaacatctgtctgatttggagttattgttttggaatgtttttgattttgtcagctgctctagatttgatatgattgattagtctctgtgttggtattttgtgcaaaattttagaactagctttcaagttgatcaatgagttgtagagatcgcataggcaaaaccatagtcatataaaagttaggttatatgttctgtgtcaaacctaccgaccaactacctttagctgaattataaattaagttttgcattgaaatcaattcttgtaatctcgtataatgggaatcaatctagtttcttgttagattctgctgactaatactgagaaaaccaatagatcttctctatttttgtcgtaaacaggttacaaagttaacaattaaaaacagaatatataaacaagatatttctccaaatattgtcttcttgttcttaactcttaagaaataaatatttttttcttatttcttacaaaaatatgcagttattattgaaagatatatttcttttttttaataacaatttaaagaataattgtttatttatttaatcctcaaatctatgttcttatccttgagaaataaatatttagtaattttattattggaagataaatctctttcctaaataattattaagaattatatgatatttacttttgatatatttttttaatattgtcccaaaaaaagggtgttaacagataaaaagatcacttttcttatttatttgagttgcacacgcagtggtatatatatagattctcctctaaagccactgaagtcggagaaaggtaatggcgtcggggaagcttccgtgggagttggaggaagagatattgtgtcggcttccacctggatctcttgttcggctaagatccgtatgtaaacactggaacgatctttataacgacaaatggttcatcaagaaaagcttgggttttgcacgtccccaattcatcatcctggccggattcaagatttattcgataggaaccatcggtctggacgtcgttgatccgaagatagaggtgcgtgagctagcctcaatttcattttgaggctgagaagtgggcatttaccaggatcacggcttgcaatggattattgtttcgtgacttttggaaccaaggggttaccatttggaatccatggttaagacaagttgggtggattgagtataaggaggacaaagatttccgtttttgcggtataggatacgatgctggtaaacccgaaaagggttacaagatctttgggtattttaatcgtttctatgacactaaactgaaaatcggccacagatttgcgatctttgaatgtgcgtctcaagcgtttaagttcattgattcccctgaatggccaacgctggcaggtcgaggtgaatatgtgtccttgaatggaaatttgtattggactgcttacaatgaagatactcgtgagcattttcttggaagctttgatttctccacggaaatatccatgcacttttgtctccttccttgtgcgaagcatgtttctggcttacaagataaacttgtcctcactgtatttaagggcgatcggtttgcattgttaaagcaatctcgtatatcaagtaatacagagatttgggtaacaaaggacaagattaactctagtaataacgtggtgtggttaaacttgatgacactgtcaatacctgactttccctcgctattccatcagctttctgatattagttacttcatccatgacatgacccttatcctgtgctgtgacgacaatcaaactggagtgggttgcatctttattgcgaggggagacttgtgcaagaagattcaaataaattatgtctctcttgggttttctcaatgtgtctatcttccaagtttgacctcggttcctttggaattcagatcactgcaagtttagaatttcgatttttcgagtacaaacagtctttgaaatgtgattctgttttcatttcttttatataataatattctctagtctctatgtggattggtttagtacatgagccttcttgacatctttttatagcttaatgatctataggcatcttgtgtcatgttgtgtagatataaaacaaaagtaccctagaaaaaataataatccaaaatagttgtagctaggtgacttgggttttagacgcacacaacatgataaagagaacataacgttgatgaggactagtgaaacgtcccacgtccttcaccttgtgctttatacacaatgtcgcagagaatcattctcaagagcaagccaaagctagacacaatgttacagaagctatgcttaaatgattgggcattgatgtcaatgctgtggccattgatgaggttaaacagatatcaacttgggttatatggtttgaagaagttggtgtctcgctcgagatcaccattactcgaaaagctggtatctatctctgcttttaccaccattatctctgtacgttttctccatctcttctcttggagcatacaaaggtctaaatgtgtctgttggatgagctttttttttttgacattcttagatcaattagtaaataaagttcttgcctggatgggatttactagcaattttatctgaaaaaaattgtaaatctgcatgtggttaactgtgcaccaccatcctttaataggtgaattctccagtgttgatggaatgtgagggagaagatgaaaagcaactctcgagtgtatgactatatgaaatttttatgccctctatttatgccctctatttttttggtataatcacaaataataataatataaaagatatacgtactaaaactttatagaacatttaaaaaaaaattataagcattttgtaagaaaaaaatgagcaaaaagaaaaaacaaaattatattctttaaatatttatttagattttttctgcaaaactattcatcaaatctagtttttcaagtatagttgtcttaatggataggaaagtcaactcatttatttgattaatcaaaacaaagttttttattttgtaatcaaagtcttagagtttaaggttgtatttgtcttaaatcttaaattttactaaactaaattcattaacaaaacattttattaatttaaagaggttaaaaacatagtaaatgagaagcttgacaaatataaatataaagaaaatgcctataattatttttcagaaaacatcctcttctactataatgccttaagtatggcttcatttaattgcgtagaacgccggatctgctaataggttttaagcgctcaaaactacaaagatcagtccgaaggcataaactatacacaagattcccagagttcagttcgctaaaacttggtcgatagagaaaacaacactaattaatgaatacggactaatttgaaacatggaatcatcatgattgataccaaaaaaaaaaatcaacttgatgtgttttatcgtaatgttgttggaagaaaatcacacctgataagcacaggtacttatctggattcattattattcctacaagacacgtgtagagataagattaaatgagatggtcatttgatctaatctgaaccgtcaaagtctgctgacgtgttaaaaacacgttttaccgtgtcttaacgaaaccagcgaagccgagaacgaatcagagatttttaccgatatccgtcgctctctcctcctccgtcgtcgtgcttcgcttctcttgcgtgtcatctttttcgacaaacccaaaatcaaggcagaatctgataatcgaaaggacccagtagaaaacttcgcgaggaatcaagggttagaagccctaacttgatcgctaattcgagaatgaagcatttggattgagggcaaaaatcgacgtttttaaaaagtctgaactgaggtggattcgttgagatcatctgatcaaatgctcttcgtggaagtaaacatttgaggtgatttggagttattgttttggaatgttttcgactttgtcagcttctacgatgctctagatttgaggtggaggtgattgattagtagtctctgtgttttgttcaaagttttcggattagacttttgtggttgatcaatgaagcagtagagatcgcataggcaaacccctagtccatgtataaatgtatgcattttaaaaaattaggaatcgttttgtgatctgtgtcaaacctacccgccaactacctttagctgaattgcaaattcagttttgcattgaagtcagttcttttaatctcatataatgtgggtcaatctagtttcttgaatgattctgctgattgtttcaggcaaaccaggtcggtaacaaggtaagggggtatgtcgagcaaaacccggaatatgcttgaaggtttggttagagatacttcttttaaatggttgctcgggaaacaaagttctttcgatgaagaaatcgaggaaatgggaagatctccatcagctgggactaattggatacctgagctttctcctattgccaatgtggttgtccgcaggtgttcaaagtaagtaagcattttgcagtatgagttttacagggcatataaggggttgtcttgtatgaaaaagtgtgtattgtgatgcgctatagtaagaggtttccaaagcaagtagctctaactagaaaggggtttacagaaagtttgatttttaattaaagaaaactacaatgagggtgtgtttagacatacttagactaaatgagtttattgttctgtctttatatttatttggctatgctattgatgcagaatactcggtgtttctgcaaacgagctacgagatagtttcaaacaagaggcatttgaatctctcaagcagccttctctatttccaaggaactttctagagtactgttgtttcagagcactttcactgtctgttggagtaacaggtcatctagccgataaaaagtttcggcgcttaacatttgacatgatggttgtctgggaagtcccagctgttgctagccaggctttactcagtgtaaggctcctttttctcatttcgcctgcaaaccttataagaaccttttcttgatcatctttttttgctttgaaataggtagaagaagatgcaacagtgagtttagaagccttctcacggatcgcaccagcagttccaataatagctgatgtgattatatgtgataatctgtttcaaatgcttacttcatcaacgggtggtcggcttcagttctctgtttatgacaagtatttacatggcctggagaggtaaaactttctatccttattccttgctgaactactttgtcttgaatcactttgcagacattttaaaatgtctattttatttatagagcaataaagaagatgaggactcagtccgaatcatctttgctttctggtgttcgatcaaaaagagaaaagattctggaaatagacgggacagttactacccaaccagttcttgaacatgtcggaatatcaacgtggccaggtattgtttgtattttctcaatagtcacggttttggaatgtgtactcactgttgccacaatactattcaggtcgcttaatcctgacagaccattccctatattttgaggccttaaaggtcgtgtcttatgacacaccaaagcgatatcacctatctgaagatctaaagcaaataattaaacctgagttaactggtccttggggcactcggcttttcgacaaggccgtttcttaccagtctatatctctgtaaggccgtgtctttttgcatttaatcgattgtaaatttgtaatctcttgtacatgctctttttgttttgtgcatggtcagttaacagcttttaatggctatctgttgtagatcagaaccagtggtaatggaattcccagagcttaaaggccacacacgccgtgattactggctcactattatacaagaggtattatatgttcatagatacataaacaagtacaagatcaccggtttggcaagagacgaagcactttcaaaggctgtccttggcgttatgcgtgtccaagctcttcaagaactcaatttgacaaacgcaatgcggtacgaaaatcttctcccgttcaatctctgcgatcagcttcccggtggagatctgattcttgagacgcttgcagagatgtctacctcaagagagctccatcgatcaaataaatccaaagatacaggtaacactccttattcaaaataacttatacctaatggtattttctttatcttgaccaagagtgtgaaaatttaaagcgtgtgcgttattatatgaatataaaagatgaaatttccgaggaagttaatgtgtaatttatttaccagggacattacattcctcagcttctgatatggtttcgcagctgggttctgtgtttggagggtcaagtcctaggagcaggagggagacgagtagtcttgtggtaggtgaagtagtggttggagatgtgaatccattagagagagcagtgaaggagtcgcgcaagaaatacgagaaagtagttctagcgcaagagacgattaatggggtgaaaatgggtggcattgacaccaacttagccgtgatgaaggtaaagaaaaggaaagtttgacaggaagatttgtaactgcgttgtctgaaacattgaattgcttctcttttctttggcaggaactgatgcttccaataatggaaacctggaacttaattctatctgtggtgtattgggatgatcctacaaagtctagtgttttctgtctcttgaccactttcataatttggaggggatggcttgtttatgtctttgctcttgcgtctctcttctctgccatcttcatggttctcacaagatgtttcagcagagaaaagctcatgatcgagctgaaagtaactgctcctcctccaatgaacacaatggaacagcttttggcagtccagaacgggatctcggagctcgaacagaacattcaagacgcaaacatcgttcttctcaagttccgagctttattattctcgcttttccctcaggtcagccttccctcttatatttaacacaaactgcttctcctaaagctgtgtctaaccacagttttgaaaccgctatttcaggcgagccagaagtttgcgattgcgattgtggtcgcagcgacgatgatggcctttgttccgggacgctacttgctttcggttgtatttgttgagcttttcacaagatactcgccaccaaggagagctagcacggaacggttaataaggcggttgagagagtggtggtttagtataccagcggctccagtggtccttctacatgacaagaacaataagaagaagaagaactaattggagagcgtctatagttgccacagacgtacatatatacttataatctatacatttatgtatgtatgtatgtatgcagtttgtgtatgtattaagcttaatttcgggagccaactcttgaattcaataaaattttacaaaaataatgaatttttgaaataaaaaagatgatcacagaaaaattgtttcgagtatataaagtaattaactaaaggaaaaataactattaactaatttcaaaaattattagtccctttgaagacctcctccaatgaagaaaaaacaaattatttttccaaaaccggaaataatttacgccggataacttaaaaatcgcgaaactccgtcaagccatcgaagccagaagatgaagaagaagagaaagagcttctcatattaggcgcgaagaaaagcggatcatcaaaattcgcaaacggttgattaccgcataagaaattatcagctggattcgccggcgggaaaatcggaaatgtcggtaaataagcaccgtagtttatccccgcagcgtcgtacatagacggtggcggcggaggtggaggaggatgaggcggtggctgtggaggaatagccaccgctgaatacggaagagaagaattaacctgtccatgttctccgatgttctcctcagttgttatcaccgacgacgattcactatcttcacttatcatcgtgttattaaaaaatatcccctttccgtttccggcaccggagtagtttctaaggtaattattaccgccgccgcagcgattgcggttgttttttctgtcgacggttggttcagagacggttcggttgattgattttaccaccccgggatcggtcattgcgttaccaccgccgagatcttcgtcggagtgggtcattccggtgagtttttgaacaagagccatgaaatctttaggattagtgtgtatgattcttggagtgtgtgtgtaaatgatcaccgggtgacgaggcttagccgcggaggagaaagaagacggagacggtggttttttaataacgtgagagtctttgttgacttttaaagttggcggtgacggtgaaggtgagggagtgtataagattccggagttgttttcattgggttctctctttggatggtgatggtgatggtgagggtggtggtggtacggatggttgtccttgtacgttgagctcatttcatgtgtaataaaaaaaagggattgtgacgtttttgaattaaatgaataaatgaatcatacataagtataaccaaaagtaagttttcattgaaagtaaaacagaatgacaaaattgagatccattttgaagatagggaggagaggagtgttgccttttataagcttcagtctgttacagtgagccacgtgtaatctggtgagtgttccaagtaagcacttattagtgccacgtaagtatatcatgtgaattagtttatgaggctgataagcagttaagagattatcgccactaggattgctaaaatccaggtttaaacttctagaggtaaatcatttccttgagataattatggattatcacatactaatttccattttttgctgtttagttctgttatatctgtaactgtaatcgcgaagaattacatggattttgccgattgaaacatttgaatcgcagtaatctagaagtctgaaccaattaaaccgtaccaccatcaatacattttgaaatttacaatggtttcttcttcttctttcattcccctttatggatcaacccgaccggattcacttctttcaatgagtttctctgatttcgtttgttatttcacttgcatcatccttgattagctttatgtatatcggattaggagttatagaagaaatggtcatataattaatcattcttttgcagtacttggagttatcagatttttgattaatagttttgtggcatatggttctcacttcattggtgaatcgatggatgtgctttatttgtaggattacaatgaaatcgtctgttgcatttaggccttcacataattgatgcaacttaagacatgtacattagtacatagtcagatcacttcaggtaatgactattcttttgttcaaagcgttatatatgtgtattgcttattatggttaggattagtacttgaatcgagagtatcttaaaataagtctctctgtttcttcatgagtggcaggaggtcttcatctagagagaccattgaaagagtggctcctagagctttggccaagaaatttttagagcatatttaggaactgaagtgtgcaagttttctgattgcacctgaattgtttcaatgtactcgaaactctttacatatccttcacattttggtgcattctcttagcgtttgtcgttttttgataaatttgcatttgcaacaaccttgcttgtgtgccagatagaaattaatatcgtcaggtgtcctgatctcgagtttgctgaaaaggtgatagccgcatttgttgatgtaagaacaaaggggaactttgttggtggtgtgttattaccttcattgttcggacttttgcttgcttattgattaataataaacttatatgcaggggctttggtacacctgttttcaataaactcgaagactgaactggcaaaagcatgtatgtcgttgcctgcaaacaaaaggctctgagtttggaagtggctttgcaggtagagagatctatttcacttgtttcaactaatttaatgccctcttggtgacaaagtaaagttgtatgacagataatgagcacaacagaaaattctttcaaagacactgttgttctggtggaatacatagagaaatctcaaatggtgagataacagacatgagaattgcctcaagccaacatctacaataggagtaagttgttgtttgatcacatctgagataaatgaaaaccctctttatgcagtttgctcttgaggaaactggtgacaattgggaaggaaaatgcatagcagagaaacaaactgagcgtcttgaactcaaattatcaaatgcggaagctaatcagattgatgagaaaaagaaaaaaaaaggtggtatattgagttcaatcacttgatctactatattctacctgtggtttttggcttgatgagtactataccagtctacctcttactagctaggcattatttttcaatcttttgtgtgtttcacacaggtagaatataagacagaattcctgtagatgtctatttggtagactctgcatcgagaaagagacgttatggctggtgattctgaaagggaacttgtctttgaagaagacaggaactaaagaatcattctagtatcattccctgctgctactgtatggatctcttttttatatacatttatttgcacagctttaagctaaacaacaatcaaagagtgaacataatatgtgtttagcatagctgtggttataagtaaattgtagagcttgtttagtcgcttctttatgcttgaagttttagacataacacttgttctctagacatatactgtaccagacatgttttgatcataaaacttaaaaagaaaaccgtgtttaaacgggcggcctaacgtggcactgaatgtaatgtaagattgtgctgaatgtatttatgacaattcaagagtacatgatgttttcttgtttaaattttacaggccaggcggcctatatatatatatatatatatcccatcggagaaaaccctaactggaaaaggaaacttgtagaaaaggtaaactgcaagcaagatttatgtttcacaaatgagattgtatttgttgctgtaagaacaaagggaactccgttgttgggaatgctcctcgtgtatagtcccactttaccattgaataatttgatcacatttccaagcttttggatcagccacatctaaggcttcaccttcacaaatagctaagatcaaacaaattgtaatcccctgaatttggaatgtaagtgtttctttacatgtagttttgaaaattatatagatattttttatgaggaaaacacttgcttttgtgtggtcacaaaggattgtttgtaccacttatatttaaatcagtaaggccaagttatatgtaatgtatgtctcctcgatcaataacacctccaaattgacattttttctttctttcttaaggtctttttaaaacaaggccataaatcatgatgattcgtactatttggtgtttggtattggacagattaaaaaaaactagaatcgacatttaataaatgcattcagcgtgatggtttggaaaattagaaagggatttgatgtgaagctcactggttttgacggaaggacctcctcattaaataaaacgaacaagacgtccataattatagggcggtgcaaaatgactcttctttacctgttatccaattcgtattcattcaataactgatttttttttgtttggtaagaaacattcaataaatgtctgaagttatttatggattttgatcattttgagtccgataacgaatactatcatactagatgacgtcaatagaaaaacgaatatgaatacatatattatataacaaaaacaaaaaccaacaattccaatgaaacctaatccttcaaaccaagttttcgtttttttaaattacgtcttggatatgaagtatctggattttagaatttaattttctcaacctcttttttttttttgatcagcatatctcaaccatttaattaatttcagaaatttggatacaaatatttgaaaattttgggaaattgacatatgcaccatttaaagggttcggatacgaataattaattatttgatctaactacgcaagtaaaattgagcaacatttaatttcaatctgaaaaagctagaggatattcattcaattaggtctcatactctcatctttgaataataagctcactactatactatataagtaaggtaaggaaacatatttagaaaattcgttatcatatatggaataatcagaagaagaacctaaattaaaaaaaaaattacaagaagaaaaagagaaatcattgacgaagaagactgtaaccaggataaaaacaaatgtgccgatcagatctccaatcatcacgcgtctgttaataatctgaatagtcaacgctaaaagatgtcttgagtctgtctgaccagtgaagtaaactactactacttgtcaataagaggcggcaagcacatcggacggtccttgttttccctgttaattataaacggtcaccatctctttagacataatatatactactagtagtggagtgtttttgttaattaaagtgattaaacaccaattctaggtgttaaccaaaagataaaacgatacagtaaatatattcttgtgaattctatagtatcataatattattccttttttatttcacttttgataactataaaatctttggcaaactaaaatatcattagattattcctttttaaatagctaaggtataatttctgatttagctttgctatcacaatgttcaatttgtctaaagatccgttacctctctatgcgagagaagctgtgagagagtttccgacaagtaactaggagatcgtaattcttgtctgaaaaacaactttttttattcgaaacttctctcacagatttttctcagtttttccagaaattttgttcttcttcgtccactcaccgtggatctctctagtttgttgaagaaatcaaattgtggaataaataaaaaaacagagaaataaatactgcaaggaaagtttcttacttcgtcactttgacccagaaagctttcagattttcccggaaaagaaatctgctggagaaatttcattgactgacttatggatttgtgaagaagcttgaaggcgaatcgaagagatgggtcggagaataaagaggaaaggtctgataaacacggaagctgcaagagaatttatcaatcatctagttgctgagaggcattcgctgttgttgctggttcctttggtcttagctttctgggcaattgaaagatgggtctttgctttctccaattgggttcctctcgttgtcgccgtctgggcttctcttcaggttagttcttttgtcaaaataacttctttagttttttattccattgatttctgatattcaaagtcctattgtgcctttgataattgattggttcttgctaaactacttgttaattttgtctggatccgtttaatctgatactttagaatcctccgataaagtttggaagctttatcctttttgtgtgtggacctaacatttatatacagaaacagtttgatctttccactcatggggatagttatggtaaattgcttttcatgaaagagttacaatcttaggtaattgatatttaagagtcatatgttggggtgttttgttatgttaacttgataagttttcaagagccttgataaatgtgttcctatgcacaaatctgaacataaagttgagagatatataagttgaagtcttgctgtgtttttttgactatgttcatttgtttttatttgtagtatggaagttaccaaagggcactacttgcagaagatctaaccaagaagtggaggcaaaccgttttcaatgcgtcggtgagaatttatgttaccttttgttttggtttcgtttaacttttgttgtatcgctcgacgttataagaataccgcgttgtttcttttctccagacgataactccattggaacattgtcaatggctgaacaagttactgtctgaaatttggctaaactatatgaacaagaaactctctcttaggttttcttctatggtggaggtgagtcagattcattcttagtcatgctctttctacctaacacatttcgtgatccttgggtcttaaaaggcaatgaaccattaacttttgatcgttttatctaactcgcagaaacgattgaggcaacgaagatcaagattaatcgtaagcactaagcaatctctcccttttacatgagacctctttttaaagacattggacatagtgatgctaatttgtattgtattggttttcgataggaaaatatacaattgttggagttttctcttggctcatgccctcctttgctaggactacatggaacttgttggtcaaaatcaggggaacaggtttagttactatgacttttaaacttcaaatattttcagaaggttggattttgatgtttgacattttgttttccttttctttagaaaatcatgcgattggatttcaactgggacacaacggatctaagtattttgttgcaagccaagttatccatgccgtttaatcgaacagcacgaatcgttgtcaacagtctctgcatcaagggagatgtaagcaaaaattttgttttcctaaaagataaatgagttctctacataggatttcgtttatttactgaatcatcttgcagattctgatcagaccgattcttgaaggaagagcattgctttattcctttgtatcgaatcctgaagttagaatcggagttgctttcggtggtggcggtggccaatctctccccgctacagagcttcctggtgtctcctcttggctggttcgtttccatttcatttctcccaaactttaccgccaaaaatacttacagttacgaagggcaaaaccgtaattctctcccgtttcaggtaaagattctaacggaaactttgaacaagaagatggtagagccacgccggggatgtttctcgttacccgcaacagatcttcacaaaacagccatcgggggaattatctacgtaaccgttgtatctggtaacaatcttaaccgcagaattcttcggggaagcccctcgaaaagttctgagatcggagaaggtagcagcggaaatagcagcagcaaacctgttcaaacatttgtggaggtcgaactcgagcaactttctcgacgaaccgagatgaagtcaggaccgaatccagcttatcagtcgacatttaacatgatcttacacgacaatacagggacactcaagtttaacctctatgaaaataatcctgggagtgtcagatatgacagtctcgctagctgtgaagttaaggtaaattaatgaataataaagcagttaactagttgctgtaactggctgttacatgttcttcatctttttctctgtacagatgaaatatgtaggtgatgattcaacgatgttttgggccgttggatctgataacggtgtgattgcaaaacacgctgagttctgtggtcaagaaatcgagatggttgttccgtttgaaggagttagctccggagaggtagataatacagtttcttgtaatgtattactctccaaatttcttactcttttatgattttgagtttttgaccacttttatgtgtgtgtttttggtcttttagttgactgtccggctacttctaaaagaatggcacttctctgatggctcacatagcttgaatagcgttaattcgagttcattacactccctcgacagctcgtctgccctcctctcgaaaaccggccggaaaattatcgtgacggttttggctggaaagaaccttgtttctaaagataagtccggaaaatgtgatgcctctgtcaagttacagtacggaaaagtaagtactctcttcatgattttgcttcaaaatggctattgcacgatcttaaaatcttaagaggttggcatgtgcttgaatggtttgtagattatacaaaagacgaagatagtgaacgcagcagagtgtgtgtggaaccagaaatttgagttcgaagagttagccggagaagaatatttaaaggtgaaatgctatagagaagagatgcttggcacggacaacatcggtacagctacattgagtcttcaaggaatcaataacagcgaaatgcatatatgggttccgcttgaagatgttaattctggagaaatagagcttttgatcgaagctttggatcccgagtacagcgaagtaagtgttttgaggaaaacaaacatcactctgtttctttgtttttcctcattgatgtttttttctggcttgatcgcaggcggattctagtaaaggcttgattgaattggttctcgttgaagcgcgggatcttgtggccgcggatattagaggaaccagtgatccttatgttagggttcaatatggagagaagaaacagaggacaaaggtattatagaaactgttttggaccaaaaagacttcataaagaaaacaaaacttacagatggcttttttctcgtgtgattgttgttttcaggtgatttataagacgttgcaaccaaaatggaaccagacaatggagtttccagatgatgggagctccttggagctacatgtgaaagactataacactctgcttccgacttcaagcatcggtaactgcgttgtggagtaccaagggttaaagccaaatgagactgccgataagtggataattctccaaggagtgaaacacggggaggtccatgtcagagtcacgaggaaagtcacggagattcagagacgcgccagcgcaggtcctggcacaccgtttaacaaagctctgttactgtccaaccagatgaagcaggtgatgataaagtttcagaatttgattgacgatggagatcttgaaggtcttgctgaagctttagaagagctggaaagtttggaggacgaacaagaacagtatttgctccagcttcagacagagcaatcgctgcttatcaacaagatcaaagaccttggtaaggagattcttaactcatccccagctcaagccccgtctcgagattcttaactcgtccccagttcaagccccgtctcattccccatctcgatcaggctcgggttcggggacaggatcctcctataaccggagattacccgcaccaatgtagtcacttgtttttcccgatcaaacaatcatctatgatgtatatagatagatatgtaggggcattggataaaatgttcagagagagttgagcccttgttacaaagttagatacatatgatatgtaacatatcaaatctgtaagtttcttattattccctttgttattctgtaacaataaaaactgttgtaattgtttgtaaaactgttgttctgtgtctaggctgatcagtcatttacagaagcaaaatagttcttttgacctcaagtgttatctagtctcctcagcacagtgagatatttttcagattaataattggttaatttctcatccccacaaatgttgtaaagctaaatgactcgaggtaagattcctaacttgtaaacttaagccttgaaaagaataaatccacatgattcgagcatgtttgttcaaaagagtaaaaaaccggtgaccatcaacagatgatgaataaaccggactaaaccataaatattccatcatacatgaaggatcaagtaacatggcatgatacagctttagatgactaattcattgtgtgagagtacaatgcatatgatcccaagttaacctctactagtaactgtgaaaaatggctgttacaaacggggatagaaattacatggcctaggctgaaccagcgggaacagtagctgcattggagctaggctgaaccaaagtggctggagtggcactcaggctcggatcttttgactcgggtgcaacaatgggaactgtagctccgggtagtgacagaggggtttttgcagccgcatctagagcgggtatctgatgctgatttgagttagccaaatcgtttacggcgttgtgaagttgttgtagcctgtaatctgtctcgggccgccgacaaatcttcctcaagggaacgatttcctgctgggataacggaaaagaaatccaaaataggtgagtgaggagggttttgctttatggtctaaaccatgaaatggagctgacgggtaaataaaaccgcaagggatagagagagagagagagagatgatcgtccaacctcggactggtcgtggctgtaacgcaccaagaacctacaacgacaacctctgacatcatgtcttcttctctgtgcgtcaagaacaatggcgtcaaagtaaagagcttgatcttttccttcctgaagatgttataacatagttctagtcagggataaactaacatgacacctatcactaaatgcttagagagcgaagttctaaacctggaaacaaaggacgagatctccagcaagaactgcaacacattctgatgcttcacatgggagagaccgttgtcttacatgctttttgacatttatccattcatcttcttcaacttcgaaacccgcaaatcgaacctgcacttcctgaaatacccaacagaaagattgttgttagcaaaacaaaaaaggggaacaaataagtcaacaagaggttggttaggaattaccggatcaccaatctccaagtttctatgagctaggaaagcttgcacatcatacctgtaagtaagcaagagagttacatatcagagaaaaccagtggaatgtaatgatattgttacaaagtatcataagtcagcaaaaaaaatactgaagattgaatgcaagggaatcaccatgcaccatccctggcagatttggcttcaaattccaagtaagagttgtctgaaccactcctcatgacaccgggaactatgaggaaaagcagtaaacagttacgaaaatggcatctgtgcaatatcagccatactgatctagacttatggagaaaaaactaaaactgaaaaaaccaatgaaacctattccaataaataaccttctcaacctattttactgagagtagaataaataaagcacctaaactaccagaaggggcaggcgtcatgccgggtaaatttccagtcatatgagtggttttaggaactgataatggttgaatcacacttctcatctgatttggtaaatccatacgcggcatggaagatacatttagcttcccaggagctttgtttccccttgctcgtaaagcatatcgcctattttgaaaccagttccagatctgtgatgcattaaaacaacattcccattaacttttaaaagcaaacccaacagactctgtctgataaaacttaagaatcaagaaggaaaaagccagtacttgcttgaactgcacaacaactttccccttccgctcaggtgattcactgagacaacagataacaaaaagtaaccacattttagatgataaagacacaaaatcactttcaggccaaggaattgagcaacaacaagtaaaatacctaaacttatcagcaagagcttcaagaatatgtcgacctggcattgctgtattatgctgtagcaaaattgcttccatctccgttaccttcataacaattgaagattagctataacaaacaagataaaacctcttcaaaagaagtcacaaaaccatagaacaacagatagatagaaaaacttatgtattatcaaatctaaactcttaaacattacttaataaagtaaagccaatggatttcagaacatacatcgaattgtcttcaagtttctactagctaattacaaaaattcaattggacttcaggatctaaaccctatcatgaacccaaaaagaagacctaaatcctaaggaacaaaaccgacacaaaaatcagatttttcagctctgggagctcaaaatccgtgaaagcaacacattacaaagaatcgagataaacctcaggcaggataaatcgaaacgccggaccgccattactgggaggtcgacccatggtatcttcttcgtctcaccgaagaaaaaacaaaaattggcggcagaaagtgaaatcaatcggagcttctctcacttaatattcgaattcacggtgaatctctctagtacggccggtgacccaacgacaacgaaaccggttttactcagacccgactccgtcgcttatataacttttcacctgtgtaatttttttaaacttaacatgtagtaatgggcttttaaaacccattaaaggcccattttcctaaaaccgatacaaaaatcttatccgtatggtcgagtaaatccagcttatccgcctgaaacttatttctcagtatccaaaacgatggcgaagaagacacttcgctgaagcttttttttccaaaaaaatttcttagtgtcgtcaatggctttggctccacttaattttacggaaatgccactgagaagctctcttcctctgacctctagctctcgctattgttcctctccttcgcttcacgcattgctcttctattcgttgggtgtgaaaccctcgcgtcaacaaattgttcggccattctcttcgctgcgtacaagcgagcgtagcaacaacaggagcaataacaatcgtcgattagatcaacgtaatcataaacctactcctccttggatagataagtggcctccgtcatcctccggagctggcggtgatcatgccgggaagaaaggtggtgaaaacaacggcggagatagaattcggtctgcggaggaggaagcggaagcgaaacttcggtatttggagaaggataaaggacaaaacgcgattgagaggattgttcttcggctacggaatttaggattaggttcggatgatgaggacgatgtggaagatgacgagggaggtggaattaacggcggagatgtgaagccggtgactggagaagagagattgggggatttgttgaagagagagtgggtgagacctgatatgatgcttgctgagggagaagagagtgaggaagaggatgaggtattattgccatgggagaaaaatgaggaagagcaggcggcggagagagtagtaggagaaggaggagtggcggtgatgcagaagaggagagctagagctccatcactggcggagctcaccgttgaggattctgagttacggcggttaaggagggatggaatgtatctgagggttaggatcaatataccaaaagctgggctaacgcaggcagtgatggagaagatttatgatacttggaggaaagaagagcttgtgaggctaaagttccacgaagtgcttgctcgtgacatgaagacggcccatgagattgttgaggttcgttagttctcttgaatacttcattgattagaacagtaggttagcgaaatttgaggtgcgagattattccaagagagagcggttttcattatctattggggataagctttgcggaagtgacatgatctttataggatagtaagagactctgaagtacctaagctctgaaatagaatggttataaagcttttataataacagtaggaaatttgtgaaaaacgttagatctttcttgggaacgattatatagttgtgaataaggtgaatttgaggtgttgattaactagagtggatggagctgagcatgctgttagaattctttgagtaacaagactgtgcaggagatgcatgtcttaactttaggtttaaaaaaaaactgattgaattactctaatgggcagcgtcgaactggtggaatggtgatatggagggccggaagtgtaatggtggtttatcgtggacttgactataaaggacctcctgtgatctctaatcaaatggccggtcctaaagagactctttttgtcccagatgtatcttctgctggcgatgaagcaacaaatgccaaagataaccaaagtgcacctttggtaatcaaagatccgatcatcaagaaccctattcgcaaagagaatatgacagaagaagaagttgaatttaacagtctattagacagcttaggtccacgttttcaagagtggtggggtactggggtactacctgtggacgctgacttactacctcctacaattcctggttataaaacacctttcaggcttcttcctactgggatgagatcaaatttgaccaatgccgaaatgacaaatctcaggaagattggtaaaactctcccatgccattttgctcttggtaagctgctttctgatcctagatgattttttcccgatggctcttatattttgtgtgccgatgtttaggcttgaatctgcactttacaggtaggaacagaaatcaccaaggattggcagctgcaatactccagatctgggagaaaagtctaattgcaaagatcgctgtgaagcgaggtatccagaatacaaataacaaactaatggcggatgaagtgaaggtctctcttatctttttttctctaaagttcactgttagggaaaagtaatttctaagacagcccacaaattgatggtgcatagcagaaaagtttctgtcatttcctgagttctatattatggatgatgtttaggaaaatgtacatatttaaatctaatgattcatgttgggatttctagaagttagggagaccttacagctggtggttatatcgagatctagaaatttcaagaagggttttgtttacctgctctcataatgtcatctctattctatactgggtaggcattgagcgttggtgttaatatccaaactaaatgaagtaaggaaactataagaaacatagggcccttgcatttgaaccatagtatgacctttattatctctggcaagctcttgaggatctgagtggccatcgcttatataacagaaatattttcacataggaaggctaagttcttttatttatctgtcttgttgctatagacattgacagggggtgtcttgctgctcagaaataagtattacattgtaatatatcgtgggaaggacttccttccttcaagtgtggcagctactttagcagaaagacaagaattaacgaaagagattcaagatgtcgaagagagggtaagaaatcgtgagattgaggctgttcagcctgttggtgacaaagtaccagcagaagctggcactctggccgagttttatgaggctcaagcccgatgggggaaggaaataactccagaccatcgtgaaaagatgattgaagaagcttcaagggttgcaaatgctagagttgttaaacgaatacaacacaaactaaaccttgtaagtagacctttttgtttttagtttgttaatttgcaacttgaaggttactgtgagatgtctggtggcaactgtcttagtacgtcgttatgagtattataacttctcccttgggttgtaacaggcccaatcgaagtttcaaagagcagagaaactgttgtccaaaatagaagcctctatgattccaaatggacctgattatgatcaagaggtcatctccgaggaagaaagagctatgttccggaaagtgggactgaaaatgaaggcatacttacccataggtgcgtcctggtctcttaagcattgtggctgtttcctgtatggctgtctacagtgattgataggttgtgatagaacgtaacagatgtcttcttatcatatgaataaactgttctttgatgttgaccaccctacaggtatccgtggtgtatttgatggagtcattgagaacatgcatctgcattggaaacacagagaattggtgaagcttatatcaaaacagaagaaccaagcatttgttgaggagacagcccggttactagaatacgagagtggtggagttcttgtggcaatagaaaaggttcctaaaggatttgcgcttatttattaccgtgggaagaattacaggagacccattagcttgagaccaaggaatcttctgacaaaagcaaaagcattgaaacgttccattgcaatgcaacgccacgaggttcgaaattcctgaagtattctacacaaatcacatttatattcacatgatgatcacagggttcttttatgacacttcttttgagaataattgcaggcacttagtcagcatatttctgaactggagagaacaatagagcaaatgcaaagccaactcgtaagttgtcttttcctcaactggggatgctaatagtccaagaaaattaatctttttgacactgttaagctctatttgcttttgtaaagcatgcgtattttgctgtgactcactacctggtggttttttgcagacttcgaaaaacccgtcatacagtgaatcagaatgggagaacgatgaggatgatgatgatgatgaagaagaagagaaagatgatgtggaggataatgagagtgattgggatgaaactgatggcgaatctgcaatttctagtatcgaagaagctgatatgtcatcgcgctaagctgataaagtttttaacacagagattgtcctatctcaggaggttgaagctgacaatgatgtcagaggaatggttctggttctggttctgtctatccagtggtggtaaaagaaaagcaagtgatgattcatcatcaacgtgggtaaggtttaagtttcctgtcgcagagattacagaatctacgagctcagaaagcagaacctatctgtatttcaggggagaaaaaaataagcatctatagtttatatacattgtaagttttgccaatgtatcattattaaaaaatatatatatatcaattaacattcaacaaattgtaaattagttctactacctttgcttaagttctggcagcaattgtgatctgaaattctgaacaactagtaaattctggtgaacattagtttaccaatgcatattactttgttcggtctagcgattacatgatcctacgattattcgcatttaaaagattggctaaaatccaaaatatgaagttgtgatgcagtgacatgaaaaacacgagtgtgaagttggcatgcgacatatttatagccctaactgtgactacaaagtttcaaatcgactaatcaagaactttattgattaatgagagctgatgatatttattaaattgggctcatttgctctgctcttaatttaattttctttctgtttagcacaaatatgtacatgtgaaaatttaactttgtgatgtgatgaggatattttctttactatttttagatttatcattctttttcggtttttcctaagtaatatttttttttttcccgtcgaagtaataattttcttaagtatatctgtctcgctacattaatttattagtggaaaagtagctgaaaatttacagtctcacaaataaacttaaaattaaattactaaaacttgaaatcaagaaaagatggacaaaaactacaaaagctataagacattaatatataaacataaaaggacgtcgagatgcatgggagacttttccctgcatttcacatataagatgcactaattaatttacttgatcccataaatgatctatgtgtgtgtaatgatacaattgataaaattgatggagagtatataagagcaaagttgggaaattcaaatttaatatacgtgatttgaatccattcacggcttcaccatatggagtccatattaaacgcttcctcttgcggttggggttgcacttgagacgaacttgaagcattttggatcatattggagactccttgttgaagagaagaatgattgaaactggggatcatctcttttgggaaactataagagttcctgatttggaaagccttgagcaacaaagagttgattggagataaaggcggaccaaggagacttgttgtccaagactgaagattagtactagccatgttcatgttcatgttgagaccagccgtacttgttgtgttgtcttctgagtaaacattgcgttgcgaatattgatggatatgattattgtaatcgatggttgatgagtttgaattcagattcggaagctcatcaatatcttcaaactcatttgccattgatgagtttgcatcgcatggagatccaaaagatggttgagaagattgaggttgttgttcttgtgctttctttgctgccgtgctcttttcgaaaaccctacacactacccattcctcctgaaaattcatataatagattagattgtaataaatgtacatatgtaatttttgatttatacaattgccactctaggaaacatttctagagactaaaagcaactatatgattacttttatataataaattacaatatattcttgagttaattcatgtgtcttgtttatagaaatttgagagctaatattggtttaatttctttatgttttatttaaaaatgtgcatcaaattaacttcaaaatagctgacaaatgaatgtgtgtgtaccttattcgtggggttgaaaggttgtttgctctcaagcctgtactcatgcataacccaattgcttttctcacctttgggagctcttcctttgtagaaaactagggttttcttcatcccaaccaacactccacttcggtatatttctttatctttcccggtggttttccagtaaccagcttctgttgcccggtttgttcttaaaccggttggatatttccgatccctttggctgaagaaataccactctttctctcccattgaagccttggctgcatatgtacatattattttgattagcatatgttactatcagtaatcacatcactatggtatggcctacgtatatttctacgaatatactaacaatgttttggataaatgtaatataatgattcaagtacaatattaaataactagctagaaaattatatctactctccacatgtttggtaggctagatacacctatatgtaacgtaattttcagtctcctagaaaaatgaaatgtatggctactgaaacaatctatggtttcatttatattagttatataaagtggtgtacgatgcacgtacgtattcatctatataatatataagagcgtctaagagtatgttatgtcttttagtgatgttatatgatatgactaatccattttcatccaatttgctggagacatgattgattgattttacattttaatattacatcatatgttttccaaaattattgtatgaaaattcatagactaaaactatagcatatgaagcatacacacatatatcctatccccaaaactattgtaattagacaaattaacacaagtcatttggagatgatataaacaccggctaacagtatacaagaagcatatatatgttataacgattagtaaagtataattacctggcaaatcccaaggttcacacttgttgagatcaacgtcgacgacagctttaccggtgaatcctatatcggagactttccgacatagataatgcgttatgagctcctcgtctgtaggatgaaatctgaaccccggaggaagattttcttccattttttgttgtctcttacaaatctaaattcaagacaacaaaagaagaagaagaagggtttctcctcgctctctctctctcttgaagaggacgaaggagattaactgcttaaaagcttttcaataattaatgtgacatagatggggtttatatattcacttatataactaaactatatattaaaataaataatgatttgtgtaccaaataccgatcttgaggtagaagcggccacgggtagtctttttcaactgttgataattacagctaacattttgacgattcaaggtatttctctacgcatacgtaccctatttttttcttttataaaacatatgtgtatgtaaatatgaccttatattatcggtagtgtgtaataaaatatttgtcggcgtatatattaatgttccttttagattacattactatgtttataaaactagcgtccgtcttaatatctgcataaatataattatagaaacataatatggatttatgtgagatttgtccaaccaacttcaccaaattctacccaccatgaaaccctaatgtccaatgtaatgtgaacatgcatgcatggcttctcaatggtcatttcagcttcttctttttttcttgtttttttttaaattatatcaaaattctataatcttgactagtcgtccaaattcataactgttatatatctatctgcgattataaaggaatcgttttattattgcataatatccctcttgctctattgacacatattgcatatttgcatccatcttactctattgacacttgtcttttgggcttatctcactaccatatacatccatacaaaaaaaaaacacatgcaatgttcaaaacgaaaatatgtttatattataattatacgctcgaattgggttttctgagatcagattgcgttgcgactcttatacgtaactcgaattgtataactcatattctacgttaaaatgtttcgtgcaaatgtttcctcgattatcgggtgtgaaccaatatattgatttggtggacccagttatttcttgatacgtagataaataaaatgacacaaatcatatatttttctatcacagaaaataatcaacgaaaatcacatactgtatttggccctctcggtaaattgtctaccttcaaaagctttttccccaaataaactcaatttctaatagttgtagagaacaccaaaaagatgggatgcttaggacggagaaaaagtttagtctagtatatgttttccttaagattgtgtttttaagttttaaccaattctagaagctcaaatttgttcacattggattttctggttgaataaaacagcctaaatgagtcttagtcattttaattcttcatatatacaaggttaaaataattactctggaagagtggttaataaatcccaccaacctaatggaatgtgtgtattatatatgttcagtagcaggcagagttattgggagaatttttatacatggatatgttgggtcgtcatatatgcatgtaactagattgtcaatcctaccattagaaaactttaacaattaattcaattcatctccatacttttctcgtccttgtttctaggctttctagaatcacaccacatgttaatatttttttttatatgaatgcactaatagagaatttcctaccaaaaatcaatatggataatggattgaataattacttttttttttttactgtgtagcttatgagtttcaagattctaattaacaatgtactttcttttgtttcatttgtcaagtttttcagttaaatggttgaaattatcagttttatttgaatcagtgttatatatgcaattatataatagctacttgaatcagtcataacctgcaactggtatattatttacactaacttaataaacattaaaaaattaaaatatgataatcgagttgaagtgacaccaggaaatatcaccttataattgatataaaatcgtaagattggagtccacataatctacaaatttgtctacacgttagatttttcttttctaatgtagattttccgtaatccttgaaagtttgtgtgctaggtcaaatgttttgtcattatctacgtaaataaatagtctttttacgtacgtagacaagaaaaacaagcaaataacatttattagtgaaaatatttaaacttacgatttgctaagacatttttttatttattctattaaatataaaattcaaataatatatgtaatgtaattatattttcaaccaaaatgaacatatctcatctacagtttttataaatatcatgaaaaatccttacttttgtcaaaaatttgttagtgttagctagctagatagctaatataatgaactcgtccataacaataaaattagatgtctaaaattgtctgaatgtaacaataaaactgtgagtaagaattaaaaaaaaactcaaaaatcactcactcataaaaaggccacagagtacgagtacgttatgctagatttaggcccatacattagatccagagaataggcccacaattatttgttaacatgaagagaaaggtcccctaactcagataatcacgaagacgacgagtgaagaagaagaagaagcaatggggagaaagaagggattaccggagttcgaagagtcggcgccggatggctttgatccggaaaatccatacaaggatccggtggcgatggttgaaatgagagagcacatcgttcgagagaaatggatccaaatcgagaaggctaagatcttgcgtgagaaggtcaaatggtgttaccgcgtcgaaggagtcaatcactatcagaaatgtcgtcatcttgttcagcagtatctcgattccactcgcggcgtcggttggggaaaggatcatcgtcctatttcgctccacggtgagtttaatggtggatgatttgctgaagcgtattattcgattcctttggttttgtatttggttctcattggttaatgtcttggttaattagtgccttgattagcaaaatcattgaattcatataggactgatattgatagagattagtctgaggctttgagctagtgcatttgtttgattgatgaatgaaactctcatgttgaatttgtgggtatgatattaatttgtctgtgcaggtcccaaaccggaggctgttgaagctgaataatgttgtgtgcctcattgaggtaagaagctggctctgggtttatgtttctcgaagcattgtgttgattgtttaatttgctataatctgaaagaaaacgtatgacacatttggcatttctaggaggttaattttcgatatgactttaggagccaccatgcttgtgtttactagagtatgttgcattgttgctagttaatataaggaaagtcagccatttgaatcattgtctttaaggcctattaagtgttaagtgactagtaattgtagaaattgttaaggaaagaaactataatcggaagtcttataacattcactcatattgaggtagaggttgttaatagttatcatttttctctccaccacaaagttaatcctagcaacattggtacaataagctgaggtatgaaacatattttgtacccaacttgtggaggaagttatacatgtgttaagtttaggtgaaacctccactgttatgttatgaactgagccaaacgtggaattcaaactgctgtacgctattggttcttgtgcacaaccccctgcttgtttcactttcattacgagcttggtgattcaaaggctcttccttattttttttgatgcagatgtctgaggttttgatatgggacatagaatggaatcatttcacaagctaatggctccctgatatcttccaaactctgtagatttctcttgttcttagaaacttgtcggtctttggaccaacggattcatgtaattgagctttgagtattgttacactccacagtatcagtttctgatgatcaaataagtcccattttcattctcctgtctctctcttcttaccagttaattttacttactacgaaactaagaatcacagggtaaacaaaacaagatccaaaaatggttgagtttcaaagttcaattcaacaaagcaaaatcacagcataatttctcagggaaacaacattatcttccagtgtcttattcttctgatatgatttaaagctatcgtactaacttagttctcctcactaccaccaaaaagcttcattttagacaatggagtcctcaagtacccttctacttcaaatttctttggagagagctctctgtacttagcaaactgttccttagcttcaacgttcttgtcaagcaagctatagatcatacctcgacagaaatacggtctgaaatccttaggatcctctttcgtcagctgctcgtagctcttcaatgcttcatccacattcttctgcaagaaatgtatctgcgcaatgatcagtctcacatctctcgcttccttcaccaaatactcagcctcagctacagctaaagcatcttctagcctctgcagcactgcatttccttccccggacctgtccatgagcaatgcattctcgaataaagcctcaaacgaaagtgggtttctttggagaatttcctcgaacatctggcgtgcgttttcgggacgacccatttcgcctaacagcctcgccattaagaacttccactctgtttcttctggttgtgcagctactagtctctctaatagcttaagagcttcttcatcttctcccttctctagcttctgctgcaggagtgatctcagcgtctcgacggcctcaggagtggaatccaaaagctcagataatggcgtgatctcagacagtttctcttctttcacttcctcgtaggtcttttcgatagtcgtaaccggagactcggctttaaccggtaaagttgaaaactttccggtcattgaaacagcagcaccgatgagaatcgctgatttggcaaaagatttaaacttttctggaaaacaataaccagaactattctgattcgagctagctctgatacgaatagaaagaagatcgcgacggggaatcagaggtccggtgaccggagtcgctttaacggcgacgaaagaagaaaccaatgaagaagaagctgagagagacgaaatcatgtcttcctcagagcttcagagagagtatcaaaggttgcagaagcacaatcaaaatcaaaagagatgatgaacaaacaaagcactaagccatggcgatatatcagacacgcgtagcttgtgtgaagtatatttgggcttggtttttatattatgggcctttaaataattgggtctttggccttttagttttcttaaggcagatctccggcgaaactttagactgagatacggaagaatcagatcaacgcatgcgaccaagtaaatcaaaatcgggttgaagaagaaagagataagctttcacatcagtaagttgataaattcatgttttggttttgaaatcagtatcatcttctctgaatcaactgtttatccgtattaatcattaaatttcctgagttagggatttcatcgataattaaatgggttgtgatgattcatcagatttttgaaggcgcgaaatggggaatacttcatcgatgctgactcagtacgacatcgaagaagttcagagtcattgtcatgatctatgtgagattttccgacaacttgtctctgtctttttttctatctgtttcaaattttaatgcttttgttttgtgtgtgttttgtttcagttgagcagcaggagattttatctctgtatcaacggttttgccagttagatcgaaacgcaaaaggatttatatctgctgatgagtttctctctgtgcctgagtttgcgatgaatccactctctcaggttttttacaatttctttaatcttaaatctatgcaatcttgttgaattgaattagctttgtattgattgtttgctggatattgataacagaggctgcttaagatggttgatggtttgaactttaaggattttgttgctttcttgtctgcgtttagtgccaaggctagtctaagacagaaagttcaatgtaagtaaatgagtttcctttaaatcgattttttagtggcaaatgttcactttcactttattgtatggaatgatgatcagacttctttgtttctcagtgatctttaaagtctatgattcggactgcaacgggaaggtctcttttaaagatatcatggaagtgttgcgtgacttatcgggatcattcatgtctgatgagcaaagagaggtatgatttatagaaagttggtgacttttaagtttttgaaaagtgattatggacatgttaacaactaactaaataatgaaacatcattaaactactaaaaccaacatatcggtgtgtaatgattgttgtgtgaaaattctattcaactaaaatgtttctgatattcgatcatctaactgttttggtgtgccattactcatctgacacattgttcaaactttgagataaatgctagagtttttccttttgttcttcccatgtgctccactcttatcatattggatgaaatctttgctttaacctctatggttatgatcatgagaagtgtataaagtcggtaaacaaatgaattcaccatgtgtcttgtgttttacttttgtggtatagcaagtactgagccaggttttgaaggaatcgggctacacgagtgactcattcttaactctggaggatttcataaaggtacaatttgtgcttattgtaattgttatcatcaaaattgcagtatttaacttgtcacattcctagaatctgaaactgcatctcctttcttgtttcttcaatctcacagatctttgggagtagtagaccggagatggacgttgaaattcctgtggattagactttatgatcatatatcatcaaacacaacactcaaatctcatcttgtattttgtccacactgtttctagaataatccttgttaattgatcacatcattgcaggctttttcagcacttgttaagtatttgtcaattgaaacttgttctactaaaggaaattacaattgtttcctctgcttagctttttgcattaccaataatggcatatgatagactttaaatcctaatctcaaaaagaattttttttttttctgtgaagaaaaagaaaaagaaaaagtggaatggaatgaataatcacgaaatctccgttttttaatttaaagttgattgtatttaatgaattgtcaaagaagagtcttaattacttgcatattattaaactatgggttaaagaaacaaaaatactaattatggtaattagattgacaaatggtatgtagacaagaagcttattaatgtgacgtaacgtaattaaagtaaagtaagcattcaattctacttaatattgtccacacaagtcattatataaaataaaaaaggaattaaaacgtcgtcattttgcttcataatagaccactttattcacctaactaaggtccaccaccacttcataacagtttcgtttcgcgtcagtcaaataaaaaatatcttcaccattcttttttcaaacaaagcttaattctctttgagaatccgtctagtaatggcggcgaagcaaggttccttcaggcatggaatactcgagaaacgggagaggcttctctccaataatggtttctccgatttcagattcaccgacatcgaatctaacgatctactcgaaaacgaaaactgtggacgaagaacacggttatgttgctgttgttcgtgtggtaatctatctgagaaaatatctggagtctacgacgatgctaaagatgtagcgaggaaagcttgggagatgggagtatctgatccgagaaagatcgtcttctccgctaagattggtcttgctctgacgattgttgcgcttttgattttttatcaggaacctaatccggatcttagtcgatactctgtttgggctattcttactgtcgtcgtcgtcttcgaattcaccatcggtaaatttcatcccctgaggttttagttttccacgattttggggttcattggaaatttagttattagattggaattttctgggtttggtttgtttctttgttgaagaaagagtatgcgtcgttgctttcatctgtagaatgaattttcgtcgttttcttcttttataattttaatatttgctttggtttgactgtaattgacgattactgtatcatttgagcttaattatacgcttaacatcgctaaagtggtaattatgtatagaagctttacattgtgatgactgttgttggttgttataggagcaactctaagcaaagggtttaatagagcgcttgggacattatcagctggaggtcttgctcttggaatggctgagctttccactttattcggtgactgggaagagatcttctgcactcttagtatcttctgcattggtatgttaacaacatcttcatctacatgaatcatttttggttttctctctgcttacgtatgtttttactgtggtggtctcttgtttcagggtttcttgcaactttcatgaaactatacccgtcgatgaaagcttatgaatacgggttccgggttttcttgcttacgtattgctacattctgatttctgggttcagaactgggcagtttatagaagtggctatctctcggtttctgcttatagctcttggtgctggtgttagtttaggtgttaatatgtttatctatcctatatgggctggagaggatcttcataaccttgtcgtgaagaattttatgaatgttgcgacttcccttgaaggttagtataacaaaggttttggcttttctgagtctcgggaaggagatgctttactgaggattgtctttggtcttataggttgtgtgaatggatatctccgctgtcttgaatacgagagaatcccatccaaaatcctcacgtaccaagcttcagaggatcctgtttacaagggttatagatcagctgttgagtcaaccagccaagaagagtctctggtatttgtcattggggatcattttcgataagtcggtttttattccattgcttctcatctcttaattagtttgtgttttctctggtgtaattgcaaagatgagtttcgcaatatgggagccaccacatggaccatacaagtcatttaactacccatggaagaactatgtcaagctcagcggcgctctcaagcattgtgcattcactgtcatggcattgcacggctgcattctctcagaaatccaggtaacatagtagagagacttgtatggtttttgaggattctgatgtttctggtacttccaaaggaatcagttgttcatgattagagcttaatctgggaacatttcacaggcaccagaggaacggagacaagtttttcggcaagaacttcagagagtgggcgtagaaggagctaaattgttaagagagctcggtgaaaaggtgaagaagatggagaagctaggaccagtcgaccttctctttgaagtacacctagctgctgaagaattacagcacaagatcgacaagaaatcttaccttcttgtcaattccgaatgctgggagatcggaaaccgagccaccaaggaatcagagcctcaagaactgctctccctcgaagattcagatccaccagaaaaccacgcgcctccaatctacgccttcaaatccctaagcgaggcagttctagagataccaccaagctggggcgagaagaatcaccgtgaagcgttgaaccatagacctactttctcaaaacaggtgtcatggcctgcacggcttgtacttccgccgcatctggagacgactaacggagcttcaccgttggtggagacaacaaagacttatgaaagcgcgagtgcattgtctctcgcgacgttcgcgtctctcctcattgagttcgttgctcggttgcagaacgtggtcgacgcgttcaaggagttaagccagaaagcgaatttcaaggagccggagattgttacaacggggactgatgttgaattctctggtgaaagagttggacttggccagaagattcgtaggtgttttgggatgtaaggtttttgtttttgcatcggcgtttcactttatacgcgcgagagattagagtttaaactgttaactgtaaaactagtaacccaactaaattcgtaagtaatggtaaaaataaaataaaaatcagaggcagtttttgaaccttatataagaattaagaaattgtgcattggaccatttccctcgtaaactcgagatttgaaatctatttattttcgtctactatagactaatccatcatattcattgaagaaacttaacattttaataatctactttgcaactgtgaacaataagaactccagcacccaatctgtaaaagaagtttattttctccaattcaaatcgaaaatcttattgagaattactgataatttgataattatctcgattacgagcttgaagaaatttatttatgtgtagtaaataggaagaaattacgtgaaattcacacatgttttgttcatccacgaacatgaaattactctcttacattttctctttggccaagaaaaatatagaaagtaacaaagaaataaaagacagaaaaaatattgtgaacaaacaaaagtttatgagtcaacccatcattcgttgacctgttggaggggtcatcatctcttgctgctgtgcttgttgaacattcccagcccaccctattgtacaaaataatagtaatatttaaaaccagcattggttttataaaagtcatcaaaaacaataataaatccaaatgaaatgcaaaaataaagaaaaataatgaatgagaacatggagatcacaacaataaaatttaccaagaatggggtcaaaaccatggtgcttgagctcacgatactcttgacaaagagcaaacggcatacagactaagtgagtgatccaatcgggagccggagcatccggtaacccgaacttctttcgtatcctggccctgaacatgtatgaatacacaaaacttgccccggtaaaaaatagtgctccgtacaacaacccagctgtcgcacaagctgcgtgatagaaatatgtttacacacatgagacattacaatctatgagtgtttttcttaataaaggtttgtgtatgaatgaatgacttacgcgtcgcgccttcgtcaacgatctccgcaatctgtccgaacgtgacgcatggagctatcaatgtgatcacggctaatccaatgcacaacaacaacaagaacaacaaaaaatggagaaaccaatcgtagaatatagaatgtttagttttttttgttgtgttagaaagttatctaaccattttcactgtcgttcatgcaatcgaaaagttgagaactccactgattttgtgtttgttggtaattgaccggtatgcccgttggtatgtttgccggcttaccaattccaccgttatgggataccttgttgctcgggctagccgtatgttgaaccgaaggttgtgcctgattcgtttggccaactggtcgacccatagtatctaccccgctagagttcggcaacgaaaaaggtttcttctctttttttcttttaataacaaatctcttatcgtctaattttttgaaagcattatagatgatggttaagtttataggttgaataagtgaatgtgggatccttttcttcgtatagttatttccctcttgtatttaactaaattcatttgtaactactactttgaaacattattctccagactagtttggctgtcaatattcttaaaaaaaaaaaaaaaaagtcagccaattgcgtaatttgtaatcaaattttaacaaaagttacgttgaattttgtaataaatttactaagatccgctgctatcataagtgacgataatgaaaaatgtatacattctgatgatcgcttaattactatatgtggactttaccaaaaatgattactttacacacactgactaagcaagatagtatattatcttcaaaacctttttgacatgacaaaactggatagggattaaatccttatttatcatacaaatttggttttggattattgggttctatttgcaacgcccaatctgtgaaaatgtttcttttgtggaaattaaatctaaaatcttctgtagaattacgaatgtttcttttttttttgccaaaagatcgatgtataggttgtaaaaccaacttttcatttatatgataattgcagtttagcaaaaaaaaaaaaaaaaaaaaaatgcatatttcggatataggaagaaattacatgaaatcacactcatgcttattcatgggctcccacaaacataaatcactgccttacatttattttcagcaatgacaaataaaaaattaaccaaaagaggcaaacaaattcaacaaaacaaaacaaaaagttatttaaaacataatagtgtgaaagaaaagtaacaaaactttacaagtcaacccatcatccgttgacctgtcggaggagacattactggctgctgtgcttgcacattcccagcccaccctattgcatcaacataattcatagttggtgatattcaatacaagcattggttatataacaattatcaaacagataagcaaaggaatttaattaatgagagaatggattcataataataaaattaccaatattggggtcaaaaccacggtgtttgagctcacgatactcttgacaaagagcgcaatgctcacagaataagtgagtgatccaatcgggagccggagcatccggtaacccgtatttgtttcgcattttggcccggaacatgcatgagtagacaaacggcactccgatgaaaaatatcattccatacaacaacccacctgtcgcacaagctgcgtgatacatgtacacatatgttagtatgtttacacaaatgaaaatctacgcttcttcttctttctatttttttgtaaaatgtatgtgtttgtatgaattaaggagttacgagtagcgccttcgtcaacgatctcagcaatctgtcctaacgtgacgcatggagctaaacatgtgatcacggctgaaccaatgcacaacaacaacaacaaaattaagaaataatcatagaatgttatgcttgtgtgtacaattgcgtaattgattgtattttaattaaaagttatctaaccattttcactgtcattcatgcaatcgaaaagatcagaactccagagattttgcgtttggttattgaccggtctgcccgtttgtatgtttgcttgaccaattgcaccgttttgggaatgtacctggttgtcccggttaaccgttggttgaacttgaaccggaggtggttgtgcttcattcggctgactacctggtcgacccatatatatatagtattaatttcccggctagatttttgcaacacaaaacgtttgcttcttcgtttggtctttaagttttttgttataacgaatagctcttatcgttttttttgtgaaagttatggatgaaggttaggtttatataaactaaggtttgaattagtttaaactttcttgagatgctctacttttcttcgcatagttatttccatcttgtatataattaactaaattcatttgtatagttactactttgaaacactattccccaaaaattgtttggctgtcaccgttcttaaaaaaaaaacaaaaacaattgcgtatattgtaatcaaaatagttgaaatccgatatcataagtgattataatggaaattaaagtgtatatacacagattcagatgatcgattactgaatgtgggcataaccaaaaatatgattaatatacatatagtgactgcaaaatatgtgtgaatgagtgtgtacaacttaaacttcaaaacctttttgatatcacaaaacttgaaatggattaaatctttatatcatgtaaaatttgttttgggatattactggcttctatattgcttatatttgtggttaaccagctggtggtatttctaaatatatattctatatgtggaaacaaaaaataaaactgcaactaagttttgaaaattattgatgtaatgataaatgataatggtaaacatgatttatgcactaatgggtattgtttaatttgcttggtcaaaactcagaactcgaatgaccttgacttgtgcaattagttgacgtttttaggtacagattatttttgtaccaaagccagacaccaaatatatcgaataagggaaaaaataagccctcttggatgaaaaaatacgatcttccaattcttttattttcacatatcaaaataaacaatattgataaaatctgaaaaagaatttaaaataatatgctagctcaatataaaactacacttaaaagtgctgttttcgtgaaccacttatttaattcaaatcatattgcaaatcagaaatcttcttaatcaacccatcatctgctgactcataggaggagccatcgtccgttgcatatttccactccaccctatcacataaaaataataaagttacatcaaataattaatcaaacgtatgaaagacactaattatttcaatagaaagtgagtccacaaaacaatgcaatttaccaatagaggggtcaagaccacgggttttgagttcacggtgttcttggcaaagagcacaacattcacaaaagaagtgagtgacgcaatccgaagttggagactccggtaacccgaatttgcttcggatcttggtccggtaagtgcatgagaacaagcaaggtaagccgaccacacaacatattagcccgtaaaataccccacatctcccacaacctacgtacattatatatacgacgttacgtgaattcacacacacacacattgtttagatatgacatatgtgaatgtatggcttaccggtccttccttcgtcggaaatgtccgcgatccgtccgaaagtgacgcatgggcagaaacatgtgaggcaagcttatccagcacaaaccaaaaggaacaaatcattatacaatcctgacaatagatctatatatgtataaagattaaaggacaacttgattaaatttatatagaatttctaccagtttcactgtcttccatgcagctgaaaagaccagaagtccattgcttttccattgtaaagtagcttcaaccaaatcttgcgtcaggttttaaccagttttgtgttgatcgatcttttgataagcgagatcgtaaatcaattaattagggttttgaagatagatttttgttgttagatgctttaagaatggagggtgggtgggtatatatatggttgatggtggatcgcttcgagagatctacaaatgtttaatttttagtacattgcactttgggaaaaatcataaaagttgtaaaaaagagtaaaagacttttaaaactagtacgttgcactttttgttaaaaggaggaaggttttttgaaaattgatttttgtttaaggaaggtgagagattttactgattgtgagagattttaagctacttaaaagtaatatgtaaacgcgtttttgggattggtttaatccacacatatatacaagatacaaagaatttaatttaatgactaagaaaattaaagaaattatgaataaaaaagaaatatacatcctaaaaatgcgaaagtaaaataaaacaggctatgctaaattttaaaatattaaattcaacatttttctattcataaaatttctattaaaattatttgtagataagagataatatgttcaaacattattcctctatataaggaatcaaacttgcaaactttaaaataaaattttgaaaaatatatctaatgtaatattctggttttattagtaaagtaatattacttaatactaacaaattacaaagaaaagaactgaaggaaaaaaaataaacttttaaaattttctaaccagtgaaataaattagaatttaaacttaaaattttattaattaataatagtcataacaaaatttgacaaatgttttcaacttagatgtgcaataaacatgaatttattctactaaatcaatactgggcctatgaatggcgcaaggaatagcccattggttattctatatcttttggaccttacgtttttgaagcctgtttaggatcacactcataacaaaaaaataaataagaattacgcttctaccaccattaaactctaatgtatctgaactcagaagatccgatcggagtagtaaaaattcaacaaaacaacaataagaaaactcattaattcattcgtcggattcgaagaagaaatcacttcccagaaactttcttcgtatcgaagtattgcttgtgttcttcggagaaacgagatcgggatccgaatacgagtacaatggaggtttcgcaagatggatcggaaagagataaaactcctcctccttcctcttcttcttcttcttcctctcccattcctgtcgtcaccaatttctggaaaggtttgtttcagattatgtctagctatctattcgttttcttcgactcgtagtgaagctgaggatgagcttgtttttgtagttaggagaaattcgtttgttaggattccgtttaagtagtaagacttaatgagattctcactgaatgttcggggagattgcattggtagtttaatgtgatcggattgagaaatttcagtttattgctttaaaagttatcaacacatttttcagtactgataactagtttcatctcgattctccggcttttgtatttgttatacgaaaccagtttcaattagagaactggttctgtggttgctcgctgttttgatagacatcatcatagaagaaagctcttcccgaatgatccatttacttgtctttaaactacttgttgcagaatttgatttggagaaggagaaaagcctgcttgacgagcaagggcttagaatagctgaaaatcaagaaaacagccaaaagaatcgccgaaagcttgcagagagcacacgaggtacttttttgtttcaccttttatattgcttaacacttcaacattttctcctgagggacctcgataggttccagcgaagagatgttaacatattctttggtttatcttggtaacaacagacttcaagaaagcttcgcctgagaacaaacttagtatgtttaattccctcctcaagggatatcaagaagaagtagataatattaccaagagggccaagtttggggagaatgctttcctaaatatctatcagaaactctatgaagcacctgatccgtttcctgctcttgcttctattgctgtaattatccacttatctaatgttaacataatagacacctaaagtcctttagcctgagaaccaactaattgctgtattccaggagcaagatcgtaaattatctgaagtggaatctgaaaatcgaaagatgaaagttgaacttgaggagtttaggacagaagcgactcatcttaaaaatcagcaggccacaataagaaggcttgaagaacggaaccgccagcttgagcaacaggtcagcttgcttttaacctcttcttctaattgatatagggataaaactaaatgaatgtaaagcacagcttccttgattatttttcagtctattctaggaggtcaaatgcaaatttatacactgagccataagcatgatttatatagagatgctattttgtgatcttgtaacgaataactgtcgaagattagcagtgatatcgagttgttatatttggattcagatggaagaaaaaatcaaagaagttgttgagatcaagcaacgaaatctggctgaggaaaaccagaaaacgatggagcttttaaaggataggtaaaaaaaaaattctcttctgcatgctttgggtgtttagaaagttttcgaggaagcaccaacctttccttgttcactgtttaacagggagcaagctttgcaagatcagttaaggcaagcaaaagacagcgtctccactatgcaaaaattgcatgagttagcacagaaccaactttttgaactccgtgctcaatcaggtggtgcattgagccttaatatggtgactcatattgtgctttcataattggaatggtctcccttacatattgttccttcttgtcttgttaatatatgtcacctttgtctaaaccatcagacgaagagaccgcggggaagcaatctgaagttagtctattgatggatgaagtggagcgtgctcagacccgactccttactcttgagagggaaaaggtctttcatatcatgctctctttgtttgaattaagggaatgccctaagataaaccaccgtttttagctctctaattttgtttattggtttgtaacagggacatctgcgttctcagctgcaaacagctaatgaagatactgataacaagaaaaggtgaggtgacacttatgcgtccatataacaaggagtcaaataacttttatctaagtttttgctttgttttaatttttttgttatgctctttctctacagtgataatattgattcgaatagtatgctggagaactcgttaactgcaaaagagaagattatttcggagcttaatatggagattcacaatgttgagacagctttagctaatgagcgagaaagtcatgttgccgagataaagaaattgaattctttgctcaataaaaaggtgaaatttgtgctatgttttgtcttttatgctgagaaattatattttgttctgaaaattagtttccggtcccttcaatgtctaatattagcttaccgtcatttggtattaaaccaggatactatcattgaagagatgaagaaagagcttcaagaaagaccatcagcaaaattagttgatgatttgcgcaaaaaagtgaaaattctgcaggtattcatcatttcaagtgttttttggtgctcacttagtttaacttcttattaacttcttgccacagatccataccttgttctttctggtaacggtacgatcgtatgtagtaatatcattgttgcatattaggctgtaggttacaattcaattgaggctgaagactgggatgctgctaccactggtgaagagatgagcaaaatggagtcgcttcttcttgataaaaacagaaaaatggaacatgaggtcactcagttaaaggtacatgacctctacggaatgaaccaccaccatctgtaattctgtcttttcgttactctttcccttttcagtgaacatacacaagtaaagtcactggtcgattcacaccacttcttttcccaggttcaactttctgagaaagcttccttgcttgagaaggctgaagccaagggagaagaactgacagctaaggttaatgaacaacaaagactgatacaaaagttggaggatgatattttgaaggtacgtaagagtgtgtagttaccattttaagttaaaaggtatctgtgctactgctactaaggaggagaaactcgatcaaagtctttgattatactgaaaccttatttacttgttacacagggttacggttcaaaagagcgaaaaggtgctctatttgatgaatgggagttctcagaagcaggtgtggctgagcagtctgaggtacttctctctggccctgtgcatatatgagtcaatgagtcgtgtaatttatcatgcaatactcttaaagcaggaaaattttcccaaaagtaaaagaaaggatggaatcgttcagaactaagagttagataaacagtaacctatcgctttaagttctctactagataatcttaacggtctaacatgtatgctcactctgccttctatttatggcgtgaattaaaatattgctagggaatcgtggtacgtatatattttaccatgatctatttttttttcaaaagcaaaatacctctgaacttcttgtcaaaccattaaaaagttttcatacaactaagggtatttccatgatatggtatattatatacctcacaattagacttatcactaactactgctctttatcattttgtgtttccttttattagcctatggatcagaaacatgttccatcagagcaagatcaaagctcaatgctaaaagttatctgcagccaaagagatcggttccgagcacgattacgggaaacagaagaggtacagttagttgtacatataaatgatcctcttccctctgtattctctatctccagttaaatttatttgaactgaattttatgtgttctcttaacattgcaggaaataaggcgattaaaagagaagataggttttctcacagacgaattggagaagaccaaagcagacaacgtcaaactctatgggaaaatccgttatgtccaagactataaccatgataaagttgtttcccgaggatcgaaaaaggtatttgttttctgcgatacatttcccttgaaccttttctgtctcgtgatcgggttttttccatggttgatatcgttttccaatctcagtatgtggaagatcttgaaagtggattcagctcggatgtcgaatcaaaatacaagaaaatttacgaagatgacatcaacccttttgcagcattctcgaaaaaggtaaaaaataaaacattctgctatcatcgacacaagccttatatttctttcctaaacattaaccctttcctatttatatgtgtttgataggaaagagagcaacggatcaaagatttgggaatcagagatcggattacgctaagcagtgggcggttccttctaggaaacaagtaatcctcttgctctcaagtttattcacattcatactcgatcacagaattttcggttattttcaatttcatgattggatctttcagatacgcaaggacatttgctttcttctacacaataggattgcacgtccttgtcttcacttgtctctaccgtatgtctgcttacagttatctcaggtaaaacaaacccaccaatttttgtttttgttacaagtccattatgtgattgattttatttaatttcttcttctttatttatggtttagccatggagcagaggagactctaatgacagaagcaaccacaaaccttcctcacggtctttaagctctcaccctagggacttattcgtttttggtcgttatgttctttcttgtccttgtagtgttccgtgggcaattctaaaacggttgaatatttgtacagagggatccaaatcactcgatacatatataaagccacagaaaaaacttccttcagaaaactgcagaaatctaaataagatctggtttacttttcttcgaaacataaataaccatgaaaaatgcaccaaaacgataacaaatccgacaggaataattgttgctatccaaatacaaaataaaataaaatgaaagtcgttgcttgatatctgttaggcaacaacacctacgtggctgggcctttgaatgcttgcttgacaatcgatgggatagtgaggtaggagctgttatcggtaaggctggagccaataggccttattttccagaacgggccatgatcaagagttttcgacccaaacgtcccgaagaagggatggttaggaaacatcctgatatatgtctgagagaaggcggcaagtgcttccgcaaggggagggaggttgcgaactgtgcttttgagctggtaaccgaactcataggttgcacgcttatcagcaatacaatttggtgattctggaagatgttccggggtagagagaacgaccatgacttggttagcaaccaacccatgtggagagcagtcagcaagggtgccggatccttcaaaggatgcagcaacatcatccgcaactccttttacttgattgaaccaagccatgctgtgtttcatgtggagaaaggaagagatcttttcgaggttatcagcggcagaagtgacctgaaagttaaaattgctgtagcaatcagcaaacgcctcattcaggctttgatcggcttcacaagggtactgtaagccaggtaaaacgagtgaccatttttcagcctctgtcctgcttgcatggagaccaaaggtcttgtgaccgaagttagagacggtattttgggtaacgggaatgtgcctgcctctctttggatagacgggaggtattgggtaaaaaggcggttaagtcttccaagagggcgaagatgccagggacgttaggcaagaagtggctttcaagaagatctcgcatgaacgcgtcacgtcgagccgggcctggttgggcagggatgcgaggatacactttcccattatgattatgaggaaactccggctgcgaagagcaaagagtcttgaagagtccgaggagagggccgggaacagcgagagtttccaagggatggttgtccaagaaccggtttaggaaccggtgttgaacatcagtaagatcattcacatcgtttccagctctaagacactggatccaaaagagaacaccacagtagaggcggaggatgtaggggtgatagttgggattggcccgtttgaaatcaaaattatcgcaaagtgtaatgttcatagcatggaccatcatgtggcaggaagggtagtagtgtgagataccttgcgttgggtacacgatttggcttcgggtgaaactagaaaggaaactaagacaagtcttcttctcaagcttcgtcttgtgagttgaagattcagaggccatagtgattgatatctttattaacaagaaacagatcgtaagcagaggttttgatgaagaaaatacgttttgcttgatgtgtaatgttttgacttttatgaatgaaggtttggtagacacagtgtcgcttcgggacacaacatatgttttaaattttttagtaaattgcacttatcagaaaagaaaagaaagaaaagttcttcaccgcttcaacttctcattaaaacgaggaaatctttaaaactctacaacttactattgtgtgatgattttttattcgggacttgcaattttttgcaagttgtatataatagcaaaaaattggaatacaatttcaagtttagacaataatataatttcctttgaacgcgttttggttccaaattccaaccttctttttgtttgtgtcacattcattccattagttaaattgatgtttaaatttctcattcattccattagtaaaatctatgtttacgtgacacaagtgatcaaaatcggaagatgatattcttgtttttgtatttcctgccacatataaatttggtaattaactagagtggaacttctttaactatggcgttctaagaacaaaacattcctcattttccaaaaccgtcacataatgagaggaatcaagttgagttagctttacgccaatacaatgtttggactttagaagagagaggctgtggaaaaaaagagaatgttatccggtgaaaacatactttatataaatgggaaaatcccacaaagattcttctaattctttttctaatggcacgcatgtgatgtacaaacgaatgcttatctgtatgcgtatctaactatctgtaatatattctatatgcgttaaagtatatgtgtggtgttgaaaattagtataaatttggtgaccgagagaacagagagagtgatgttaacaccactgccaccacaacttggcgatcagactcttacaacgggtcttctccatccgtcaacttaggtcaactgcccaacaagtatagtcattaagtttgttatataatacctatgtgtcccatattattgtcctttcttttcgttttcactcttaatgttttcaactttaagagtaaaaccacatgctctttcttgggcagaagaaataggtccccgaattacttgtcgtcaccctttccatgaaaacaagttccttcatgcacaaatgagaacggaatcattgcattgaccctacaacagtgtgtgtccatatttcgttatccatacatcaatacacacatataagctccattttagtgatttctcaatctcgaaattaatttatgcaacgagattcacgatagagtatagagtaaactctaattttaaaacataatctcgtttcaagaatatgtcacgagaagtatccaatgtaatgcgcatcttggaactagtaagtaaaatttaatgaggaaaaacaaaatgtaaaatttaatgagtttgcatttaatgtcgcatacgtcttgttttatatggtcataagttgtcgtactataagttttccgcgtaattacgcccttaattaaattattagacagtcatccatgaccaactatgtggttgttttttttttggaatctaatgttaaattatattcaaaagaaaaatttaagttatcgtactataagttttccgcgtaattacgcccttaattaaattattagacagtcatccatgaccaactatgtggttgttttttttttggaatctaatgttaaattatattcaaaagaaaaataacgtttttactagtgcaacggagtttgaatatctacataaagctaaaacttttaattgataataaagataagagcttatggtcgactgcgaagccaagcttcaactatgtggttgttagtcataacttacactatttaagctttataatgtatcaacaacagattttatatttctttcaaacgtcgtgtcatattttcatacaattattgaactagaattcacttatatttttgtaagaagattttcagtttcattatttataaaagagttattgatatatatggtccagcttgtactatatatataaatataatatatgtataccagattctatgagttgttattttcatatatatttcttctataacattttttcgaagttctaaattttcgttcttttaatattttttccgaaagttctgaattttatttaaaatttgaatattattgatttggtgaataaatgggctgtgtgcttatcaaatgggagggtgagtgtgggagtctggagagcaatacgtgcagataacatgagtgtcccatttatatagcgacttcgcttacattcatttactgaaactcaacgtcttcattcaaatcccaacgtacttagtggttcagatatttacttctacatgcccccactgatactataattagggtaacaatttcatttttatcgtacaattgtttgaaacagcctctcattcgaataaaacacaagttatcagagccagtagatgtcttagtttgagacaaatatatcaacatcctaattataactatcttatgcaaaaacaaaaatcaataatccaaaacttttgatcaaaaacaaaaaaattcaatcgtttccacacagacaaaagtgttggatagttttgctataattttattaaaatatgattttagaatttaatgtaactttgattctatatatgttattttctgtaagtcagaattattaaaaactatatacaaaaataacagaattcgaaaaataagtttatttctaagagcatatgtaaaatatgttcttagttattttttttggtaaaatatgataaaatgacatttatgttaaaaatatatccgtaaaattatgtcaccatgcacaatttcttgcaagattattgtgttaattacaagactgtattagtgtatatccattatcttgtaaacaatggataattgcatgaattatttattcatttatgtgatagtaatatttggcatcatctgtctattgtccacgtggccacagtatctaatgtgaactggtactgtaataaacattgaagttcgtcatccgcgaggctgcagcgacacatgtcatctaactattgagttaagatcctgccgacaacaaaatagagtggggcccacgtgcgtaatgaggaccacgagggaacggtgctcctttactttcctgtcctttttaaatctaaaattacgacgcttaaacttcgttaacacatcacttctatgcaatcaatagttgctaatgcatcgccattatgcaattattccaggagattacacaaatcttgttttaaacaatacaaacaaaacttttaaatttcacgaaaacagtactataatgttactaatttttttttataaaactgaaatttgggaaaaatgccatgttattaaaatttgttatttgaagtgacgaaagttcatgagacaaatatcctaaatttcctagctagtcttgcatcgattttctcattggtagatatcctaaatttcctagctagtcttgatatcctaaattaacaatatcatctttccacagtatcatcactcttactgggtcgtcagagcattactcttagtttgcaatggaaacaaaagtaatagttagggtgatgatcaaaaactcgtcctagcccgtaacctatagaagatatatggaccacagtattcaccctaatgctcgctaataacttgtcggatatttttcgaaaaagtcgtgaacaaattgttggttagatcaatactagtctccaatcgaaaaccatcaatcaaatcacagggcgagttcagccgaaatacataaggacaagccaatcacaagtgatcacaccatatactgagatcttaagcaccacatgatcaaagcttattcttcttcttttttttacgactcttgaattgaacatgtgtttagacaataataatagtgttattatttggtcacagcgcatgcaaagaatgttgatatttgttggtatttaactatttatgtccgtataaaatgattttaaacgatcttaaaggagtttggggagacagaaatagcgtaggcagcattcatatggcattgtccaaaaggagcataatgagatcggggggccactcttgcatgtgattcttattcttcaatcacctcacctctcatcacccccaacgccactacgtgcttacttaattgttaatttttttgagatattattttataaattcccatgacaaaatttggaattttgagacggagaaagcacatatatattccgttaaaacaactcgaagatgattaatctcaaacagaaatgccattctaagtaactaagtttccgctactaatgttccaccgtcagctactaaagcacataatatagcattttcttgaagttgcttaaaagttgtgaaattctttgtcaataatctacatatagctatattatataccaccgcaaggttgtgtatagtatatagtaggaatccgtatcatcatctacatatagctatattacaaaatccatggaaaatgaaatagaaaacggtaagaaaaggacctacatgacgaaattagtaacggaccaactaactcgcctgtgactttatctaatgcacatgcttactcgatagtcgttacaatggctaaggtaaattaaccccaaaaagtccaccctcgtcattccgttccaagacgtggctccatgcatgcatgtttgcttacgcacttaatgatctaattatccgtgtcatttgttagcaattttttctacaaaacgtaaaaactactactccttctgatttaattaacttattgttcaaggtttttgtaaaaaaaaaacttaaaaaacaattaaagtttctactatacttttgtttaatatatatttttattaaattattggtcaaaacattaaaattgtaagaacaaaattaaaaagaagatttatacaactattatgtgataaaattgaagtgttaaaatgacaaactaaattaaaacagatggagtgttattttatttgtttctaaatattgatgttttagaatttttacatatatttaaaataatcattgattaattattcttatttatattaaatatgttttaataaatttaaatcaatagtaatatgaaactattaattattgtgctctacgatatcttaatactaaataataataaaaatcttaaaaagctaatctttgtaaaacaaattacaaaagtagaagaacatcatttttctaaaattttctaagaacagagaaagtataaaacttgaaacaaatttggttgaaatcttatatataattatggaaaagtgatatgatatgtgatgtctgactattgtaatcgggcaattccagtgatgattagaatgataaattccattccctgagacacagttccatgtaaatagtattatttttcaaaggtgagtgtgaaaaaggcaaatttttctaccctggcttttcttatttgaataccccaacttaacaactttcacattgattgatttccacacagttggtaaaattcagactataatttaaaatattgaaggacattaaagggccacaacaacaaaagtctgtttgtttctttgaagactaaacttttgttacaaaaagacccttcttttttgtaacttcttactttattgactcttcttcttcttcactactgaaaacttcttgctgagacaacaacactttcaactttataataaaattaattaatcctattattattcgataaaagacgacaataacttatgattaattaaaaaaaaggtagaaaaattcacacttaaggattttgttttcatcttgttaccgtagctagctagtaccataaaaagttttactgattacccgtaaaactattaatttttctactttgacatgtttagcatttattccctgacaatccgataacatttttggatagatcgtaagtgatacgtgtcccttgctgctgcacattcccgatgatcgacaacgacgacgacgtcggagcaaaagcgaagcaaaacgttccactatcatccacagggatcagataattcttcgccggcaaatcaagcgacttccctcccgtgaaatgaaacgcaaccgtcggtactttcacagtggagagagacgagaaatcgtaacacgtgtcgaacagagagatgctcgaagatccttttttgagattcacggtgagtttaagaaacgcgtcacgcagcgagttataagcctgcgtctgaagacgagtcacggcggttccacaatccaagatcactcctccgcttcccgaagcatcgacatcgaagatcgcatcaggcagcacgactttttcaccaccgacgctgaatccactgagtccgacgtagtagaaagtgtcgatctttttgttacgtagaagcggcgccgtcgcgtctccgccaccgagttggaccgagttgaaatcaagacttgaggactttcccgagtcacggtcaacgaggcagtaagaaaacgacgtcgctttcatttgattggttatcgataaaacaccaccgcctaaaccgagtaaaccggctgctccggtaaagagaccttcgttgtcgtgaccacaacccaaagcgacgttgtttattttaccagagttaccaaacgtcaccgtatcggtagcgagttcaccgacggtgaaagatccgtctccgtaactaacttggtagagacatttgtttgaccgacaagcggaggtttcgagaagagagcactgtggagcagagcaagtgagagatttgtatgtggaagacgaagtcgggttaaaaaccgggtcggactgttggtaacagtcggcgcaaggttcacactggatccaatttacgtcgcttccggtgtcgagaaccaagtacatctctttcgccggagttccgacaccgattcttgagaaatactcgccgcttccttgagaggctccggagacgacaggtgtcgttagatcctcggtttggtatcgtgtatcttcgttgtaaacgggtttgagatcggatctatcgactccttcgacggcgaaacggatcttcgcgacgattccggcgactcgggatgagtcgcgctcgagtcgactgagtgttaagcttttgtagtctttgtgctgtgacgcgacgaaagtgtctcgagagtgaagctctagagatagtggtgaagatgaattgaagaaaaccgggtcggatagggattcgggtttggtggtggtgagtgaggaacgagtcgggtcgagtgagaggatagtttgtgtttgctggagagatgaaacgacgtcgagtacgttcgttttaggtggagtggatagagagcgagaggaagcatcagtggtggtgaggaaaagagagagagtgacgacggcgaggagagaaagaaatcgcgggaaagccattatttccggcgaaggttgatatgagttaagtggaagagagaaagagtaagtaatgtttttaatttatagagagaaaaataaatgctgcggagagagtcacgccagaattgctgcggttataaaagccacatcaattatttatcatcctgttaaaatatttggattcacattatcatcgatcggtaaaaaaactttatggttggatattatattttatatatacaaaaataaattaaataagaagtcttaatctggatttatcatatgattcccaacatagcgttacatttataccgaatcaaataaaaatttagacaaatgtaatttgagaattgtgtttatttgttattggcaccgaaagaagaatttgtactttgtagaattcaacacaaaactatagcatagtgtctgtagtctgtacggacgagagtagaaactgtagaagatagggatttgacctactaaatattttaatacaagtctacaagcgattatccaatattaagctcctagagatgtgtgactacagagtacttaagtgtttatttattgcaatgacctttggatacaaagtactcctatattgttaaccaattcacttttaattttttttacgtgaccaaagctaagatcttatctagaaaactaaaagctttctgtccttttgttatattcgggcttcaaaactttgtaccttcttcttaccatcgctgtcgagagaaaagtcagcagaagttttggaaactattagttatagggatcgaattatcttaatcatctacgatcatgtcattttgtgttggatatttgttaatgcttgtacatttctaaaaaaacatgtgttgtatattagctaatgtcaatatgtggtgcatatttgctaagttgccgtggaaataacaaaaacttaaaattttgctaagtactgtacttttttttttttgtgattgcaatttgcttaaggtgattgatgaacgaaggctatatgtaaaaactggaaaggagtgaatcaatgtgagaagtgggtgagttgttacttcgttagaagagagatttgggtttatttcgctttccctgaattaatggtaacgcacccttttggctttggttgttgcgtgtcatttatttctcttttgtttttaatcttgttatatccattttcttatacctactttactttttttccataaaatgagattatgcaattcaatcagtaatgttttaaatcgcatacacttttatatttaacaatatgccttcactaatttgtatttcaagattagttagtgatattttatagtaaagtttaaagaacattataatgtagacgcaatcatagagtttttctttgtcaaaggcaatattgcaacaaaaaaaaaggtagaaacgaagacatttttttttttgtgtgtgtaatcagtaatcgccttacacaaaaagacatatacttttttgtgtaaggttttttttttttgagctactatcactaaatttgaaatcaaataattgatactccaataaaagtagaaataatatcatagtatatgaaaaaacaaaaaaaaattacaaggacgatgaaagaaaaaacaaaatctcataactcaaaatcaaatatcatctccaagttcttaacatgataaaactagactaaaataaaaactgacatcctactaaaattagaaacaaaatgacataaattgaaatcaaactcacaaaaaaaaacaatagacattaaaacaaaaaatccgaataacaaaaaacaggatctcagctaaacaaggcctggtgtagtatactagtattggcccatggcccatggtttggtatttttttttctctgaccaaaggaagaaaaaaaaaaagatatttatccgtatggcgccaagaggtttgtgtggttttcgatttcatccaaatttctgaatttcgtctctaacatccacaaaatcgaatgcgttgtgtgaatcgcgttgattgttcttggtcacggccaagcgaagcttaccgtatcttaccctccggtggtcacctttcatctggattccatcaatgtcctttatcgtctctatctttccgttcctctttcgtgtgttgctcctcctccacatctggaccgtccgattcaaatcccgaatcatcttcaaatcgctcttacagccgtagatggcagaatcctcttccccggcgtcaacatcccgatcaaataccgtcttctcagattgctcgtgattggatcgattcagatacaactccagtttctcaaggtagtttaataatgatcttatggaaaaactctgctcttacttatgaatttgtgaactagttaggatttagtaaattagagatattagtaatagcttgagttactgtttgtccatgaagcttgtgaaattgtggatgcctttggatcttactagtgtgtctctatgtaatattagctttagagagattcactgtagtgtcgtacaacatattgggagatggaaattcatcatatcacagagagttgtactccaatgtgtctgttccttacctcaagtggggctaccgcaaaaggttgatatgcgaagaactcattcgtctcaatccagacataatctctatgcaggtaatgaactttaccttgttttatatcgtgttaagatagttaagttgattttgtttgtggacctttgtaggaagtagataaatattttgatctattcagtatgatggagaaagctggatatgctggctcctataaggttgatgtatttccttgttcaatgaaaaattttatgcttataagattaatggggtaaaatgtaagacatggtttgtcggttggttttatttaccttttcgtctgaagcctcaacaaaagttgtgtttatatagaaggactacaaatataagctttgcaatggcagcggcgaactggagataacgtcgatggttgcgcaatgttttggaaggctgacaggtagcacatattgtttgactcaatctgtattagtgtgaagaaaaacgactactacaactcagcattgtttaagatttatcttgttttcaaaaggtttggagttttggagagggaaaacattgagtttagccagtttggtatgcgggataatgttgcacagcttgctgttcttgaggtagaaattttttttgaatgttttacgaacttcttttttcatgtatatgctttgactgatccagtttttttttgggtttcccgtcagctccggaagtctaataagtcaagaaagatactgctgggtaacattcacgtgctttataatccaaatcaaggagatgtgaagctgggtcaggtaagcctcgacatttcaatttgtatatccgctacacgagcaattgactgtcatgaaagtttacaaaatgttgatctggccctttcacctttggctttaagacttcaggaaattgtactgaatctcagtcaagagatgtttactagcattagtttaaatatctaagacaagtctaagttactagtatatgtcatgacatgttcattagtatatgtcctaatgctcatgaaaacgtattgaattcgtggcttatgttttttcttgagttcctgatttgccttgttcttgactgataggtccgttcactctgctcaaaggctcacttgctctctaagaaatggggtgacattcccattgttctatgcggagatttcaatagcactcccaaggtacgtatcttttcaaataaactcttccactttggtttgtgtatttgtttattcattgtttgagtttatcttattacgtgtagagtccattgtacaacttcttggcgtcctctgaggtatgactattcatagttttgcttcagtcaaactacactgtgtcctcttgtagtttctttaaataggattatgcttctatcttacagctgaatgtcatggaacatgacaaaaaagagctgtccggccagaaaaattgtcgtcctaccaaagttcttgaaactggtagcaaatccagtaatacaataactttcaggtaagattgttttttgaagatttaatcagttctgtgaatggttgtcttgtgactgcctgctggaatagccattgtgttcacacactagtagaagtttttgtagctcttggacaaaagaagagatccgtgtcgcaaccgggcaagagaactcgtactgggctgcgcatcctctgaaactcaatagctcatacgcctcagttaaggtaacaaacaaagctttaatgtccctgtctatatatgacaagaccttaaatttgctcatgaacatggtacacaacagggctcagcaaataccagggactctgttggtgaacctctagcaacctcatatcactcgaaatttctcggaacggttgattatctctggtaaaacattctaaacacaaccaaaactcaaatggacaaatttaatatttggctgatgaagtaactaattagaaatacatgtgtggtctggttaaggtactctgatggtcttttacctgcaagagttcttgacacacttcctattgatgttctatgcaaaaccaaaggccttccttgtcaagtatgtctttctatcaaacagtttagatttggtgaggtcatttctatgattgatgcttaaagccttattcgtctttggtttgcaggaattgggaagcgatcacttggctcttgtttctgaatttgtctttgaaccggacggttaaaggcatctagtgccagcttagttttctttgaaccgaaccgttataaatgtgtttttattaaatgtataagcgtaccgaaattacctgatcatggttctatatcaaaccgacttctcgataaataaataaaaattgagacgatcagaagcttcaatcttgtgtgcgtattgggtcactaggatattaaatcgacttcttcgaacgtaatttaaagtgagagaaccagtttacttgattctggatctaaaccgaagcggacataagcttggtttaaatgtaccaaaaagaaagaattgaaccaattggtacggttctaatcttggttccggtaaaatgaaaaggaattctaaagagattgagagctgtaaagttggaatcgaaggaagaagagacaagagaaagtgaggaaattaatggcgttgagctcaatgacatggggttacgcacggatcatagctggaacacttctcggcggggccctcggattctacgtaatgcatcgcatcgaagttagctacaaggtctgtttcttctctctgtcttcctatgagaaagcttgtgctcgaccttagactgttgggttttacgcagatgaggatggaggaagcgttgaatcaatacgagaaggatatgcagaagagacaagaagaagaaaatcttattcagatcaatgaagaatctgtttagcttatttcttggtagcatgccttcaaagtgttcgatgaaatgcccaacagatgtttgatgctgttttgactttttttctctcatgtatttttcggtttggtttggtctggcattatgaaaatgtttcatttgtctttggtttaataactatataccatgatggtggaccagagaagcagccatattgagcattatatgtatctttcatctattcaaatgtttcttaaagaaacaactaaatccttattacatcaaaattgctgttccatccaaatccttaatcagttatgtttctgttgttgttgttgttgtcgttgtctgttagaatgtgatgaggatttgatgtattagctacataactttgattttggaatggtataatggttttactaagctaaatttttgagagatgtcagatagaaaaagaattaactgggcaaaaagcatatggaaccgatccagctcttttggacttttaaaagtgtttagtcgggttctgtcttctttttaattctaaaaggtttcgtaattattttcttttcaccagttcaacttaaagaaacgccaaaacaacaaacaaaaaaatgtctagattttggtgtttgtgctcaatgaaagagtcttcatttcgtagggtcaacccaattcctgatttttcatggtaaattccacacaaagaggacatgtccaaaacagaacattaaatattaacatgaaagagacaggagagttatgttgttatttttttgggaccaaaccataattgcagaacaatactagtaagtattacataactgtttcagtttaattacgttatcatggcaaaattcatttttctctcaagaattgaatcatctatgtattttaagtctcattttttagtttaataattagatgcaaactggtagggctgatgaaccagtgaacacataaaaaggttccacaacttccgacccatatagttcgaattacaaaatataaaagatgtcctactgaacaaaaatagaaaaacatattaacctattaatagaattctcatatatgttcggttgagctgccttcgattaggcagattaggaaaaatagtcttttgaattctcctatagaagtgttttatatatcttatggatttgtatatccagcctggtatgaaatatctgtcctaaaatgaatttgtgctacgtttattaaggttagtttgcaaaatagaatttttgaaaaaaaaaaaaaaactctagctagcatgtatcagaaaatacgacattttgaaagctaaaaacatagagaaaaataacatgtgctatatataaatattacgtaagttgttatattttatcatgcaagattggccctggacttactcatcatgtacctatttgtggccgcgacttggacttcctctcgggtctttcagatgggtctctctaacatgtaccatggcactgatctcacccataaagaggtcacatttgatctttgctgctcctacatctatgtaggaaggaagtctctatccttccttttcataagcatccctttccgttgctatataattacccaaacattacaaaaaattatataatttgtaatatcatgacaaatgttatgctattacttagtatttaaaaatgatatgttatgcaattacccttctctgagctcatgttacacgtaagattaggaaaatgcgaggttaatgtgtttgttatactaaagccagtaaggtggcaaggaaaaaacaaaaaaaaatatccaatgcagggctatgtccctacatatataactattttgtggagatccagaaatttaaggtttgtattgagtgtttgccaaagaaataaaggttgtaatgagtgcaacagccaacaggcaagaaatgtcttgtctccgtgaacttcacgtgcatggtgcatcccctacccgttgccatttcgtgaagatcgtaattaagtttgattactttctcaattatgattaaaaaagatgtgatggattcgacctttcacttccttacgttgaaaatatataacccatgtgatttcccactttttatggaaaatgatatataccacttaaattgactcttctctttttttcctacgtaagagatagttgaatcttaaaagtttttgttttttagtttacaaattttagatcctgagtgtaccaatagatttaaaccggatttttttgtgtgtgttggatctaaatcttcaacgtaagattttgtttgttgttcaaaacgtaagatttcttaacataaaggtttgaaacattgaaactatatcttctatttaatttggtgtaaaataagctttattggtaaatattttctcttctaaacattgcgacaatttaaacgtagtaatacgtagattatatcacagtcagaaaacggtacttttgtttggtcccatatctgtttttagaagtttgtgaggctatacaatttaataaatctcctaactctgaattattctattttgtcgtcttatctgaaagatgtataaatctttgtcaaaactctaatttcgttttgtttcaatcggagttgtgggattcaattattacacgttttcaaagtagaatcactaaaatctttaagaaataaaatggaatccccaaatatttcacataaataaaaaaagaaaagaaaaacaaaaaatatgattgtatgtttcgcgagactaagtggtggtagttgttgtattcagtttcgtcagaaatagttcgagtctcactcttctagtcaaaaccaaaaagagttgcttgttcattacaggaggaaagaaaaagaagcaaaactagaaaatagtaagaaacaagatttggtaattggtaaaatagcctgaaatcacacttaaaaaatttatttgaaagagaaatatgtgcgtccaaaatattccataaaacgataatgtatgtgtgtacggaattttcttttagccaaatgacaaaaaaaaacccactaaaaaccaataatattcgtgaaaagaaagtaaactatataagagtaaattatacagactacgttattctttttttttttggtaggagactacgttattcttttgttgacaaagaaaaactacattcattacgatattttatatatgtggttcacaaaaaaaaaaaaaagcttatgactatgaaacattatgttttgaggcctctggcgatttattcgaaatgagctgtccatattgtaaggaagactgactagaccttaattcgtgatggatttcaattattagctgaccagagatttaaatgcaaaatatcataatggctggagtcagtagagtgggtgcattgttttgagaataagattcagtcgtactttgctcgtcgtatgaatatgtagcgagtgtcaattgatgttcaaaggtagataagttgtataatctctgaaactaggaatgtgttcagagttttagatccttaactgtaaactaagggaagaacattaaatgtatattcttcttatcaacaataaatatattacggggttaaatgtgaattgtgattagacctaattgttatacattaacgacattgtgatccgataacttttgactagctcgtgcatttctctaaaggcaaggcatataacacttagtttcgtgattttttatagtcatgcagaagtttttaaacatgtatttcaaaacaaacccgaaagctccttggaatttgcattttatgtatttatttagcagttaaccataacgttagtttgcatgttcaatttaaattcaaagaaattaagatgagatatggacggtctgcaataccgtatgttctaacataatattccaataatcaaagtgaataaatcaatctctaccgatgatgaatctttgaactgaaaggagacaagaaaacaatacatcaaatattttcaaccataatgggaagctagtcggtcacacttcacaaagtggcctttatttttgggttgtttcgttgaagggtcccgaatcaatggtagggaatactttctccttatctctttctctctcactccaatatatataatatgatgaatcttcacttccatttaaacatcacacaatcatcacacaatcaccctgaatccctgataataaggaaaaacaaaaaagtttgttttataaacacactttaaacaatgagggagaagtacacaaaggaggaagcagtgaagaattgggagaagaagaagaacaagccttcttcaccaaaaggagttggagagtttctgaaaaagaagaaaggaaggttctacattattggaaaatgtattactatgcttctttgttcacacaagtgatagtcaacacacattttttcatacatatttatgttatcatgtataggtatagatgatgatagaggtataaaaaggagagagagctcaacatatttacatctttaacatttcggtgttcatctctcattttatgtgggtgtgttcttgttgtcgtcgtcgttgttatatatggaaatatatcactcaatattcttcttgtgaactatatatataacggaatactatctcccatagtcccatgtttgtagaattaatattaatgtatgaataataaattcttagagaaaagacaaagacgatgcttttgagtactatatggagatgcatgcacacaaacatgtattatataacaaagaaattggattcagtacttacagttagaattaggttaaggtaaaagaaaaaggtaagggaaacaaatatcagtctcacatgtgttaatgcgcttgggcgtattttgattatgttagctggtcattatcagttagtttaaccattagtcattctacaatctgtagtgtgacgtttaattacctgatgattcaaacatttttcactataaatattatgaagttatcagttaggttatttaccaaacaaaaattcaatgacataacaactaaagtctcattccctttaaaaaatggtaacttttgtaatccatttcgagaagacaacaaacctaaattggctttgtgaagtaagattcagtcgtactttgctctttcaatacttgaacattaatgaaaaattccaagcaaaaggaaataaaaataaatagtttgactcaaatttggtaatgggcttatagtgttattgggtcttcatcttcagcccaaataatcttttactctttcaagtctgaacgtcgtcatcttcgttgtcgccgtcgtcgtttctctcatttctgctctgttgtgctatcgtagcgtcgcgctcctttaaacgcgacggacgcagccttctctgttcatcgtttcgccggaagttttcttcaggtatgatattttgagaccgtcgttgatatttttattcagtttccatagagaaaaaaaaacaattcctgagttctggatcgaggatcgatttcgataatactcgaagaaaagttgggttcttcgtaaagttatttgttgtagctgtgtgtggagttctttacattttcttcgattttgattttagctcttcgtatatgaaactttttgatttttaaaatttctcaaattgggtttttctttgtttctcttttggcacagcggagatttattttcagctggttagtagttttgagtgactactgaggtaacaatggttgtagaaactatcgagaggtcttgtgagggttcaaagagaagacatgtgaacggtggagatatcgctgttccttgttcgggagaagagtgtagcaatggagatataaatgtagctcctggagtttcagcggtaagctaaaaaccatggcttccttttaatgtattgtcagagatttggttggttctgcttttggtgatattggtcattgttgtgtcttatgcagaaaagagctagggtttctagagaaatgacgtttgaagatatttacggtgctgatgcattactcaatgatgacgatgatgaggatgatgattgtgattgggaacctgtgcaggcgcctatggagtttgtaaaatggtgttgtgtcaattgcactatgtcgaaccctggtgatatggtccactgttgtgtacgttttttatttactttttcttgcttggctactactttttatgatttcaaagtgacaaacgtacgtctgagcaatgcgcattggacattggttatgtattagtaaagttgattccttgacgtagatatgcggtgagcacaaggaatctggcattttgaggcatggatatttagcgtctcccttttttaaagacactggtctcattgaagtcgaggagaaatatggaggtaggaattacttcccttgcttcctctgaaaatgtctttataaatattgttagtctcagttccatgctatttaagtaactgtaagcatgttcacttttcttttaacttgatattaggaagctcatctgcaaccagctcgacagctgttgggttcgacgagagaatgttgctacactcagaagtatgatcttgttactgttatgtgttatgttttcctgagaaacctctagtatctgttgacatctctacattatcatctccaaagcttttcttcgtgcaagtttttctatttaatatgtgctgatggcatgcttaaaaagtttgaagtgaaggcacaaccacatccagagagacctgatcgtcttcgagctatagctgctagtcttgccacagctggtatgttgcgtttacttcctttaaacctagcctctcttgagaagaagactaatgtttggaagctgattattattaagatttggagatcattatatagatctcttgcagccgaggtaagttaaaactaaaaaggaaaataataaaattctaattctaaaaggaaaagatcagaacataacttcttcaattaagaagcttctagcgtccttgtctaccttctctgagacttgatcccatatatcatatcatgtgtttcattttacagtatcatactgttgggagtaattttggtactcaccacgtttgaatttttttgcaggtgtttttcctggaagatgcttgcctatcaatgcaagggaaatcacgaaacaagaactccagatggtgagctgctacataactgtcttagagacaattctaatattatgttcattgcagtacttttacaagcaatttcataactggtttgtatatgtcaattttgaggtccacacttcagagcatgttgatgctgttgatactacaagccagcttctctataggtttgaattttaaaccatttgttacttttttttttgcgttcaccgtgcatatccttgcttgttaatctgactgttcaaacttgaattgaaatttcctttaccttcgctgctcctcatttatctctttttgctcttgatcccgttcttttaccattgtctggcagctacttcacctctgacacatatgctaatgagtattcagcacgtgctgctagacttgcagcaggtttgtgcgctgatctagctacagatattttcactggccgtgtaaaaaatggttttgctttggtatgtctaattcaccaaaatttttaaatttaaagatgcaactacacaattgctttaaattgaaattacaccatattagtttgaaaaaaaaaaatctctgattgtatcaggttagacctcccggtcatcatgctggcgtcaggcatgctatggggttttgccttcacaataatgcagccgttgctgcattagtagcacaagcagcaggggcaaagaaggtgctgattgtggactgggtaatgttactgataactctaaactgggtgattttgtagatcttcaaacttttttaattcgttgtactctgcattgtgtggtttggctcatatcaatgttatatctaccgttgcaggatgtccatcatggcaacggaacccaagagatattcgaacaaaacaaatctgtaagctgcccaaatctatgcatgtctgcacatcaattttggagtgttggatgcagtaaattatttttgtgagttgaccttgtttgaacttattactgggagtcattgcataggtattgtacatatccttgcacagacatgagggaggaaacttctatcccggtactggagctgctgatgaggtacctatgcttttctgttttacattgtctcatccagcattcatgagtagatttagttgttggtatatatatgcatataccttatttgtgtgtttggtttgcattatgatttatgtcttaaattttgggattattttctaatttctgccttgtttccaaaatttgaattttctctaggcggcagaacaatagtttgctaatgttaattatgggtgcaggttggttctaatggtggggaaggttattgtgtaaatgttccatggagttgcggtggagttggggataaagactatatctttgcgtttcaacatgtggttctccccataggtacagagtcgttctacttttccccatttgataaacgttttggcttaattgatgactaatatgctcaggaagtggaccaaatacatttagctcacttttgaatgtgcactcagtctaattttaactggaaccttctcttgcagcttctgcattttctccagattttgtcatcatatctgcgggatttgatgcggctagaggagacccactaggatgctgtgatgtaagcttcatattcgagctgtaatttaccacttctggaatcagtgtattgttttgtggatatcaacagaggatagatgttctgttctactccttttttcaggtgactccggctggctattctcgaatgacacagatgttgggtgatctgtgtggtgggaaaatgctagttattctcgagggcgggtatgtgttttgcagttttttggagtagcctcttggtttgtaaggagcagcttttgaataatctcctgttttcatttgcagctacaatcttcgctccatatctgcttctgcaacagcagtgatcaaggttagtctctatttcaaacttgatatcctttaaaatctgcatatagttatggagattcatgatcccgcttaatctataaaggtgcttctgggtgaaaatccggagaacgagttgcccatcgccaccacgccttcagtagccggcctgcaaactgttcttgatgtactgaatatccaactggagttctggccatcacttgctatcagctactccaaattactctcagagttggaagcacgtctgatcgaaaacaaaagtgagtgatgcttcccaaaaaaaaaactatttcattcttcatccttctttctcctaataaaatctcactggttttacagaaaatcagatgaaaaggaaggttgttcgggttccgacatggtggaaatggggacgaaagaagcttttgtacaactttctctcggctcgtatgatttcaagatcaaagtgattttagaaagcattcttcctaatccgtcgtaggaattgtctacacttacttgtaaccctaactgatctgggggaatttattgcaattagggagctctgaacaatctttatcacttacatttggtagggttttatagaaagaacccttttaacctgcttaccaaccatcctcatcagacctcttaagctaggcaatcggtttggataaacgaattcctactttaaccaaatttatagttcggtttggtttatcttaaaattattgatgtcgaaccaaaccaaaaacaaatttcttgttcatttctcggtgtccaaaatcctcattttccaataattccggtatattctttttggttttggtatatttcaatcaatttcagtatatttgacacagtttgatacggctaggaaatttgatttacaaaaaagaaaaaagtagaagaatttaagaatatttagaaatttatgaaaaactaaaagagcttctaaatacggatatgttcaatcttccaaaaccaaacaaaacagttttgtcggtattttgaaccaaatctaattaccaaaattttggcactgttcggctaagaatattagtccagctctattaaataagaactttcgaataatcgcttcgattcagattaattctttctgattttaggtagatagaggggctatcggttaatttcgattatgaactagctgaatttttgtaaatcaaccacattttatttaatcatatgtttgttttctaagagaatttgaatctaaaaaaccttgtatgtttttaaaacttttataaaatctttttaaaatccttgtaaatccttcaaatatttcaatagaatctttataaattcttataaagccctttaaaagcatttgtaaaaaacgttaaaaacacttgtagatcttttttaaactcttataaaatctttaaaaacatttgtaaattcttttaaaactcttcataaacctttgtaactattttaataaaccgtttaaaacctctataaaaagttttaaaagcatttacaagaatttgtagagagatttaaaatccttgtaaatccttttaaaatcctaattaagtccttaaaaacatttgttgctcttttaaaccctttcaaacttttgtaaacccttataaaatatttttgtcggattttgttttgtcagaattgttttggcgggaaattttttgtcggaaagttctttgacgagaaaatttattctctcattttgttgatttttttttcaaatataggtaaaatggtcattaattattaaaagaaattatcaatgacaacggactatatgaaaagatagtattgaaaaaaaatatcaatggaaaaacattcctaacaatttctcttcattttcagtctgtaattattggatcgagtaaaaagtatctcaaaacttaagagtatccaaccaaattaaactcgactagtatagtatttttaaactactataatcaaaagcaaaaataataataagataatgtctagtatattattattattaaggaaccgaaacatacaatctgcatagtcggatgttgcttgaatctttcccgcaacaaagttcataatagtttgaaaaaaacagttaaaagcagcccacatttccggcgacgaagtcggatatactcttcctcttcagtcccatgacgagagaagtttgttacaagtgacgataaaaaatattccacttaagcatcataagacacaaaagatctaaataggatcactaattctcgtctaagctatttaacataactcaagcttgtgcctatgttgtaataaccaatctacgtctaagtagaatcatgccaatatactattttatgaaaaaaaactagagcactaaataaatatttgatttaaaaaacttattttcaagcattaatcaataaaaaaaacatgaatcaatggctcctaaaatcgactaatagccacttatttaatttttgcttgaaatttgtacaaactctgcaacaacaatgactaatattattagatggcaatcctaaattataataatttttttagaatttgaatatgtagctggctcataaatacagaataatcggaacaaaaaaatttagattgatgaaaaagaaaaaaaaaacagaggtacggaaagattaattagagaaggtgaatatgttagttaccataactattttatctcctatcggtattcattttgttattcacattcacatattgatctttggcgtatatgttttaataataactcttattttaaagtttttataaatgtttattcttttgttctttaaactatttaaagtctactacaatcgttatgaaaaatttattttccgaataaactatctcataatagtatgatattagctacatatttccagtatagttatgatttgttaacaatctgctttgattaacttcaaaattcgtttgttcgagtttctagactatgcaatggtgtgaataagaaatattaatcaaatttcttttcaatacattgtaatgcaaaatggctcttctacttttcgatatatttttataattatttgtatggtagctaagtacttgatcaacaattataataggcaaaataattgttagctatctatatcagactagggagtaaattaaacgagctttactaacaaaaattgtagaattatgtttttgccctcatttagtttcatcccaagcaacgaccacaactacaagaaccgatttaagctatttacaaaaccaaaaaccaaaaaacgtcaagggttcttcacagaaactgcctgagccagtggcagtctgcagcatctttctctagctcatctttcatctcacgaacccgttgaagtgaatctttaagctccattttatcaagtggtatcgctgcaaactctttcagaaacttgtgagctcgctctgcccctcttgatacttcatctggatcatcttctctgctctttctcttcccactctcctgcaaacaacaacacgagaattaaatctttgtcacatagatttataataatacagcataaactgcagaatgggtgaatgatagaatgattccatcatcaaccaaaaacaaagggggaaatgaatcaagacctcattgttgattatcatggaggagggagagaaatcttccagctctgcagctttctctcttgcgagggccacgacgctttcagggaagttggcaaattccgccacatgaatcccaaagctctggtcacaggcccctggttcaacctaaccagacaaacaacacaccacacaaaattaatttcaatttcatctttgtaagaaaatcaaataagtaatttagattaaacataaaaacagagacacttttaactgcaacagagcagcaattttttaatttataaaccagaccttgtaaagcatggtgagtttgcggctttcagtgtcaatgtgagcgctgacatggaagtttgccacaccaacagtgttaccagagacctcagagtttgcttgagccaaggcagtaagttcatggaagtgagtagcaaacagagttggtgctcttttcacttgaaccagatgctcacatatagcccaagctaaacctgatatattcaccacgatgatgtcaagagcactgaaatctcacatatgaccataaaaatgaacatataatagaaaacttactaaaaacatccaaatgaaagaagagaaattgcagagaaactaaccaaaaccatcataagttgatgttccacgaccaagttcatcgataattatcagtgacttatcactagcgcctttcaatatcgatgcggtttcaagcatttcttgcataaaagttgacactccacgcagctaacacaccaaaggaaaaaaagttggaataagggtgttcaggatatcagcagtttttcgttcattgagggctaaacttaaactcacttggcaatcgcctgctcctacacgggcaaagatgcagtctcttatggaaattgatgctttatcacaaggaacaaaggaaccaacttgagccatcagcacaatcacaccaacctgggatttataatggccggaaaccgactttagtcatacgtctatgaaacaaaactgaactagaggaaatcatcatacctggcggatgaaagtggacttccctcccatgttaggccctgttactatttgaaaccaactcttccctctcatctgatttcaaagaacagtaaagggcaaacaaggatttgttcaagtcaaaagggaaacaagaaaaacaaagacgtctcagtttatttaccacattcaatacttacgagtctgcaatcatttggtatgaaattcacccaatcttgagcttctacacatggatgtctgcttccttctagtacaatatctccagcatcctacaatttattaaccgtgctctcaacataatgtcataaacttggaaagaaaaaactattcattttcagaacaaaataatcaacttgagtttgtactaaccgaagaggtgatttctggcctacagtatggagtagggcaactggcagccaaatcagcaaagcttaacaaaacatccatttcagaaagtaacccagctaagtcctcaaatacctataaccatacaatatacatataaattccacatatagtttactatgattttaaacaaccaattctgtaacagtccaatgcttaatatgaataactaaacatacctcagagaagctggtaacagtctcaactacacgatcaacgagctccttttgacagctcctataatcatccacaacactttggtactggtcccccagtttttttagctttgtgtttgtgaacttcactccgtctttgcgagtctccagcactataaactgtgtcgtcagcttcttcctgatctttggctcttccttcttcgtgatcctgaagacatgcccaaattgcgctgctttgtcaagtttaagagccttgtcgacctgaagatcaagttctatcgctgtctttttgtgcaattcgtgaatctgctgctccagcaattctttctgatctttcagagatgccaatttggtgtcgtagcttgaagatatcatgtattctccattttctagctggtcaagatctacagagcactcaaccaaatcgatgaactttccaaggtgatcttgatctgataaagcctcaagctttttcaggtatctctcgctgatgagtgatgcgaattctccggtgtactgttgcatagctgttttgatgaagggaagccttatagttgactgcagagaaaagatgaagacttaattagtaatgaacttaataacatacctataacttcagagttgcataaacacatttaggacaatgaaaatgcaattttgttaacattgagagaagcagattgaagtgcggaaagtacctgatagagtttaataatgtgctgtaacccacctcttcttctctcgagactgcgcaaaagcctctcaacatctgagattcgcttcagatgctgtctaagatc
